United States Patent Application Publication US 2022/0102000 A1 - sequence listing, part 17

SEQ ID NO: 3451 - DNA, 32759 bp, Unknown
  16S sequences of unknown bacteria
tgtacgccttcggattcgattcacccattctgagcattttttcctatccccaaggggctgtaaaaaaacttacgtttttttacagcccctttgtcttttacagattgatttttataagtttcaattttcgctcatcgttccactatgggagccgctttgtccgttatgcatgcgggcgttacgataacctttttgatggtcttgtccgacggaacgtcgaacattatctttgttatcgcgccctcgactattgagcgaagacctcttgcgcccgtgttgcgctctgccgcacggcgcgctatcgcgtctatcgcttcgtcggtgaattcaagcgttacgccgtccatcgccaaaagcgctttatactgtcttatcagcgagtttttcggctcggtcagtatctttttcaacgcttccgcatcaagtttgtcaacggttacgacatcggggattctgccgacaagttcgggaataagtccgaattttatcaggtcatgcgcttcgcatttacgaagataataggacgaatcctcttcttttttgctctttatgtcggagccgaagcctattgcgttgcccgaaagtctcttttgaattatcttgtcaagcccctcgaatgcgccgccgcagataaagaggatattctgcgtgttgacgggtatgcactcctgattcgggtgctttctgccgccctgcgggggaacgttcgcaaccgtgccttcgagaattttcagaagcgcctgctgcacgccctcgcccgaaacgtcgcgggttatggacgggttttcgctcttacgcgttatcttgtctatctcgtcaacatatattatgccgtattccgcggtctccgtgtccatgtctgccgcttgaagcagtcgcaaaagaatgttttccacatcttctccgacatatcccgcctcggtcagtgttgttgcgtccgctatcgcgaacggaacgttaagcgtctttgcaagaatctgcgccataagcgtttttccgctgcccgtgggaccgagaacaagaacgtttgatttctgtatctcaacgtcttcatcgtgcgggtcacgctttgaaaatacgcgcttgtagtggttgtagaccgcaacggaaagcattatctttgcttcgtcctgcccgataacgtattcgtcgagtaccgcttttatctccgcgggagtttttatctcgatattctttttctttgcttccgattttgcttttttgaaacctttcagatattcgccgcaaatttcaacgcactcgtcgcagatatatacaccctcgtacatacttgcgataaaacgcttgtccttgtcgtcatcggtcgccccgcaaaaggcgcattgctttttttcttctgccatatacaattacctttcggggttatctttttgttaccactttgtctatcagaccgtattcgcaagccgcagccgcagtcatgaagttgtctctgtcggtgtccttttcgataactttgagcggtttgcccgtgttttcggaaagtattctgttgagatccgctttgatgcggagaatgttgtctgcgtggatcttgatgtccgttgcctgtccctggaatccgccgagaggctggtgaatcattatctcgctgttgggaagcgcataacgcttgccctttgcgccgctcgaaagcaggaacgcgcccatacttgccgcaagacctatgcaggtcgtgctgacgtcgcacttgatgtaattcattgtgtcatagatagccatacccgcggtaacgcttccgccggggctgttgatgtaaaggtaaatatctttgtcggggtcaacggattcaagataaagcaactgcgcaacaacaaggtttgcggtcgtgtcgtttatttcgtccgtcaaaaatatgattctgtcgttaagaagacgggagaatatatcgtaagatctttcgcctctcgatgtctgttcaacgacatagggtaccaaactgctcatgttttcgctcctcctcggattgatttttttgaaaacgcaggggaaagccacaagtgacctccccctccgattatacgcttatatcagaccgattattcctcgtcggatttcttggtcgtcttttttgctgctgtcttctttgccgcaggcttcttttcggcggtttcgccgtcagcctttttagcggttgtcttctttgccgcgggcttcttttcggcggtttcgccgtcagcctttttagcggtggttttctttgccgcaggcttctttgcagtcttcttctccgctttttcttcggttatctcagccgcgtttttaacagcttcgaacgccttgcgaacaacgaggtcttttgtgatgctgtcggtcaggtagtcggacttgatcttgtcaacttccgcgccgtaagcctttgcgagtttgtcgtattcctcgttgatgtcagcctcttcaacgataactttttcttccgccgcgattttttcgagagcaagacggtccttaacgtcgcgaaccgcgccgtctctgaacatatctctcatctgcgcggtggtggagttcatatattttgcgtaggtgtcaaggttgagtccctggcttctgagtctctggtcgaaagactgcatctgatagtcgatttcggactcatacatgcactctggaatttcgccctctacaagttcggcgagtttgtcggagatttgcgcgtcaagatccgcttccgccatctcttcttttctctttgctatcttgttctttatatcttcggtgaactcagcaagagtatcgaattcggaaacgtctttcgcgaaatcgtcgtcaagaacagggagttcctcaactttgatctcgtgaagtttaatcttgaacacagccgctttgcctttgagctcgtcggtgtattcttcggggaacgtaacatttacgtcgaactcatcgccgatgtttttgccgactatctgctcctcaaagccgggaatgaaactgcccgagccgagcttgagcgcatagccctcggctttgccgccgtcaaacgctttgccgtcaacgaagccctcgaagtctatcgttacggtgtcgccgttctgcgccgctctgtcgtcaacatcgataagacgtgcctgctgtttctgataatccgcaagttctttcgcaacgtccgcttcggtaacttcaacggatttcttggtcagtttaagacccttgtaaccctttatctctatctcgggtttaaccgtaacggtcgctttgaagcggaagccgttctcgccgacttcgagaatctcgacattggctctgtcaaccggctctatctttgcttcttcaacagcagccttgtacgcttcgggataaacttcttccatcgcgtcgtcatagaaaactccggcgccgtacattctctcaaccatttttctcggcgctttgcccttgcggaagccgggaacgttgagcttttttacattctttctgtaagatttttcaacagccgcttcaaactcgtctgcgggaacgctgatttcgagttcaacgacatttttttctttgttggtaactttttcaagtttcatgttgaccttgtctcctattttttcacatttacagggattatagcatatttaatatataaaagcaatagtaaatatatttaatttaaaaaaggtttaaagttttgccgctatgcacaggacaaaaacggcgaaaaaagactttcataccgaaaaaattgttcggttattcggttatatttcctgtcttctgaaaatgatgattccgaaaacaaatgccgccgccatataaaccgcggaaacggcaatcacgcgtattgccaattcggaagtgaggttagcagacgtcccgtttatgatgtcgaatatgttcatgttgagtggagaagtcgcctgaacatcggaaagacaacccgaaagccaatagtccgaaagacggaatttttcgctgtctatcgcggcgtccgcaatcttcaataaaagagccgttatctgcggcgcaaaaattccgaacgcgatcgcagctgcggtttttttgaccgctttggaaaatatataaataatcgccgtgagagaaagaactataagcagctgcaataaaaccgcgttccaaagttcggcattgaatttacctattccccaaaaaatgcttccgaatacaaatgcggaaacacttgatgcaacaaagaccagagccgctgccgtcattgaaacaagaaactccgccgtaaaaatcttgcagcgtgaaaatcctgcggaaacgactgtttttattgttccgcgcgaatattccgaacaaacgaatattgccgcaactatcgcaattactatgtctatatctccgagtgaagtcgcgtttctgaacgcttccgcacccgtgtagcctattccgaaataggtgtcgacatcattcatgtccgatgtgatatttgtcgcaatctctataagtttgaatgctccgagagaaaggaacgcaagcgccgccgcgacagccataaatatccaaaaactcttttgcctgaacaggcgtctgtattcaaatctgaaaagctttgtcatatcagctgcccaccctttcgataaagtatttttcaagcccgtccgtcgtaacgtaaagtgcgctgacagccactccgttttgtacgagcagtttgttcagttccgcgctccgctccgcacccacggatatttctatcgcgtgtccgttgacggttatcgccgcttctccgactgcgtttttgagcagttctgcggccttttctgcgtcgtccgcaactatgcgcagtttgcattcgccgcgagcctttatttcggctgcgccgagttcgtccaccagcacaccgttgttgattattccgtaccgcgtaactatttttgacagttcgtcgagcaggtgagacgatataaggacggttattccgcgctctttgttcagtttcacaatgaggtcgcgcacctctttcattcccgcagggtcgagaccgtttacgggttcgtcgagaacaagaaattcggggtcaccgagcaacgctaccgctatgccgagacgctgtttcattccgagcgaaaatttgcctgcctttttgttgccgacatcgccgagcccgacaaattcaaggattccgtcaatgctgttcgcgtccgcacctttgagcaatgcaaaacgcttcatgttctcctttgccgtgcagttcgggtatatgccgggcgcttctatcagcgcgcctgtttttctgcccgcttcttctcgggaaatgccgccgaaaagttcaaaactgccctcggtcggctcagaaagcccgagaatgacacgcatgaaagttgttttgcccgcgccgtttttgccgatgaagccgtaaatgtcgcccttgtttatcgtcatgttgacgccacggacaacatatcttgaaccgtatttcttcgacagtccgacggttttcagtacagtttccatattccctcctcagtttataagtatcggtttaaaaccgatgaaatctcctgcgatgagtctgaaatctatgtcttcgtgaacgcccgtgaccgcaagcgcgtgtgccgttggtccgtgcagatgtccgtaaaaaaccctctttattccgaattcgtgcaaaacgtccatgatgggcgcgcatctgtcggaagcaaacagcggcggaaaatgcaaaaagacaacgggcacggcatcggggtcgagcttttttgccgcagatatcgaaagtttaagcctgcccgcttcgcgagccacaattttttcgtcttcctgtgttccgacgtccggaatccacccgcgtgtgccgcagatatatttgtcgccgacatgaaaagcgttgttctgcaacagttctatgtcgtcaaagcccttttctttgagaaaaagatttatcttgcgcagagtcgaccaccaatagtcgtggttgccctttaatataatttttttgccgggaagtccgtggataagcctcatgtccgcttcgacttcttcgagatttatcgcccacgatgtgtctcccgctatgacgcaggtgtcgtcttcattaagacaccaattttcttttattttgcgtacatggtcgtgccattgcacgccgaatttgtccatgggtttgccgacgctttccgacaggtgcaggtcggctgttgcataaagtgccatatcgttctccgaaaaaaacaccgcgccgtgatttttttgatcgggcgcgggatatttttgcgtggtctgccgaaaactcaaatgtcgggcaggaaacagaaaaaagcgtatttgctttttttcggtttttgcggcttggatttcttgccgctattctatgtttttgagtatcggcgcaagttggtctatatcgtcaagcgttattctgccgagttttgccgcacggaattcgtcaagcaacataacggacgcgcgttcttcgtccggtctgccgccgctcaatataagtccgcgtttttttgcgataagcccgagcaggtcatagtcgtcctcgggcagttctcccgtcagtttatagcgctcacggaaattcttttcgtaatgcgcgcgcagtattgccaaaaggtcgcacgccaatgcttccgtgtcaacgacgttgtcctttatcgcgccggtcatggcaagtcttttagccgaattctgattttcgagtttcggccaaagtatgccgggcatatcaagcagatctataccgccgccgagagatatccactgtctgcctctcgtaacgccgggtcggtcttccgccttgacaagttttttgccgcaaagacagtttatgaatgtggattttccgacattagggattcccgttaccatgattttgagcgaacgcccgcgcattcctttttccgcgttgcgctgtgccttttcgctgaaaacggcggttatctttttcattatgtcggagaccgccgccgcgcggttttttgttttgctgtcaaacagaacagcggtatagcccgtgcttttataatattcgagccattttttattctgctcggggtcggaaaggtcgcttttgttcagcacaatgaacttcggcttgttttccgtcatttttgcgatatcggggtttttagaggaaaaaggaatacgcgcatcgacaagttctattgcaacgtcgataagcggcagacattccgccatcattcgttttgcttttgtcatatgtcccggataccagttgatgttagccatctgctttttcctcctttttcaagaatatgtccgtcggaacggacggtgttatttttttcttacgataccttgccgaacttgtcgaacgggaagaatcggagcagcactttgcccgctattctgcgagtgtcaacgcagccgataacgcggctgtcctgcgaattgagacggttgtcccccatcacaaaaacatgtccgtcgggaactgtgatgtcaacgcacgggtgtccgttttcgtcggtcgtcagcgtatttgctcccgcaagcgctctgtctgcgggtcttgtctgttggaacgagtcgagataatcctcttgcagaacctgcccgttaagataaacgcggtagttttctccgtcatcggactttatctccaaatggtcgcccgcaacggcgatgattcttttgacgtaaagaatgtctgaattgtcgcctattgcgcgcaggtcgggttcgaaaacgattatgtctccgcgtgcgggcgtataaaacaggtcggaaacaaaatatctgtctccgtccgccatagtcgtatccatcgaatgaccgtcaacgtaacccgtcttgaaaagaaacgtcataatgaaaagcgaggcaacgaccgccaaaatcaccgcttcgaacacgtcgaagaagtctcttaacggttttttgctcggttttttcggcatattttcggcattttctgcgccgaaaaccgtattttcatccataaaacagcctccttgcctcggaaaagtaaaaagcggcagccttgcggctaccgctgaaagaataatcagagttgctctttaaccttagccgctttgccgactctgtcacgcagatagtacagtttagcgcggcgaaccttacctttgcgtacaacttcaaccttgtcgataatgggcgagttgacgggaaaagttctttcaacgcctacaccgtaggaaactcttctgacagttacggtctcggaaacgccgccgtgcttcttcgcgataacggtgccttcgaatacctgaattctctctctgtttccttctttgattttaacgtgaaccttaacggtgctgcctatttcaaacgggaaaggctccgctttgatctgatccgcggtaaaattcttaatgatcagttctttcattctctttttcctcctgaacagattttgtgtcaagataaagcagggctttcgtgcagagaaaagcagaggactgccccataaatcaagccttagtattatatcataccccgccgcgttttgcaatagacgaagttgaaatattttcaaacattctgtgaaatcgtctctttttcgcgtttttttgcgataatttttaatatgaagccgcgtatcatcagaaagatgccgaacgcgtaaaggcccgcaagaggcaatgctatcagatctccgatatacgaataaagcgttctttcggtcgtcggcacaatgtccgaaacaagaacctcttccgtatcggcgtttgactttttctcgattgttccggaagcggagatcacggcggaaatgcccgtgttgcccgcccgcgccatgtccctgccgttttccacgcagcgcatgaccgcatggcagaggtgctggcgcagcgccgcgctgccgtcaaaccacgagtcattgctgaccatcagaaaatattccgcgccagcttcaacgtcttcgcgcgcgacatacgggtaaatggattcataacatatcaaaccgcccgccgttccgaacgaggtgtcaagcgtcgtcggttccgttcccgcaacaagattgccgaaattggcgggaacaaacacggcaagcacatctgaaagcggaatgtattctcccatcggaacaagttcacgcttgtaatacggctgcggaacctgtccgtcggcgcgtatcgccgtcaacgcattgtattctccgtgttcgccgttgaaaatgcccgtcacgagagtggcatttctctcttttgcaaagtttttcagaaacgccataacgttttcattgctcatgttggtcgtgaccgccgtttcgggccacaggtatatgttcggcttttcgtctgcgacggagtcggacagttccacatacttttctattgattcggaaagcgatgtgtcccactttgtcattgaaccgaggtttgcctgaacaacggcgacttttaccgtctccgaattactgcgttccttttctacggcggaaacgcgaaccgcaccgtaagccgcattcaaagaaaacaggagcgccgcggacagaaaatacagtgccgcccgcttataactttttgttctgattatcgcaaatgccgtttccgctgtaagcgcattgaaaaatgcaacgataagcgaaacgccgagcgaaccgaacaaagatgcggtctgtatgagcgtggggtgagaagctacgaccgtgccgagcctgccccacggaaaagaaagttcccatgcgtgcgcctgcaaaaactctgcaaaaacgtaaaggacggggaagaggacgaacatcggaatttttgtcccgcgcaatctgtcaaacggcagaaacgcaacggtaaacacaaagccctcggcagccgcaatggtgattattgccgccgtcattatcagataagacggaactgcgggtatgccgtagttcgtcatcggacacattctgtaaagccacagcatattaggcagatagtacgccgccgcatatacaaagaaacactttttcgtgccgaaaccgccgtctttgtaaacgcgcagcgccgttatcatcggaacaagggcgacaaatgcaagcaggtcgagtttttcgaccgtgaacgccgcgaacatcagaagtcccgacagcgcggaaagcgcgacaagccgacagggaacgcgttctttttttatccgttgctttttcttcatcgtccgaagttcctttcaatcatatttccaaaatgaattatagcattttttcccgcgtttgtaaatatcggaaagggtaatttgcatacaattaaatgagaaatccgcaaaaaaacggggacgggagcatgaaatgaaggaaaaaggcagacttttgaaagattctttcatcatcggcgcgacgggactttcgctcaacttggtcgggctgtggttcaatatatatctttcgggaactctcggcacggatggcatagggctttttcaacttatagcgtccgcatatatgcttgcgaccacgtttgccacttcgggaataaatctttccgtgacccgcgttgttgccgaagcgctcagcctgcccgagacgcggaaaacagcgacgcgacgctttcgtaagtgtcttgccgtctctgccgctctcggcgggtttgcctgcctgctgctgtttgtcttttcgggcgttatcgcacgttccgtattgtgcagacccgaaacggagatgtgctttcgtatacttgctttcggactgccgtttatgagcgcaggttcttgtctgaacgggtttttcgtcgcggaaagaaaagcgtacaagaccgcaatagccaacggagcggaggaaatctgcaagatagtttttgccgttctcgtttttgcgctgcatccgccgacaagccttgtttcgggttgtgtcggacttgttctggggcttgtcgggggcgaagccgtctcctgcattttggcttacgctttttggcttgccgacgaaaaaactttgccacgctcgaaaggcggaactgcggggactgtgcgaaaaatgcttgcgataggcgcgcccgttgctgcaagttcttatttgcggacggggctgacaacggttgagaatctttccgttcccgtcggactcgtgcgttacggaatgaccgattccgatgctcttgccgcattcggcgctgtcaaaagtcttgccgtgcctgtcattttctttcccgcttcgtttatgtacgcttttataaaagtcatgattcccgaagtcgcgcgagcttacaccctcggcagaaccgacgccatacacgaacgcggagggcatataatccgtcttacgcttgttttttcatcggtcgtgacggggatttttcttgttttttacgccccgctcggcgcgctgctgttcgacaatgcggaaacgggcaaactgctcctttatcttgcgccgcttatccccgcaatgtatgtggacggcgttgcggacggaatactgaaaggcatggacgaacaggtcgccgttatgcgatataatatatatgaagcgatcatacgtcttgttgttgtttttacccttattcccgttctcggttttgcgggtttcatggcaacggtctatgcgggaaacgtcataaacacctctttcagccttgcccgacttcgcaaaaaagcggggataaaagcggagccgttcggcagcgtggtgcttccgacctgcctgacggttgccgcaggatttcttttcaaatacgttttttcgttctggcaaagccgcttttcggtcattgtcgaagtttttctgaccgtcgctctctgtgcggcggtatacgctttttttctctttcccaaactgcgggaaaaaatcagagcgtcttctccgcggcagaacgcccgaaatcgcgcgcgtaggaatattctgtaaaagaaaaggaaagcataaggagtgaaaaaaaacgaaaggacggaaaaaatatgaaattcctttattccgtgtatctgtttatcgcgggcggttttgtttatcagatgatagaaatggcgtggcgttccagaacgcattggtcaatgttcattctcggcggcgcttgctttttaagcgtgaacctgctccgtctgaccgtgctgaaagactgcaatctgtttctgttttgtctgataggcgggctttgcgtgacagtgcttgaatttataacgggctgtatagtcaatctgcgtttcggcctcggtgtgtgggactattcgtcagtccctttcaatctgctcggacaggtctgcctcccgttcagcataggctggtcgatgctgacgcttccggggttgtggatgggacgcgttctgtgtgacgtggtgggggttaaattcggctctgcttgacgttttcggaacttcgtgtgagggaaagataaaatgcccgagccgcaaaaattaaaaaggaaaagaacaacggctcgacagtccgacagataaacaaaacacatcaaacattgattttttgcatttttctatccctgcattatataaatgtgtaggcaaaacggggattattggtgaaagtacacataaaaaacataatttattgtaaaaaagcacttgtaattcccttgaaagtatggtatacttgacttgaagagcgggcgaccgctctttgagattatgtaaagaaatatatttgataataaatgaaagaccgaggatttgcgtttgggaatctgtgagaccgttgccgaagtcgtgaccccgtttcttgaaaaagaggggcttaaactttgggacgttgaattcaaaaaagagggcgcggagtattttctgcgcgtttacatcgaccgcgagagcggcgtgggcatagacgactgcgtaaaagtgaacgactttttaagccccgcacttgacgaactcgaccccattcagcaaagttactgtttggaaatatcttcggcgggacttgtccgcgaactgaaaaagaacgaacattacgaccgttatctcggaaagttcgtcacggttcacacatacaagagccttgacggggttcttccgaaaaaattcgaagcaaaactcgtcggctacgacgaagataatataatattggaaatcaaagacgaaaagaggaacgtcggacgttctctcatatccaaaataagcattgatttggtttgacggaggttttgaaaaaatgaaagcgaacaaagagttttaccgcgcgcttgaagacttggaaagagaaaagaatattccgaaagaatatatgcttgacaaaatcaaggcggcgatagcctccacgattaaaagagacaaaaacgttcccgcagataacgttgaagttatttttaacgaagaaaaagagaacataaaagtctgcataaagaaagatatagtcgaaacggttgaaaatccgcagacggaaatttcgcttgaagaagcaaagcagataagccgccgttacaaactcggtgacgtggcaatgcttgaagtcgatccctccgcagtcggcagaatcgccgcaaaggtcggaaaaaacgttatcgttcaggcgataaacgaggctgtgaacggctccgttattcaggcgtttgaagaaagacagggttcgctgatgagcggcaccgtgagaagcgttgacccgaagagcggcaccgttatggtggaagtcaacggtcacgaacttccgctgttcccgagagagcagattcccggcgagagttttgagcctgacgatgttataagactttacgtcagcgtcggtcagcccaatctgcgcagaggttcgaccgcaaaagaagttatgctttcgagaaccacgcccaaattcgttgaaaaacttttcgaggtcgaagtgcccgagatagcaagcggcgttgttgaaataaagggcgtttcgagagaggcgggttcgcgctcgaaagtcgcggttcgttccaacgacccgaacgttgacgccgtgggttcctgcataggaccgaagcgttcgagaataaataccattctcgaagaccttgcgggtgaaagaatagaccttataaaatacagcgaagatcccggcgaatttgttgcggcggcgttgtcccccgcagaaggaagactgcttgaaatagacaatgaacaaaagagttgcaaagtcgttgtgggcgccgatcaactttctcttgcgataggcaaaacgggacagaatgttcgtcttgccgcaagactgaccggttacagaatagacatactcagcgaataatggcaaaaaaagacagagttcgcggcgcttttatgcgcacttgcgcggggtgcggcggacggttcgataaacgggaacacgggtttttgagaatagcaaacaaaaacggcgagacagtgttggacgaaaacggcaacctcggaggccgcggcgcttacatctgccgtgacgtgaactgcgttgcaaaactgaaaaagtcgggcagactttcaaagttgctgcgcctgcccgttcccgccgaaatatacgacattgcggaggaagccgttgaccgataaattcaaaggtatgctcgggctttgccgaaaagcgggaaaactcattcccggggcggaactcatagcaaaaaacaaaaagaaatgcctgttgctcgtctgtgcgtgtgacgcttcggacaggacgaaagcgacggtcgaggcgttcaatataaaaacgatacacaccgatatgacgaaacaggaactcggagccgcgctcggtatgggaaacgttgcggttgtcggaataaccgatgcgggcttcgcggcggcgacagaaagtaaacagggggaaagaacatatggcaaaatataagataggcgagatcgcaaaagacttcggagtgaaagttaccgatgtggcggacattctgacaaagtatttcggagagggtcagtataagcacagtaccgtgcttgaatccgaccgtcttgacgtgctgtttgaccacttcacacaggcgcagggtttcggaactcttcaagagtattttgacacctacgacgagaaaataagagcgaaaaaggcaaaagaagccgaagaaagcgcaaaagccgaggcttccgagaaaacggaagaagcggcgcccgttcaggctcagcccaaagaggaaaagaaagaagaaaagcccgttgcggaagtgaaagccgaagcaaaaacggaaaacaaagccgaagtaaaagcggaaaagccttccgctgttgctcccgcgcccgcagaggagaaaaagcccgagcagacgcatgagcagaaagacagaaaaccgcaacagaaaaaacagccccctcagaaacagaagatgaagacgataactccgcgtcccgcggcaacccccgccaagggtggagtttccatcgtcgaggacagcgctctcgactcttcaactctcggcaaatcggttgttgttgatacgagaaaacagacgaacgttaacctttccaaatatgacgaaagacttaacgacattgtcggcgaaaaagcgaacaaggattacggaaaagcaaatcaaagaataaaacagaagaataaaagaaagcccgacaacgccgcaagaagaaaagaagcggaagcaaaactcaaaagaatggaacagtacgaaaaggacaagaaaaagcacctttcgaacattgtccttcccgaggaaatgtccgtttccgaacttgccgcggaacttcgtatgacgaccacgcaggtcattcagaaacttatgcagctcggaatattcgcttctgcgtcgcagataatagactatgacaccgcgtcgcttgttgcggaagatctgggcgcgaccgttacaaaacaggtcgttgttacgatagaagataaacttatcgacgattcggacgacaaggacgacgatcttgaaacaagagatcccgttgttgttgtcatgggtcacgttgaccacggtaagacgtcgctgctcgacgccattcgccacacgtccgttacctcgggcgaagcgggcggtatcacccagcacatcggcgcttacaaagtcaaggtcggcgacagacagattacattcctcgacaccccggggcacgcggcgtttacttccatgcgcgcgagaggtgcgcaggtaacggacgttgttatccttgttgttgctggcgacgacggcatcatgccgcagaccgtggaagcgataaaccacgcaaaggcggcgggcgttcccatcgttgttgcggtcaataaaatggataaacccgaatccgattttgacaaagttatgcagagcctgaccgaatacgacctcgttccgtccgcatggggcggcgacgttgagtgcgttcccgtttcggctgcgaccaaaaaaggtatcgacgaccttcttgaaaccgttcttctcgttgctgatatgcaggaactcaaagccaacccgaacagagaagcgaaaggtacagttatcgaggcaaaactcgacaagggcagaggccccgttgcaacggttctggtccagaacggaaccctgcattcgggcgatgttatcgttgcgggtacggcggtcggaaagatacgtcttatgactgacgacaacggcagaaaaattcaggacgcgggaccgtccactccggttgagataataggcctttcggaagttcccgccgcaggcgacgttttccatgcggtcaaggacgaaagaatggcaagagaacttgtcgagcagagaaaggcagaacagaaagaagccgcaaacaaggcaagagcggtcacgctcgacgacctgttctcgcagatacaggacggcaatatgaagactttgaacatcatcgtcaaggccgatgttcagggctctgcggaagccgttaagtcctctcttgaaaaactcagcaacgatgaagtccgcgtcaaggtcattcacagcgcggtcggcggaatcaaggaaagcgacatcatgcttgcctccgcttcgggcgctatcgtgataggcttcaacgtcagacccgacgccgttgcaagagacatggcggaaaagaacaaggtggacattcgcctttacagaataatttacgactgcatcgaagaagtcgaaacggcaatgaaaggtatgcttgcgccgaagttccgcgaagtacatatcggtactgcggaagttcgtcagacattccgcgtttcgggcgtcggaaccatcgctggctgtatggtaaaacagggtaagatagcccgtaacgcaaacattcgccttatccgtgacgacatcgttatttacgagggcacgctcgattcgctcaaacgtttcaaagacgatgcgaaagaggttgccgagggttacgaatgcggtgtcgtacttgacaagtacaacgaccttaaagagggcgacatcatcgaagcattcatcaatgaggaaattcctcgctaaaagaactgaaatcagcccggaaagagaaatttttccgggctgttgcaaaaatatgaagattataaaggatatttatacaaatggcaaacggttacaaacagggcagaataaacgaagaggtcaagcgcgaacttgcgcttataatccgtgacgtcaaagacccgcgcattcccccgatgacgagcgttgttcatgcgcaggtatcgcccgatttgaaatatgcgaaagtgttcgtcagcattctcggcgactacgacgaaaaagaagttcgcaagggacttaaagcctgcaaaggttatatgcgcagtcaactcggtcagagactttctctgcgcaatgttcccgaactgacttttgagttcgataagagcgttgagatgggcgcaagaatagacaagatactgcgtgagatagaaaaaagcggggaggacggcgagcaatgacagagacccgtcttcccgaaagcgatctcgctgcttttcgagaattgatttcaaaggacagaatttgtatttatatgcaccgttctccggacggcgacacgataggctctgcgctggcactcgaaagagttctgaaaaatgcgggaaaaagagtttgtcttgcctgctcggacatcgttccgcgcagactgcgttttgtcaccgacggaataattgcgtttgaacccgcatttgagcctgcggtaaaagtcagcatagatgtggcttccgaaaaactgctcggtacaaaatatgaaaatgaagcgcatgatttcgattattgcatagaccatcactatacgaatacgcattatgcaaaaaagaccgttgtttgccccgacgcaagcagcgcgggagaagtgctttttatgcttctcgaacagaccggaacgacgatagacgcaaagactgcggaatatctgtataccgcaatatctttcgacacgggctgcttcaaattttcgaacgttcgcccgcagactcacctcgcggcggcgaagcttatttctttcggctttgacacggcggatataaacagacagctcttcgacgttgctccgatgaagcagctgcttttggaaaagacagttatcgacaatataagaacatatcttgacggaaaagtttcgctttgctgcataacgcaggatatgctcaaagggctcggacttgaagacagcgaaacggacggcatgacaaacgttgtccgtaggctcgaaggcagcgtggtcagcgttacaatgcgtcaactttcggacggcacgatacgcgtgtctctgcgctccgaatgcgacttcaacgttgccgatgttgcggcttgcttcggcggaggcggccatgtacgcgccgcgggctgttcgcttgacggtgaacccgcggaagcaatagaaagaatagtttccgtcatctcggaaaagtggaacaaaacggaaaaatgatatttgtgatagataagccgtcgggcatgacgtcccacgacgttgtgtggcgcatgaaacgcgcgctcggacggaaagtcaagataggacatacgggaacgcttgacccgatgtgtacaggggtgcttcccgtgctgacaggcaacgatacaaaactttcggacttgctcggcggcgacaaggaatatgtggcaacgatgcggctcggacttgtgacggacacacaggatataacgggagaagttctggaaacgcacggaacggacggaatcggagaagatgacgtcagacgtgtgcttgcttcttttgtcggcgagacggaacaacttccgccgatgtattcttccgtcaaggttggcggcaaaaaactttacgaacttgccagagagggtaagaccgtagagagaaaaacgcggaaaataacggtttacgaaacagaatatctcggaacggctgccgaaaatgagtataaattccgcattgcctgttcaaaagggacctatatccgaacaatcatcgacgacgcgggatgtgcgctcggctgcggcgcttgcatgacttctctccgccgtacaaaagcaaacggtttttcgcttgcagatgccgtgccgcttgaagaagcggaaaaacttgcaaaagagggacatatcgcgtctgtctgccgcagcaacgaggggtgctttgaaaatctcggacgttgtaccgttcccgaaaacggcttgaagttttatcttaacggcgggtcgataggcgaaaaaagactttccgatgtgaccgaaagaacggaactgatgagggcgtattccgagaacggaacgtttttggggctttgccgccttgaagagggcgaaatcaaagccgtttggaagagaatatgaaaaacgtagttataacggggaatttcgacggtgtgcatctgggacatcgccgtgttgttgaaaccgcaaaaaaaattgcggacgagcaaggcttttcgaccgtcgcattcacattttcgaatcatccccgaaattgtttcagaccgcaagaccccctttattttataacgtcgccctccgaaaaggagcggcttttgcttgcctgcggcgttgcgcgggtcgaaacggttgattttaatgccgcatttgcggcgataagcgcggaagattttcttgcgctgttgaaagaaaaatatgactgtgccgccgtggtctgcggaaaaaatacaacattcggcagattcggcgagggcaacgccgacaatgttgcgtctcttgcagaaaaacagggaatgcaggctgttgtctgcgacctgaaaacgcttgacgcagacggggagcagataagttcttccgccgtgcggcgttatgtatcggacgggaatatgcaaaaagcgtccatgatgttgggcagactgttttctctttcgggacagaccgttcacggcaaaggcttgggctcgggctggggctttcctacggtcaacacccgttttgagccgcttcaactgttgccgaaacgcggcgtttacgcaacttgcgcaaaggtcggaaacgacctgttcctttccgtgacaaatgtcggaaaacgtccgaccgtcggcaattccgacgaaattaccgttgaaaccaacattatttcacgtcttgacggcgaaaaccttccgtcgctcgacctttacggcgaagatgtcagagtaggctttcttgaatttttgcgggaagaaaagaagttttcatctgtcgaagagttgaaaacggaaatagaaaagaacagagcgtatacggtcgaaaaatacggttcgcaattcagtaaaattgtgaaattttaatattctatttttaaattttagtacaacttttataaaagcacttgatttttgcacatatttatagtaaactatataagcaatagtaccaaacattacggatcggagtaattttcgaaatgtcaagcaagttatatcagaacgttatccaacaaatgaaagatacgacggacagagttgtcggtattcttgacgagtcgggttccgtcgcggtttgcagcgatcccgcgcttgtcggaaaaagcatgggcaacagcctttccgatattatgggaatgaacgaccttgtgtttgccgacgggtatacatacagagttatcggttcccgcattaaaatggataatgtcgtttttgtaaagggaacggacgaattggcgcagaacatcgccgccgtgctttccgtttctttgaacacgatgaaagacttttacgacgaaaaatacgataaatccaactttatcaaaaacataatgctcgaaaatattctgccgggcgatatttacgcgaagtcgaaagaacttcatttcagcggcgacgttccccgcgtcgttctgcttgttcgccttattgacagaaccgaggtctttgcttacgatatagttcagagccttttccccgataagacgaaggatttcgttatcaatatcggcgaaaacgatatcgcgcttgtcaaagaggtaaaaccgaacaccgaatcacgcgaccttgaaaaacttgcccgttccatagttgacacgctgaacagcgagttctacacccgtgccgttatcggcataggcaccgtggtcaattctctgcgcgacctttcccgttcgttcaaagaggcgcaggtctcgatagagataggcaaggtctttgacgttgaaaaaataatcatgtcttacgacaatctcggtataggcagacttatttattatcttcccacaacgctttgcgaggcttttttgcaggaagtcttcaaaaagggttcgatagacgcgcttgaccacgaaacgctcttcaccatacagaaatttttcgaaaacaacctgaacgtgtccgaaacatcgcgcaaactgtttgttcaccgaaacacgctcgtttaccgtcttgaaaaaataagaagactgacggggcttgatttgaaacagttcgaccatgcgatagttttcaaggtcgcgctcatggttaaaaagtacctgcaatcaaatcccaccaagttctgagcattgtccgctcgacatttttcggaaaggcggacggtgtccgtcgaaccgaaaaaacacagcgacaatgaatgaatatccgaacttgaaggtagagaccctgacagggcctgtaccttctacggcttaatatggggtatgtttttgtttgtatatatgtgataaaacagcccctcggatatgtttcttttgcataaaaaaggagtaaaaaatggtaaatttgaagtccgttaccgtaactcataaaaacggcacaacggcgctcaaaagggtcagcctgcgcattgatgacggcgaatttgttctcatcaacggtcactccggcgcgggaaaatcgaccatcgtccgcctgctgacggcagaggacgttccgacgagcggcgaagtggttatcgacggagttaatacaaaaaatctgacacacagacagattccgaagttcagaagacgtctcggcgtcgtttttcaggatttcagacttattccgacaatgaacgtctttgacaacatcgcatttgcgatgcgcgctgtcggaagaggcagaaaagaaatcaaaaagcgcgttgccgcggttatggagatagtcggacttaccggcaaggaaaaatcgcttcccacacagctttcaggcggtgaacagcagcgtgtcgcgcttgcccgagctattgtcaacaacccgaaaatgataatcgccgacgagcctacgggcaatatcgaccccaaaatgtcggcggaagttatggatatgttcagtctgataaatcagacgggaataaccgttatcgtcgtaacgcacgagcaggcctttgtcgatactcttgacgcaagagttataacgcttgaccacggaaatatattgaacgacacggcacaccccgaagttgcggaagaactccgtttgcgccgcgccgctcaaaacggggattccgaggaagaggacgaatacgaagaagaggtcgtttcggagaaaaaggcagtccccgaaaaagagcctgtttccgaaactgccgcacccgctgccgagatctcggcgcctgtacaacccgaacccgcgcagcccgaacttacggtagttttacccaaagcggaaaataccgaagaacagagcattgcggagtcggaacaaatcgcggttgaagcggctgaaactgtttcggaagaaacttcggaaaccgttgaagaagaaccttcgcccgagaaaaacgtggctcaaaaggcggaggaattccttgcctcgataggcatagataccgaaaagatacgcacggaacagccgaccgagatattcgtaaaagaatcggttgaaacagacgaaacggctgcggacggcactgcggaagaatcaaaaagtgaagaggaggctgaacaaagatgagttttgacggttttcttttctcactcaaaaatgctgtttcgaacatattcagaaactatgttctgacgatagcgtccgttatcgttctcggcgtttgtttgctttcactcggcagtacgatgctggtggttcaggacgttgacgccatagttgattccgtcggcagcgaaaacagagttgttatcttcctgaacgaggatatttctcaaacgggcataaacgatgtccgcgcccaactcgaacagataaagaacataacgaacattgtttacgaatcgcccgaacagtcgcttgaaaattatacgtcgcaactcggcagtcagaccgttacgggacttgacgccgccgttttcagaccctcgtttattttcgatataatagacctgaacaaatacgagcaaacggtctatgccattgagcagattgatgggctcggcgtgttcgaaagcggtgaaagcgcgggacagcccgcaatcagaacaactaaaacgctgatcaaccgaatagtttatataaagcagttgctgtcgtttttctccgttgtcgttataattgtattcttcttcctctcgatgttcattatcatgaactcggtcaagatgagcgtgtttgcgagaagaacggaaataaacattatgaaatatgtcggcgcgaccgatttttacatacagttgccgtatttcatcgagggacttctgataggtcttttcagcggcattgtctcattctttgttcaaagaatgctttacgtctcgtttatttcgcccatgctttcggatatcgttcccggcacgacgctgttctcgtttgatgaacattttgggctgatattcggacttttcgctcttgccggaagcgtgataggcgttatcggctcggttttcccggttaagaaatatctggacgtttaatacaataagatttatatacatacctcactcaacaccctgcaaaaaggaggcattacaatgaaaaagacgatatgtcttgcacttgcggttattctttgtgtcggcatagttttcggttttgcgctttcggtttccgaacccgccgttgcggcaagcaatcaggaaaaactcgaagaggcaaaaaagaacctcgaagcggcgcgcaatgagataaaagacatcaagaacagacttgccgaactcggaaacaacaagcaggaactcatggcaaaaaagaacctgcttgacgaacagatagaggcaacggaagcgcagatagcgcttataaattccgcgcttgaagtcattgaaaaagaacttgaagaaaaaggtgcggaacttgccgttgttcaggataaatacgatgcaacgatggtgaagttcagagcccgcgcccgcgcttcttacgaagcgggcaaccagtcctatctggaagcgatattgaccgcaaccgacctttcgcaacttataacaaaactcgacctcgtcgaagcggttgcggaatatgacagcaaacttctgaacgacctttccgaacaggcaaagtcgataaaggtactgtacgacgagatagaagaccgcaaaaacatgaagcagtccgaactcgaagagcaggcagaagcggaagcggaactcatttcaaagaaatccgaacttcaaacaactctgacaacgcttatggcggacgaggaagaactcgaagcgcaggagcaggcgtggactgaaaaagaggcggcttttgaaaaagaaatagcaaaacttgccgatagttccgcatcatattacggtgatgagttttgttggccggttcccgcatcttcatacgtttcttccggcttcggttggagaacatatacttataaaggcaaaaaagtaacgggcttccatcatgcgatagacatcgctgcgggcacgggcacaaaagttgttgccgcaggagacggcaccgtgctgcgtgcgggttgggtcacaacaggcggaggcaaacaggtcgttgtcgatcacggcagcagactcttgacttactataaccacctttcgggatttgccgtttccgcaggcgcgaaagtcaaacgcggtcagacaatcgcatatgtcggcatgacgggcaccgcaacgggtccgcacctcgactttgcgataatgtacaagggctcttatcagaacccgtcgctttatgtcaatccgagaaactcaaaaccgtcgagatccattaaagacctcgttcgttcttaaaactcggagaaaacagcagaaaaacaaagcctgtctgcggaaaaaaccgcagacagggtttgatattgttttgagaggtttgtcaagtgaaaaaaagtatcattgccgcatttgcggcgggcgttcttgccgcagttattcttttttcggtaacgggttgcttcggaacgcttaaagtaaatacaggttcttacaccaccgacacttccgttgaaaagaaacttgccgagatgaaatccgtcattgacgcttatgcgatagacgaatttgatgaggaaaaagcaaaagagggactttattacgggtatatgctcggtttgaccgacgataaatacgccgcatactattcggaagaagactataaaaaaatagtagacgaacttcaaggcaatttcggcggtatcgggttgcaattctttaattacgcaaccgcgacgcttgaacacggcatgaccgtttatcgcgtgctcggcaactctcccgcagaagcggcaggcttgaaaatcggggatgtaataacctccgtaaacggcaaaaaacttgacggaatgacctatgaggaagcttacgattatgtcgttgattttgtcaacaagggcgaaacgcttgcaatggtcgttgaccgagacgggcagatcctgaatttcagcctgacacccgcgcagttcacgcaaaaatacgttgaatataagatactcaaagacaatgtgggatatgtcagcatatatcagttcggcacaaactccgtttccgaactcaacgaggcgttgaccgaacttgaaaaagcgggcgttaagggatatgttttcgatgtccgcaacgacccgggcggagaacttgaatccgtttgttcgatggtcgatatgcttgtcaaaaaaggcgagaccataatcacgatagagggcaaaaaatctaccgaaacaagaaccgcgaaaattgacccgttggtttcgggcaaacccattgcggttgttgtcaacggctcgaccgcatccgccgcagagatgttttcttccgctctgcgcgacctgaacggcgccgttcttgtcggcgagcagactttcggaaagggtatcggacagacgacgcgcagactttcggacggttcgtatataaaattcacgacgttcaaatatttcaccgccgcgcacgtcgattttaacggaataggtcttactcccgatatcgaggtgcttctgacaacggaaaagcgcgcaaacctttataatctttctcttgaagaagacgaccaactctatgcggcatggaacgcagtaaagggttgaaacttcgcatttatttatacagaaaatcagacttgaaagaggttttataatgagcaaacagatcgaaatgacgcaggaagcgttcgacaaacttgaaaaagaactcatggatatgaaagcgctgcgtcccgagatagcacaggagattcaggaagcgcgttcgcacggcgacctttccgaaaacagcgaatatgacgcggcccttgataaacaggcaaagcacgaggaaagaatcgcggctctcgaagagatgaaaaaacacgctaagataattgacgagtcgagcattaaaaagggcgtcgtttccgttggctcggttgtaggcgttcacgattttgatttggaagaggacgttgaatatatcatagtttccaccatcgaatccgacccgcttgcaactcccgcaaaagtttccgaccaaagcccgataggcaaggcgctgctcggttgcaaaaagggcgcggaagtaaccgttgaaattccgaacggagaaagctacaaacttaaagttctttccgtcggcagagcagacaagagataaacaggaacggagaaacatatgaacgaaaacaatgtcaacggtcagcctttgaccgaagccgaagagcaaaagcaactcagcgaacaggtgcgcatacgccgcgaaaagttggcggaactccaaagtgagggcaaagacccgttcgttataaccaaattcgacgtcgatcaccacagcggggagataaaagccgcatttgacgaactcgaccaaaagaccgtaaccatcgccggcagacttatgtccaaacgaatcatgggcaaagcgtcgttctgcaatgttcaggatctgaaaggcaacattcagtgctacgttgcgcgcgacagcataggcgaagaagaatataaagcgttcaagaaaatggacatcggcgaccttgtcggaataacgggtttcgttttcaagaccaagactggtgaagtttccgttcatgcggaaaatgtggtgcttctttcaaagagcctgcaagtgcttcccgaaaagttccacggactttcggacaccgatgcaagataccgccgcagatacgttgaccttatcgtcaaccccgaagtcaaggacacatttgttaagcgttcaaagataatcgcttccatcagaagatacctcgacggtcaaggctttatggaagtcgagaccccgatgctggtttccaatgcgggcggcgcggcggcaagaccgtttgaaacgcattacaacgcgcttgacgaggacgtaaaactccgcatttcgcttgaactttatctcaaaagacttatcgtcggcggtcttgaacgtgtttacgaaataggacgtgttttcagaaatgagggcatagacacccgtcacaatcccgaatttacgctgatggaactttatcaggcgttcacggattatcacggaatgatggatctgaccgaaaatctttaccgccatgttgcgaacgatgttctcggcacgacaaaaataacatacaacggtattgaaatggatctcggcaaaccgtttgagagaataaccatgcttgacgccgttaagaagtattcaggcgttgatttcaatgagataacgacgcttgaagaagctcgcgaggtcgccaaagaacaccatatcgaatttgagccgcgccataagaaaggcgacattctcaatctcttctttgaagagttcgttgaggacaaactcgttcagccgacttttgttatggatcaccccgtcgaaatatctccgctgacaaagaaaaagcccgaaaatcccgactatgttgaacgttttgagttctatatgaacggttgggaaatggcgaacgcatattccgaactcaatgaccccatagaccagcgcgagcgtttcaaagcacaggaagaactgctcaaacagggcgatgaggaagcaaaccgcacggatgaagacttcctttacgctcttgaactcggaatgcccccgaccggaggtatcggattcggtatcgaccgccttgttatgttgatgaccgattccgcgtccatcagagacgttttgcttttcccgacaatgaaacctttagactctgacaagaaggttgagaaggctgctgcagctcctgttgaagctgctccggttgttgaagaaaagattgatttcagcaacgtagtaatcgaacctctctttgaagattctgtcgattttgagactttcagcaagtccgatttccgtgcagtaaaggttcttgaatgcgtcgcagttccgaagagcaaaaagctccttcagttcactttggacgacggaactggcgtaaataggacgattttaagcggtattcacgcattttatgagccggaagagctcgttggaaagaccttgattgcaatcacaaacctgcctccgagaccgatgatgggcattgagtcctgtggtatgcttctctccgcaattaacaagcgtggcgatgaagaagaactccatcttctgatggtcgataaccacattccggcgggtgcaaagctctattgatttgggtcgaaaaaagacgaaaatcaccgatttagtcaccaaaagtcaccaatcgttctccaatttggagcaaatcaatgtgtgatttcccgtataatcccgtaaaatcacataatagcttataacttcccataagactcactatcgaaaggtagtgggtctttttttgttttctgcgttttgaccaactgaccattttgtctgtgaggatataacaatatataaggtacctcccgctgtgaatttcacggcgggattttttgctttctggaggttttacatgagcccaaaaaatttttttgaaaaagtttcaaaaagtgtgtcgtttttcggcctcaaaagttgctgtaagggattgtggggcaaaaccccgcgatgctctttgacaattgaatatacattcttcaggtacgttccttgtgctgagggaaacctcaagccgagcctacaagtgcgccatgacccttatttaaggcgagcgataaaactcatgtagttgaagccgaattgctttcggtggtggcgatgacaagcacaggggttaatgatacttctctacggaggcggcggagaacccggcgcgggtgagattcccatggacttgtttcgcaaacaagcgcctgatgtattccctgtgcgtggggtgtcgtggacaaataacgcacacgaacatagctgtttggaaacagacagctataaataaagaaaggaggaaaccccatggaaaactgtagagtgattgccatcacaaatcagaaaggcggagtcggtaagacaacgacatcggtaaacctcggcgttggactcgcagcacaaggaaagaaagtccttttagttgatgcagatccacaaggcagtttaacggtgagtctcggtgtaaagaaccctgacgaattggaaatgtcgctttccactctcatgcagtcggttattgatgatgaacagctttcttctaatgctattttgaagcacccggaaggcgttgacttacttccttctaatattgaattgtccggcatggaaacgggactgtttaatgttatgagtcgtgagtatgttctgaagaactgtatcgacagtatgagaaagaattacgactatattcttattgattgtatgccttctctgggaatgatgacagtcaatgcgctcgttgcggcagacagtgtgattattccatctcagccgaacttcctatcaaccaaaggtcttaacttgcttctgcgctctatttcaaagattaggcgacagatcaatccgagattgaagattgatggtattttgctgacgatggtcgataaccgcacgaacaatgcgaaagcaatcattacttcgctccgatctacggtgggagaaaatatccgcgtgttcgatacggaaatacctttttcggtaagagctgcggagtgcagtctttccggcgaaagcattttctcacacgacaagaacggaaaagttgcggcagcgtatgaggcactcacaaaggaggtgacagaaattgaagaacgcgcaaaaaatcgatctgggcctgaccgggtacgatgagttattcatgaacgaggcagaacgaaaagaaaataagcttcctcgaatctatgatatacccatcacagaaattgatgatttccccgaccaccctttcaaagtaaaaattgatgaggacatggatcagctcgtccagagcattaaagaacgcgggataatcactcctgtcacgctcagaccaaaagaagatggacgatacgaaattgtatccggacatcgaagaaagaaggcttgtgaattagctgggtttgaaactgttaaagccgaagttcgggaaatgacccgtgatgaagctattattttaatggttgaatcgaacttgcagcgttcaacaatccttccaagtgaaaaagcattttcgtacaagatgcgtcttgaagccatgaaaaggcaagtcggaagaccaagtttagaaaatggttctccaatggataacaatttaagaggcgtaaaaactgcttctttatttcaggaatctactggagatggacaggcacaggtttatagatatatccgtcttaccgaactgatccccgaacttcttgatatggtcgatgaaagccgaattgcattgagaccggcagttgaactttcctatctgaaaaaggaggaacagtctgcgttgctcgaagaaatctcttatgcagacgcaacaccttctcttgcacaggcaatcaagatgaagaagttttcccaggaaggcaaactgagcaatgatgtcattgagtctatcatgagcgaagaaaagcctaaccagaaggaaaagatcaatatcaaatacgaagatgcaaggaagtatatccctgccagtgttccttatgataaaaccggtgattatataatgaaagcgcttgagtattatcaccgatatcaagaacggcagagagatcgtggtgatgcaagataagccccccacaccaagggagaagtgtacccttttatcggtggagttttggttctcccccctcacactccccccactcctcaataagcttactgtactatctgagaagaagaatatatggcacatttgaaataaataagtagcattcatacaatataagtaagaaatcaaaggaggttatcctatgaaacgaatacttattattgttgcagttttgcttaccttattatccggatgtgccaataacactgtccaaccgcctacggaaacagaaacggtgaatgaaagcactacagatacttttcctcaggtggaaaaggaaacaacttcttctcaggcagtaagccaagaatcaagcgttaatatagattcccttgaagaatccacacaagataccgatgaaagtaaaacggtacaaacggaagccagcagcccaaagcaaacggtacctgataccaaagtcgaagaaaaaaagtctccatctataaaagatgaaacgacttcttctcaggcagaaacttcttcaacttctacaaaagatcagccgaagccaacagaggcaaaaccacgagaacaggaaaaaccaaaagagacagaggctacgaagaaggaagaacagccaaagcagcaggagcaaccaaagcccgttgaaacaaaagcttcatttgatatcaattactggatttctttcgcaaaagatgcggcggtcagcaagggactgacgttggatagctccgcagtagattgctgggacaatccaattaccgcaaatcccgattgcatttatcttgagcgagatatcaactcccgcctgaatagatacgccggggatgaggatataaccgatgtctggatctggtatgaatgtgtcggcgaaaatagctatctgatatatatcggatacgcataatcaaataatcaatatttcgagaagagcatcgtggaaatacggtgctcttttcatgtcttaaggaggacaaaaatgaaaacgaaatttatcaagagaggaatgtccgggctgatggcagttctgatggcagttactgcttttgtcggtcttggcacaactactgcctttgccgcaagtgaaacggcagagtcgtatatggtctcttatcctcgtgacggggatgcaaatcaggtttacggcgaagacggttggggtcatactgctaaaacttatatgaatggatggtccaccggatcttccagagtgctgaccctccattgtatggattcttataacggaaaggtatgctattgtatcgaacccggtgtcgttagaaatgtcggagacacctatacgaagttcgatgaaaatttctgggacaactaccccagcagcctaaacaataccattgagccc

SEQ ID NO: 3452 - DNA, 8063 bp, Unknown
  16S sequences of unknown bacteria
acggcttacgccgtgacacctcccttttcccttcgggaaaaaggaggcttttggacagtgcaacttcatacggtgtagcactatccaaaaggctccccttttcgcaaaaagtgccttattttacgatactttgtcaatgctttggaggaatgaatgatgcttcccatagaacaattcgccctgaagggcgcggcgcaatcctgcgagcgctatggcaacggccacatcaacgaaacgtatctggtcacctgcccttccgcgcgctatatcctgcaaaagatcaacaccaacgttttcaaaaagcccgatgagctgatgcagaacatcgagagcgtgctgcgccaccagcgctcgcgcgtggacgatccccgcggctgcatgacgctggttcccacgcgggatggcgcttcctggtatcaggacgaaagcggcgcctaccgctgctacgattttgtggaaggttccatctgcctagaccgcgcggagagcgaagccgatttcgccgagagcggcgcgggctttggcgcgttccagcgcatgctggcggatttcccggcgcacaccctgcacgaaaccatcccgcacttccacgatacgcccgaccgttaccgcatcttcaaggaagccgtggcggcggacgcgctgggccgcgcgcgcgaagtgcagcgggaaatcgatttcgcgctggcgcacgaaaaggacgccgccgcgctgatggaggccggactgcccctgcgcgtgacgcacaacgacaccaagctcaacaacgtgctgctcgacgcgcaaacccgcaaggccctgtgcgtgatcgatctggataccgtgatgcccggctttgcggcgaacgatttcggcgattccatccgctttggcgcgtccaccgccgccgaggatgaaacggatctaagcaaagtgaccatgagcctggatttgtacgcggcgtttgccggcgcgtttttgggcgcgtgctcgctcacgcagccggaaatcgagctgttgcccatgggcgccaagctgatgacgctggaatgcggcgtgcgcttcctcacggactatctacagggcgacacgtatttccgcgtacaccgcccgggccacaacctggaccgcacgcgcacgcagttcaagctggtggcggatatggaagccaagtgggcggaaatggcccgcatcactaaaaatggagggaaatgaaaatgtccagctacgtaacgcgcaaaacgcctggcgacaccgcctggttcacgcacgaccgcttcggcatgttcatccactgggggctgtattccatgcccgcccgccacgaatggatcaagatgcgcgaggagattcccgaggaaaagtacgacaaatacttcaagtatttcaatcccgacctgttcgacgcgcgcgaatgggcgcgccaggccaaggccgcgggcatgaaatacgccgtgctcaccaccaagcaccacgaaggcttctgcatgtgggacacccagtattccgattataagtgcaccaacacgcccgcgggccgcgacctggtgcgcgaatatgtggacgccttccgcgccgagggcctgcacatcggtttttactattcgctgatcgactggcaccacccgcagttccccatcgatatgaaccatccccgccgcgacgatcccgacgcctacgagcagagcaaggaccgcgacatgcgcgtgtacgccgaatacatgcgcaaccaggtgcgcgagctgctcaccaactatggcaagatcgacgtgctgtggttcgatttttcctattcgggccgcgttccggaaaagggcaaggaatggatgaagggcaagggcaaggacgattgggaggccgaaaagctgatcgccctggcgcgcgagttgcagccgggcatcatgatcgacaaccgcacggaaatcgagcaggatctgtggacgcccgagcagtatcagccgctggaatgggtgcgccataaggaaaccggcgagctcgtggtgtgggaagcctgccagacgttctccggctcctggggctattaccgcgatgagaccacctggaaatcgccggaaatgctcatccgcatgttggtgaacaccgtggctttgggcggaaacctgctgatgaacgtgggccccacctcgcgcggctatttcgacgcccgcgccgaggccgcgctcaaggtgtacgcggactggatgaaatacaattcccgctccatctatggctgcaccatggccgagccggaatacctcgcctgtgtgcccacggactgccgcctcacgcagagcgaggacggcaagcgcctgtacattcacctgttcgcctatccgttcgcgcacctgcagctgcgcggcatggcgggcaaggtggactacgcgcagttcctgcacgatggcagcgagctgctcttcaccgagggcaaggtcaaccacttcagcgagggcgcgacccaggccgaagacctgctggtcattgagctgccgcccgtgaagccggatgtggtggtgccggtgatcgagctgttcctgaaataggcgcgcgtcccgccagagcgaggcgctgccccccatttggcgttatgggcgcaggggcgcgttgcagaaggaaagctgcagcgcgcccctgttctcccgcgggaaaagcgccttatgggaaaaatcgcgccaaaaatcagcgaaaccatcgccccgcaagaggaaaaggcgcgtattccccgcttgtcataaaccgtttggcgcgctttcgcaaggggaagccgaattccttcgcccagaagcgcgtgaaattccaccgtcacaattgcgcacatatccattgccgtgagaaaaaacaaaccgatggaaaggagaaaatggatgtgcgcggaaggctttcgccgcgcatccgccatgccatgctgagcctgctgtttccctccgtgctcgacgcagggcgcggggacaacgttcatccctatgtgcattacgccaggcccgcctatcccatgcccctgtgcctggtgcaatttggcatgcacgtcacaacgccaagctatggctacggcccggccatccgcgaccacgacctgatccatttcgtgttccgcgggcgcggcaatgtcacaacggcggggcggcggtttgaggtgttcgccgggcagctgttttacctgcgccgcggcgcggtttcctactatgaggcgaacgacgaggatccctggtattacgcctggattggcttcgacggcccctggaaattcaacgacaccgccaagcaggaactcatcgacgaagtgtgggattacaacgaggaaggcgtgttcggcgcgaacaccagcatcttcaagctcaccagctatcagggccgcttcgacgacggcgtgcattgcctgtggaccaaccagatgtggtattccgaaaacaagtggaagggcatcatgttcgaaaacatggatggcaccatcttcgatggcaccgcgctgctgtatgaatcccttgaaatggatgaggacgtgaccttcgccaagaccgccgtgcaggaggcctggaagcagtactatccgctggtcatcatggccgacacggacgaggccttcgaggccgcgtggacggatctgcagatggcggtggaaagcgccgggctggagacctacgcgcagtaccgcgccgagaactatcagcacaacctggagctgatggcggaataaacggttctaagaacgcggcgaaaggcaaacttttgcacgtttcatcgcctatcgattgcatcaacgacccggggcagggaacatcccctgtcccatttttcaccatccagggggggatttcatgaacgcaccagcgggaacgctccgcaaaaagcggcatccctttttgcagagcctggtgaagcagcgcgaactgtggctgctgtgcgtgcccatcatcgtatgggtggccatattctgctattatcccatgtatggccttttgatggcgtttgtcgattatgtgcccggccgggaaatctggcaatgcgatttcgtgggcctgaaatactttgcccgctttgtgacagggaacgatttcgcgcgccttttgcgcaacacgctggccatgtcgggcctcagccttaccgtgggctttgtgtgccccatcctattcgcctttatgctcaacgagctgggcaacctgaaaatcaaaaaattcgtgcagacggcgagctacctgccgcacttcatcagctgggttgtggctggcgccatggttacgcagctgctggccacggacggcgtgctcaacgatctgctgctggccgtcggcctgattgaggaacccatttcctatttgcaaaagggcgaatggtactggggcctttacaccgtggtcaacatctggaaaagcctgggctggtcgaccatcatctatctgagcgccatgtccggcgtggacgaggagctctaccaggcgggcgtgatcgacggattgggccggctgggcctggcgcggcacatcacgctgcccacgatcattcccacgattgtgctcctgtggatcatgaacgttggcaacatcctctccgcgggctttgatcagcacctgatcatcggcaacaccatcacccagcggtattgggatgttatcgatacctattcttaccgctatggcgtgcagcagggctactattccattggcacggcggtttcgttcatgaaagcgctggtgggctttgtgctggtgctggtcaccaattgcatcgcgcgccgggcgagcgatgtcgcgctgttttaggaggtaccgccatgcgaaaagtctattacatcaagcaaacgccagccggtcgggtgttcgatgcggtcaacgggatcgtcatcgcgcttttgatgttcctgatgatctatcccttctggaacatgctggtgctctctttcaacgatggcacggacgctctgctcggcaagctgtatttctggccgcgcgtgtggacgcttgccaactatgaatacgtcttcaaaaaccgggatctgctgcatggcgcgctggtttccgtgctgcgcgtggtcgtgggcacggtgacgggcgtgatctgcaacgcgctgctgggctatatcgtcagttgccgccagttctacggccgcaagttcatgcgcatcctgttcatcatcacgatgtactttggcggcggcctgatccccacctacctgctcatgctggagctgggcttcataaacaatttcctggtgtacatcatccccggcctgttcagctgctactacatgctgctggcctccagctatatccagaatatcccggaggcgctgttcgaatccgcccgcatcgatggcgccaatgagctgaaaacctttgtgcgcatcgtcatcccgctggccatgcccatgctggcctgcatcgcggtgtacatcggcgtgggccactggaacagctggttcgatgtttccctctattcgcgggatggcacgtgggacacgctgcagatcatcctctaccgcctgctcaaccaggcaaacgccaaggcggatatcaccaaccagcagcagctctatatgtccatgcgcaccattcagccggaaaccgtgcgcgcggccacaacggtcgtggtggtcgtgcccatcatcttcatctatcccttcttccagcgctattttgtgggcggcatcacgctcggcgcggtgaaaggataggcacattccaacactacaatgtatggaggcaacggtatgaacgaaaaatccgtgcccgaacaggcccaggccgtggtagccagccccaatatggttccgccgaatctgcgcaaggcgctggaaaagcgcgagtacaccacccggccggacgcgcccgccacccacgcgcggctgtggggcgacccggacggcaacgcataccacctgatgttcaatggcgccgatctcgttacgctgcgctatcccgatggcgtgcggcccgggctgcgcctgcattcggatggggactttcaatccgtgccgtttgtgcagcaattcctggcctgggcggatcaggacgcgcccatggaggtggaattcacttcccccgtggaaatgtggaacatgcgcccccagcgcgcgcagggcgggcaggcgattttggggcaaaccgggcatccgctgcttttcggcgtcaacggcctgtactttcccgattgggatctactgctcagcttccatggcttgccctttgcctggaccgcgccgcgcattgagcgagcggacgggcagtggcgcgccaggctgcgcgtcacgctgggggaaacgccctgggtcctcctggtgcggccgcgctattatcaggagcacctgggctatgcccagcaccggccctggcgcttccggcccaatcccaagcccatcaccggctggtgctcgtgggaagcgtaccacagcggcgttacgcaggcggatctggaagcggacagcctcgccctggccccgctgaaaaattacggcctggaatacatgcagctagacgacgggtatcagcagaccatggtgcccctgcgccccggcgcgaacgtgggcgacagctggctcaacaccaacgaaaaattccccggcgggcacgaagccatcgtgcgcgccgcgcgcgcgggcgggttcacccccggcatctggacaaacgccaccctcaccaaccgcgaggccgcgcaggccatgccctgctgcctgcgcgatcaaaaaggcgatctgatctgcggcgactggatccactacatcctcgattgcctgccggaaacgctcgccgcgcacgtaacgccctattaccgcgcgctgcgcgagaagggctacgcctatttcaaatccgattccatccgccatttgatttacgatggcctgcaggaggccgtgcgcctaggcgtgctggagccggaagacgcgcgcgagcgcttccgcgcctatctggaagccgcgcgcgcgggcatcgggccggacgcttactacctttcctgctggggcgtgctcgcgcagtccatcggcgtgtgcgacgccatgcgcgtggccacggacgccaacccctcctggggcgcttacagcatgcagctgcgcgaaaccgcgcgctggttcttcgcccagcgcgtgctcttcacggtggatcccgatcacgtgtgcgcgcgcagcgaacccgcctgggtgcgcatgatgctctcgctcgtgtgcctgagcggcggcctgctgatgatctccgacaagccccgggattacgatgaaaaccgcctgaacctgatccgcaaaaccatgccggcgctcgccgtgcgcgcggcggaaaccggccccgtggattacaccacgcccgcctgcccgcgccagagcaaaacattgccgctggatgaagccgcccgccgcatggcgcacatcgcgccggacgacgatatcgcgcccttctcctcgctgtggtgcacccattttgaggaaaacggccggcagtgggccgtcgtggagcgggcggcggtcgtgccgctgcgcgacgcctccattgccctggaagcgctgtcgctcgaccccgcgcgccgctattgcgcgttcgatttctgggcgcaggaggccagcatcctggaacagggcgcgctgcccctgcgcgcgctttcgctgggcgacgcgcaggttgtcgcgctgacggatatcacggatggcgcgccccggctcgtgggcagcgaccggcacgtgagcgcggacgccgtcagcgtgctgcgcgccggggcggaggatggcggcttcgcgctggaactttcgggcttcgatgggcttactgtgcgctacacgctgtatgcgcccgtgaggcgcgcggcggtgcgcagcaacgaaggctgcgccgccaaaatcgaaccaaaaggcgattggctcgtgctcagcgtttccttccacgcgccgcgcgcgcaaattctgctgcattgggagggaatgtgaagcgctgcccttcccgcgcggctcactttatgaaaagcaacccatcagtcggctagccgactgatggatctgatcgttgacaaacctttgtcagcggtctgggcgggggagtttactccctcatccaccaggggctgtgaaaaaacttttgttgttctttcacagccccagagtattgacaaag

SEQ ID NO: 3453 - DNA, 6079 bp, Unknown
  16S sequences of unknown bacteria
gcatctgtgccgcttccgcacgggttgccgtgccggttggattgagagttccgtccccgtttccgttcataatgccgtttccaactgcccagcgcattgtttcaaccgcatataaactgatatcctctgcgtcactgaatgcagaaagctcagaaagatttgcaatgcttatgcccttataagctgcgtagcggtacagtatagaagcaagctgttcccgagtgattgaatcgtctggtccaaatttgccgtccccatagccgttgataatactgtttgccgcgccccaagcaaccgcttctttgtaataagcattttccgctacatcagtaaacggattgcctgaaaccgcaggctcattctccaagcgatggagaatcgtaataatcataccgcgcgtagtgctcatattcgggctgaacaggtaagacgaagttccattcatcattccttcatcgtatacatacttcactgcttcataataccaatccttttcattaacatcactaaacagcgaatctgtatcctctgctttggcaaaggaggccgtgatctccactttggatgccggcatcgtaaatgtatatctgccgtttcctgcgtctgttaccttgatttccttaccgtttgcatctgttactgtcagcttagataactcatagccattatccggagttgcagtaatattcacagtgttcccgcttctggcattcttcggagaaacggaaatcgtaccgttttccaccttggacggcgtgttaaccgcatacgtcgttgaaccggagctggaggaagagcggctaatagttaaaacaccgtcgacataagtaatttcatagttctctcccgcatctgcaccgctcgctttaattgtataagttcctgctttgctggtgtcggttgcagatgttgtcagcttcggctcggttacccacgcatctccgtctataagacctgtttgagaataagagaacatcggcatttctccgtttactcttgcagaagcattattcacagtaatcgtcaaaggtgctttttcgatgataatcatttcgctgcctttcacttctttaccgtctttttctgccttgaagtaaaccacataggtaccggcattaatttccgctacatcctcagcggacaaagagtaatcgtcgccgccgtctttgttgtagtaaaccgttgtcccttcaggtaccgttactataatgctatgagttgctttatcataagtacctttatatccttctcccgttaccataagagtattttccgttgccgcaatttcaaaaaatgtacttgcgcttccggtgtaatttcccttaaaggtaatattaataacagctgtgcctacttccgtattatcagtatatgcaacatcataatcgtccgcggtcagagcctttccattatctttgtttactatctgaatatcaggtctaatttcacttccggttaccggataactgctgtttacccctgtgataataatattatcgttattcaattcctttgcatttaccgtaatatcttcactggtataaagcgaaacaccgttccacgtaaaggaagctttcgctgttcctaccttatctaaggacaattttccatcttttgtgagagagaaggtatcctccggcgcaacagctaatgcggcaggtaaagtatcagcaaataaagcgatttggtctccgtatgctttttcacctgttaaaccggtcacatcaatggcaataacttggttatctgttttgccgccgactgcagctatatcccccgcttttatataagcgctggcagtatattgcggctctacatcactgcggccaatcatcattccggtttttccgctgacaggtgacggcagggtaacattgcttgcactgtcatcaattttcaacgtagcgccagcaccttgcagataaccgataaagccgccggcatagctttgagcgctgaggctaatatcttcagtcacagctacatcctttatcactacagtacctgtggtctgtactctgccgatcaagccgccggcacagttgtctccggtagcgctggcagtatcaacagcaaattttccgttaattccggtatttccatcaatcgtcaaggcaactatctcaggagcaatggtagcagttgtattatatcccagcaaaataccgacccacggtctcagtcctgttccctggaaagtgatcacaccatccgtggtattgcttacagaaagcttagtaaagtctaagccgctggaagacgaatagccgatgattccgccgatattagcgtaaatgctgtttcctgcattgattccgctgccgccgctgtaattcacattaccgccagtattgccgctgccggcaaatccaccgatatacatcgcttcatatttaccagatacaatagcaggcgcaccctgaatgtttatggtattattgatcgttactgtctgcggctcaccgattaaaccgatttcataaccaaaagcaccgccgacgcttaaggtaccaataaactctgtatctgtcgaaatctccattttttctacagttacagctacattatccattgttaaatcatatgcctgtccggcaacggaacctatcccaacagtaaaattagtttccgggatatttaattccagagaagaaacgatatttaagtctttgatttctacaataccgtctgttaacggtttgacaacaccaaataaaccataataagaattgccggtgatggcgtctatattcaggttcatatttaaggtaacagtattttggccgccgtcaaaatgcccgccaaagtaatttgcattcgtaccgattccggtaaattcagcatcatcaatagtgacatcattgttcagtttgtagtaggcggagcgcagcactgcctgtgcttcttcattgtcaattcctgtgctgcttgcaccggccttggcataaagatagctgatggcgtcggcatctccttgattgatcgctttttgcatcattataaagtcttcttcggagtctataggaatcgcttgtttccaggagctaaagaggacttcctcggttatcgcattttctgtctgcaggtttaccgtcaattttttattggtaatattaaaccaatagagattgccgcttggcgctgctacataatccgttgtcaaataagcgcttccttgcttctcttcatcttggaagtaaacagggacttttaaagaatatgcaccgtcttctgcaaatgtatagctttctccagttctgatcaaacgtatggtttgtcctgctttaccggaaacgttcaacaaaatatagttgccgtcatcctgcgcagtagtatttgccataccgtctaaaatcatcacattttcttctgtagctgttacattgccagcagaaatacaatttttataaactaccggtgtactgcctgtaccaaccaaatcaccaacccagatacgaacaccattagcggtgatatctccatagtttgcgcaattttccaaatagcagccactgtaagcatgtccgattaaaccgccaagacggctggtattagaagcagtgtttgtcatttctatggtaaaatctccgttgtttacgcaatttgtcaattttaaatttgttccttccagcagcgtgctctgcgcgcggccaacaatagcagcgatataagttgtataggtttcatctgtatctaaagtaatattgatacttgcattatttgtaatattgcgaattaccgtatttttgtcggtattcgcttgagtatatcctactaataaaccggcgtctaccaaagtaccgctggcaggattcaagataaagtctccaactgcttttccatctaaaacaatattttcgatgacagcttcctttacatcagcaaacacaccgccgatgcggcttgccgcaggatatttactgtaatcaatatctaaggtgatagtgttattttctccgtcaaagcagcccataaagttagggatgccgacgaagccgttagattcatcatctgcatagtttgtcagggtaatattatttttcaaagcatagcttgcagtctgcaaatgagtatacgcttcattaaacccttctctaaaaccaaaacgagcgtaatccgcctttaattcgtcagatacagcgctgtcattagcaggcgcttttgcttccgttaaaattctggccagcgcataaatatcttctgcctccgtaatttcataaggcactgcttccgttccggccggagtccattttgcagtaatcgttgcgtcgctgtagctgtcccaaggcgcaagcgcagcgccgtcgccgccggtcagctttgtctctcctaaataccaaccgctgaatatgtatctgtccattgtcggtacggcaaggctgtaagcaggagtttccgtgctcttatagataatctttactgtattttctataccctctggcaaagtgccgccattggtgtcatacgtcaatgttacctcataagcacccgccagactttcatcgagttttgctttgcagtcattcagtttttgtaccaattctgtgctgacagcagatttttgtatttctgtcaatgcagtatatttaccgtcagcagaacgaacggcgtctaaatcacttgcagctaccgattccggagaaggcaatgcagtaatagcagcttctacctctctggcggcgtccgcatcatccttatccattacataaagggtgatatcagcgctttgaccgtctaaagtaaaggttaaagtttcttccccctggttattcaaaacaagaggaacagttgcttcaccgttttcatcaaacgcaacttctacctcaatataggcattaccttcagcatcaaattgctcaatcaatgctttaccggcaaaactgcccaagaaaggattgtacccttccgtatcataacgcagtttatcagtagccgcgttttgagcaatttctgcatccgtcagcttgcggtcatataagcggaacagatgaatagtgtgctcataactttcactcactctgccgctagttacagtatagtcagtaccgtccacaaactgataccatctaggtaactgcaaagtagtctgcgttatagcctccgcggcataagattcatctgttactaatttttcaccctgtgtaccattaggcttttcgcctgcaagatatagatttctcaagttgtccgcatcggtggacatagcatattgcagaaattcatcagcaggagtatagccccatttactgttggccgaagcaacccagttgccgctgctaagcgtatagaataaaaccgggctgttattgcagcggaaggctaatatactggaaccaaacaagttgttgacaggactcatgtattcaggatttgcatcccgtacagttgtttctgtcttagaagaatcagtccactgcactgtatctttaatcatttccggcattcgttcgttttgtgtaaaagcagcttccatagaaaaaccattttcatatgtcttttttacagtatcatttaaatctcccaaactaattgcactgtcatttacaagaataccattatccacccaagtaatcccggtcaaatctctctcttccataccagcagccaaatccacccatttcgtggcagctgcatcatgggtacctatcccggcattataaattccatctaaatgcagcactaagccgtccgttacataccaaggcgcattatacccgctgattcgtacggtctgcgttgtgcttgcttgtccgcctgtaataacaatatcgttactttcccccgcgtaaggaaataattttgcagcagatacaaacgattgatttgtctctgttgcaaaggcagacatcggcatcagcgttatcagcatacagatggataacacggttgccataatccgttttctcatatcattttacctcctaatcaatattgctgtgttcattccagaacacaaaaaaaggcgcatcccgcctatgaataaataggcagaacacacctttaaaataactataatggaaaaactctttagagctgatacaatgggaaatgcggtatttaaatattcggctatgaattt

SEQ ID NO: 3454 - DNA, 15816 bp, Unknown
  16S sequences of unknown bacteria
gccgccgtcgtcttcgcaggattgcccgacgcgctcgagaccgagggcatggaccgtcacagcatgcggcttcctgaggggatcgaacgcctcatcgcacgcgtggccgccgccaacgaccgcaccgtcgtcgtgctctcctgcggtgcgccggtcgagacgccgtggatcgacggcacgagcgctgtgctcctcatgcacctggcgggctgccagggcgggcacgcgtgcatcgatttgctgttcggcgcacagagcccctgcggcaagctcgccgagacctggcccgtgactctttcggacacgcccctttcggatgcgtttcccgtgcccacgcagcagattccctatctcgagagcatcttcacgggctaccgctactacgacagcgcgcaggtagagatccgcttcccgtttggctatggcctcacctacacgcaattcgcctatcgcagcttgcacgtcgagacgacggacgagggctatgcgctgcacttcgacctcgagaacaccggggcgcgtcgggcaaaggaggtcgtgcaggcgtacgtccatgcgatcgaccccgccgtctttcgccccgagcaggagctcgcagccttcacgaaggtgctgctcgatccgggcgagacgcagcacatcaccctcacgctcgacgggagcagcttcaggtactgggacgacgaggcgcaccgctggcgcgtcgacgagggagcctatgaggtcaagatcggtgcctcgagcagggacatccgccttgccgagaccatcgagctggtccgcgcagcgccgccgctgcacgccgagcgccgcgcgtatactgacgagctcgagcgcgagcagttgcgctcctactatcacgtcacgccgcatggtttttcggaagacgagttcgcggcgcttttcagcgtgccgtttcccgaagagccgcctcgtctgccctacaccatcgactccccgctcaaagacctcgagctcacccggacgggccgtctcgtgctgcgggtgttgcgccaccgggcggcgcgccagaaagacgcgctgctcccgaccgagctggtcctcgagatgctcgacacgatgccgttgcgctcgatggccatggccgcctaccctctcgagcttgcccaaggtctcgtgctgctgctcaacggccacccgttcaaaggcgtgaagacgatgctcgaagcgcgccggccgtagtaccgcagcgtcatcttcgaagcctatgctactcgcaccagataacaagagccgccgcaaggtggcgcacgcgtattgagaggcgcatcatgaacgagatcatcgtcgacgaatcggctatcacgtcgccggaggagctggaagcgttctttctaaacgctctcgagacggatgcccgcatctccccctccccgctcaaatggaaagacgcgctcgaggagatcgacgtgccgacgcgcatcgtcttcaagcgtgcgcatgccacccacaagccctggtgggacgaggcggttcaggcggtcaaagacgcgcaggcggacaacgacttcatcgagctgttcgtctacgacgacgacctcgacgcacacgacttcgacctgagctccgagctcgacgcctcccaggcgctcacggccctcaaacgcggcaacgcgcgctacctcgaggcaagccacgcccacggcgacatctcgacgggcaccatcgagcacctgttctcgaacggccagcacccctacgccgtgatcgtgtcctgcgcggattcgcgtgtcgtgcccgagcacctgttcatgacgggcctgggagagctgttcacgatacgcgtggcgggaaacgtcatcgacaaggccgccatggcgagcatcgtctatgcctgctcgcacctgcacgtgaagctcgtgctcgtgctggggcatacgaactgcggagcaatcgaggccacgatggaaggtacccattccgaggcgctcgcgcccctcacggatccgattgcacgcgcgatcggagacgagaaggacccctacgtggcaagtgccctcaacgtgaaagccgccatctgccacatcgtgagcaatggtgagctctacacgctcatgaacaacgaggggctcgaagtccacggcgccatctaccacacgcactccggagtcgtcgacttcctcgattaggaacttcactccgtaaaggaattcccgtagtatccccactaccgctttgcaatatctagtgttagtggggattatgctgttcttcgttccatcgttcattccggcgctcgttcaggcgtttccgctcgtctacctgttctgctacttctgcgcggaggcgctgcgcaagcacccgctcgcgttctacctgccctgggcgctcgtcgtcgtgttcgtgagctggggcgagctgcttgccgcattcggcctggattccctggccttcgtcgccgactacaacgcatggctgagctcgacgcgcgacgcgtaccccgtcctcgacaccgtgctgaacctcttcacctcctcggtcgtcggggtcagcttctacctgatcgtcatgttcatcggcgtgtgcgagaagacgaagacggtcaagcgcttctactccatccgctcggagatgtccgtgctgggcggaatcatcatcatggggcacgtgtgccgtgtgctgagcttcgtgacggcatttgccaacccgatggtcgtccagatgtacggccatccggcgggagacttcatgttcatcgcgggcgtgctcatcggcccgcttctcacgatcgccttcgtcatcccctggattgcctcgttcaaggcggtgcgccgccgcatggagcccgccacctggcgaaaggtgcagaaactcgcctaccccttcaccatcttcatgctcgcgcaggggctattcctggccctgggacacgcactgtacctgtacccgttcgacggcatgcgtctgttcgagacgctctaccaaggaggcgccaccttcatgtccgacttcgccggctacgtggcgagcgcctggatctacgcggcactgcttgctgcctaccccgtgctgaggttgaggcgcaggcacaaggccaaaccccaggacctcacgggaaagacgctgcacgagatagggtccgcacaggcctagaacgagcccgccacggcacgcggagcattcatggaggttttgtaacgccgtgccatgctctctcccacccgctactatggtcaaaaaccatccaagggagagaaacgatgtacgaactcaaaaccgagagctgcttcgactcggcccattttctgagcgactacgacggcaaatgcgagaacctccacgggcaccgctggaaggtggtcgcctacatcggagtcgacgacctccaggccagcggccaggaaaaggacatggtggtcgatttcggcaccttcaagaaggcgctgagatcgctcaccgaagagctcgaccacaccttcatcgtcgagcgcggctcgcttgcccccgccacgatcgccgcgctcgaatcggagacgtttcgcctgtacctcgtcgactggcgcaccacgtcggagaacttcgcgaagttcttctacgccaggctcgaggggctcgggctacccgtcacccaagttgacgtctacgagactcccaacaactgcgcgatctaccgtccaggcaaatgacgcgttgcctataatgcactagacaaacgcaacgacagttaggagaaacgcgcacatggatatcgtatgcctggacctcgagggcgtcctcgtaccggaaatctggatcgaattcgccaacgccacgggaatccaggagctgacgcgcacgacgcgcgaagagcccgattacgacaagctcatgcagtaccgtctggatatcctgaaggagcaccacctcgggctgtccgaaatccagaaggtcatcgcgacgatggacccgatggacggcgcgaaggagttcctcgacgagctccgctcgcttacccaggtggtcatcgtgagcgacacgttctcgcagttcgcccagccgctcatgaaaaaactcggctggccgaccatcttctgcaacgagctcctcgtcgatgagaacggcatgatcagcggctggaagatgcgcaaggccgagaagaagcagacggtcatcgagctgctgcagcagatcggcttcgagaccatcgccagcggcgacagccacaacgacctcggcatgctccgcgcgagcaaggcgggcttcctgttcaagaccacgcccgagctggcaaaggcgaatcccgacatcacggcactcgagacctacgacgagctgctcgccgccatcaaggagcatctcgcgtaaacgagctagacgcaccatcgacgcgaagggttgcaagaccatggacaccacgcagagaatcaaagagctcggatctgcctacgagtcagagatcatcgagctaagaaggcacttccaccgtcatccggaagtggggacgcacgaagtggcgacgtctgcctacatccgcggcatcctcgcccagatgggaatcgactaccgactcgtcgatggcaagcgccccgacaacgtggaccacgagctcgagcgcttcatcggcacgggcatcatcgccaccatcaagggcacggcagaaggcgcgtacgacgagaacggcgtgccggcaaagcgcgtcgcgctgcgcacggacatggatgcgctccacgtcgacgagaaaacgggatttgactacgcctcgctcaacgaaggcgagatgcacgcgtgcggacacgactgccacatggccatgatgctcggcgccgcacacatcctcaacaacatgcgcgaccagatcaaaggcgaagtccgcatcatcttccagcctgccgaggaaatctctctcggcgcgcgcgacatgatcgccgccggggcactcgacggcgtcgacgccatctatggcgctcatatctggacggacctggacgcaggcacgatctcatgcgaggcaggcccgcgtatggcgagcacggactggttccgcatcgacatcgagggcgtgagcgcgcacggcgcgcagcctcatgagggcgtggacgccatcgtcgtcgcggcagaaatggtcacgacgctgcaggtgctcgtgagccgcgacatctcgcccttcgagcccgtagtcgtcaccgtcggagaaatccacggaggcacggcacgcaacgtcatggcgggctctgcctacctgacgggcacggtgcgcgcatgggacaagaagacgcgcgacgagctacccgagcgcatggagcgcatcgtccgcaaggtcgcaggcgcgttccaggccaaggagaagttcacgtacgaggcgggaaatcccaacctcatcaacgacgagcatctttcagaagtggcacgcgctgccgtcgagaagatcggtggccccgaggcactcgcaacttaccagggcaccctggcaggcgaggatttctcggagtacctcaactacgttcccggcgtgttcgcgttcatcggcgcgcgcaaccccgagatcggcgccgtccacccgcagcacagctgctactacaccatcgacgagagcgtgctcgcgcaaggatcgatggtcgcggcccagtgggcctgcgacatgctctcgtagaggactgcgtagtttttccgccaaggaggggcgacggtgccgtatcacgagccgagctgctcgaccgccgagtacagcccgcccgagaccgcatcgatcgcctcttccgacagggtatcgaccttccactgaccatccgtcttcgtgagcgtgatggtcgtcgtctcggtcctcgtcttatcagacaggttatcgagatcgctgctcagctgccggtagaacccatcggtgatgtcttcggagctcgcgcccgaagctgccatggccacggcgcctcccagatacgacgagaacgattggacaaatgccgagccgatgtcgtagctgtcaaagctcacgtcgacgcttgccgtatccccctcgacgtgctcgtctccgagcgtgtagtcgaagtcgagcatcttggcgacgagtctgtcgtaggccgttctctccgcctcggtcatatcgtccacagacacgaactcgcctgtcaggtcggagagcccactaccggagatttcagacgaatcgcccgcatagtacgtcgcgagcgtctcggtgtcctggcctttcaccgcatcgagcgtcgagctcacgacctcgctgggtgaagcactcgcgcagccgctcaaaagcactgccgtaaggcacgcagcgcatgccgcagcggccacgcttgccaacttcgcagaaatcgattccttcacacgatcacttctccttgtcgagtgatggggcaaagcccccttcagggtcgtccgaaatgaagaaacgccccgtcatgagggtgacggggcgtttcgtgagatttgctcttgagggccttctcctacttcttgagatacgagaacgactcgtggttcttctcgttgagataggtgatgcgctcgtactcggtcttgtcgtgctggggagcatggtgaatgcggccgctgttccacttttcggggccggcgtactttgcagccttggcatgcgccttggggtcggaaaagcgcctggaaagccaggtgccgtcaccggtgatgggctctttcgcgcttgcctcagcgtacttttcctgcttgtactcctcggtgatgtggtgcacgacggtgatcggcttgatgggacgctcggggttgtgatggatacggccgttccaccacttttcagccttggccttcttgtcggccttggcatgcgccttggggtcggagaaacgcctgcacacccacgtgccatcgcccgtgatgggttctttcatgaaagccgcatcgtgctgcagctgctttgcctgcgcggtttgcctcatcttgcgaagatcctttcttgtaagcgccgccacgtgtctggcgacgcgcacctctcaaacagcacagggcatagtctagcaccagtaccagatgcctgcacacttgtcatgcaacaagcggcaggcatctggggtaaaagcgagtatatggcgtcgtgaggtgctctctaggcacagcagcagcgtagatatgcagctgctacttcgcgtactttgactcgacccgctcgagaatcgcatcgtatgtgtcgctcggatgttcctgctcgtaggcagcgcaggcctcatcgacctcgtcgaacaccttggggtcgagattgtgctcggcaaaggagtacacgacggcatcttctttgttcgtatgggcgatgagcagctttgcgtagcccatggcctcgacgatgatgtcgagcttcgcatcgacgctcttcgtatcctcgtagacgtagagtgtgttctcgagctcgagcacatgcgcgcggcccaggtcgtgctccacgagcatgccgtgcgtgaccagattttcggccggtttgcccagatgctcgaccatcgcgggaaagaggaacttctcctccttggcgtgatggtgctggtcagagtactcgcgaacgtagacgatgatgtcgcgcaggtccgcgaccggcacctcggcgccctcgaggatacgcgtgcacacgaccctgatcgcgtcgcacatgcgcctgatcttcacgtgctcctgcatcatcaagatgatgctcggcctcgtggccgtaaacgctgccgggctcatgcgcacgccagctcgaaggagtaggtgtcgcggacgttcaagacgacgccgctgttgtcgagcatgccccgcatgacggcgctccgaagcgagcggtagttcgcgacgtctccgccggccgcgtcccagaagctcgcgtgcaggtccattgcctcttcccaggccaggtgcgtttcctcctgctcggtgagcacgttgacgcggtcgcacggcatgccgttcaacagcgtgttctcgaagcagcgatacgcgtcttgcggcgtggtggcgccgatggcgtggcgcttgccgaactgttcggcagcttcctggagcgcgtccatgcgcgtggggtccgtggatacgagcgcggtgaccagctgggcgtagcgcccctcggcgtcgccgatgcgcgcctgcagccagccgtggatgttgccctcgtcgatgaccgtgtcgagagccggaagatcgcagctcacgtaagagctgcagtcgataccgtcatcccagcccttgtcgtgggcgaggtccgcgagagccgcggtgagctcttcctggaccttgatcttgtcgtagagccagaagtggatgggtgcgagaaacttgctcatgtgcgcctcccctactgcagcttcgcgttgagggccgcgacgacgtcgagcgggttcaggccatggaccgcggatgcgtcgttgatgctttccgcctgcgaggccgggcagccgatgcagcccatgccctgctcgtagagcgcgtccactgcctgcgggaactgtgccataacctgtccgacgagcatgtctccggtgattgcctgctgtgccatgtgagtctccttaccattggtttgtctctcgtttgtctggcaagaagaatgccatgctcgctcagcatgctttgttggcatcacaacaaaagaagaaaaagttgccgttacgaggcgtttggtttggaaagcggctcgagcttggcacgccacgacagcgtccgcgccgtctcgaacccctcgaacaagatggaatacgcgccgcgctcggcgtccatgtcgacgatggtaccgcacccgaacacggcatggcgcacctggtctcccacttcgagcgcgggacgctcgagcgcatgggaaagcctacgggacctggtacggatgtccgcacgcgcctgcttgacgagcgcgtcttgcagcggctcggtaaaagagagcagctcgggctcgatgtcgaggacgaagcgcgacgggtagcgcaccgagccgtcgaggttggttccatcggcacatgacaggtagagctggtcttgcgcgcgggtcatggcgacgaaggcaatgcgccgctcctcctccatcgcctcgatggtgcgcgtcttgcgcgcggggaagatcccctcattcatgccgcataagaacacttgcccgaactcgagccccttggcggcgtgcacggtcatgagccgaaccttgcgcgccccgaggtcgacgtcgaggttggagaagaacgcgacgtgcgtgagatagccctcgagggaggcctcctcgccgcaggtagtctcgtattcgtagatggcctgcctgagctcggcgaggttgtccaggcgctcctggctgccctctgtgcgcagcgcgcgctcgtagccgctctcgtcgagaagctttgccagcagctcggagatgcgcaggtcgtgtgcctggctcgtgtacgtctcgatgagctcgacgaactggcgtgcccccgtgccctcgaaaagctcgtggtcgaggttgacgcacagcgcgtcgtaaagcgagctgttgcagcgcagcgcctcctcctgcagaaagcgcatgcgacgctcgccgatgttgcgcttgggggtgttgacgatgcgcgcgaacgagaggtcgtcgtgataggcgaccatgcgcaggtacgagagcacgtccttgacttcgcggcgctcgaagaagtgcgcgccgctgtagatggcacaggggatctcgtgacgtgcgagcgcctcttccacctcgcgcgtgacgtagtgggcgcggtacaagatggcgatgtcgcggtagtctacgccctcggctgccaggcactcgatctggctggcaatccactcggcctcgtcgtgggcggtcttggcatggtggcagaccgggcgcagcccgtctggtcgctgcgcggtgagacgtttgtcgaggcgcatcgtgttcttggagatgagcgagttggccacctccacgacctgcggtgtcgagcggtagttctcgttcaagaaaatggttttcgtccccacgaagcgcttgtcgaaatcgagcaggtacttcacgtttgccccacgccacgtgtagatggtctggtcggggtctcccacgacgaagaggttgccgtggtaggcgcacagcacctccatgagctcgtactgaagactgtcgatatcttggaactcgtcgatcatgatgtactcgaggcgcttttgccatttgagcttcacgcgctcgtccaaggcgaaaatgtgcagcgtgaacttgatgaggtcgttgtagtcgagcgcgaagcatttcttctcctggtacaggtacccgtagaagatgatgtcctcgactgcttctgcctgcacgtacttctcgtggaggagctcggcggaaagcccgatcatatccttgtaataggtgggccgcttgaagatcttcatgacctcgatcatgtcgcgcgccttggaaaacgtcatgtcgcgcagcgtcaggccgcgctcgtcgtagatggtctgcagcatcgcgtcgatatcggcgttgtcgagcacgagaaagctcctgggatacgacacgacattggcgtcttcctgcagcaccgagacgcagaagccgtggaacgtgttgacgagcccggtgtcgttatcgcccgtgagctggtgtatgcgctggcgcatctcgccggccgccttgttggtaaacgtcacgcacaggatgttgctcggcaagatgcccagctcttcggccaggtaggcaaagcgatgtgagagcgcccgcgtcttgccagagccggcgccggcgatgacgcgcacatagccttccgtcgtggtcacggcctcgagctgggcgtcgttgagagtgatcgtatctggcatgccggcccttcaagcataaaaatcggttctcgtgcccgcacatcataacacgaacaggtgttcgggtattcagcgctgcgaaagtccagacggaagccgactcatctaagacgagaatcggcaggctagaggatcttcgccgcgaggtcgaagtaacagcgcctgctctccttcgcgcagtgcacgagctggcagacgacgaacacggcagccgggatgaacgcgtaccacatctgcagcgtgaagccaaagaagtcggtgccgacggccagggcaaaggtctcgatggcgacgacgaggaagtagcagaacttccagatgaggctgatgaccttctgcgagccgtcgagcgaagacgccttcgcccgtgcggcacgcgcggcctcgtcgcgcttcaggtccttgtaggcatcgctcacgaccagatcgtgcgcaatctgcttgaggcgcttggcgcgcttctcgaccgaatagcgttccgcgcttttcttgttggcactgaacgcgacgacgccgccagcagccaagacggccgagagcacgataacggccacgatgctgttgtcccagaacagtcccccgcgcacgaaaaacgcgatgacgagcggcacgagaagcgtcagcgcgaagatgaccacgcctgccttgagcagcgagagcgtgcgcttggaacccgacgcgtagccgccgccgagctcttcgtcgacataacggtcgacttcccgtttgtagtcctccagaaacgtctcggcacccataccgctcctcgccctgcatcaagtccgccaatcatcgtccagacacgataccgcatttggccgcgcgcgccccgagcgaatgcgtaagcttcgttaaatcttgcccgtatgcgccagaactgcacctacaatacgtctcgtgccctcatgtggcctgacgacaacgcgtagattcacgaggaagtgccatgaagaagatagagatgaagaccccgctcgtcgagatggacggcgacgagatgacccgcatcatctggaagctgatcaaagacgagctcatcgagccctacgtcgacctcaagaccgagtactacgacctcggcctggagcatcgcaacgagaccgacgaccaggtgaccgtcgattccgccaacgccaccaagaagtacggcgtcgccgtgaagtgcgcgaccatcacccccaacgccgcgcgcatggaggaatacgacctcaagcagatgtggaagagcccaaacggcacgatccgcgcgatgctcgacggcacggtgtttcgcgcgccgatcctcgtgaagggcatcgagccctacgtccgcacctggaaaaagcccatcaccatcgcgcgccatgcctacggcgacatctaccgcgacgtcgagctgcgcatcccggggcccggcaaggtcgagctcgtgtacacgcccgccgacggcggaaagacgcagtccgtcaccgtccacgagtttgacggcgcgggcgtggccgagggcatgcacaacctcgacgagtccatcgagggctttgcgcgggcatgctttgactacgccctcgagacgggacaggacctgtggttcgccacgaaggacaccatctcgaagacctacgaccaccgcttcaaggacatcttcgccgagatgtacgaatccgagtaccgcgcgcgcttcgagcaggcgggcatcgagtacttctacacgctcattgacgacgccgtcgcgcgcgtgatgcgcagcgagggcggcttcatctgggcgtgcaagaactacgacggcgacgtcatgagcgacatggtctcgacagccttcggctcgcttgccatgatgacgagcgtgctcgtaagcccgcacggctactacgagtacgaggcggcgcacggcacggtgcagcgccactactacaagcacctcaagggccaggagacgtcgacgaactccgtcgcgacgatctttgcctggacgggcgcgctgagaaagcgcggccagctcgacggcacgcccgagctggaagagtacgcggacaggctcgagcatgcgaccatcgccaccatcgagtcgggaaagatgaccggcgacctggcgcgcatcacgacgcttcccaaccccaccaccttgaacacgcaagacttcatcgccgccattgccgacgagctcgcacgttcctacaagtagcgcgcgagaatcgaggacgggatgcccgccgcaagcgggtatcctagtccgagcgatcgacagccgacaagaaaggtcacttaagtgattaaagacatcgtcacggataaagaacagctcaagatcaaatcggagaaggcaacgcccgaagacaaagacgtcatccaggacctcctcgacaccttcgagaagcactccgagaccgccgtgtgccttgcggccaaccagatcggcgcgcaaaagcgcatcatcgtcatcaacaacctggggaccacgcagatcatggtcaacccgatgatcaccgacaagaagaagccctacctcacccaggaggagtgctattcgctgaagggcgtgcgcaagtgcaagcgcttcaagcgcatcaccgtcgagtacctcgacgagtcgttcgagaagcacgaggagaccttcacgggctacatcgccgaggtcatccagcatggcgtcgaccactgcaacggcatcctcatctagcaagcgccctcacgctgcaccaagagcacacgcgcgcattgaaaagcggcgccgcctgaatgcaacaggcggcgccgcttatctgttggccgatgaggtgccgaggccctagaaaccgccctggctgaagcggtgcgggatgagcgtcgtgggcttgcccttggcccagtcccagctcctgaattccttggatccggtcatgatgtcgtggtcgcgatagttctccgaccacatgaggcagaagtcgcgcagctcgatgagcaggtcctcgagcgtgccgtcgtactcgctttcgacgtaggtcttgaagacgctgtaggtctcgcccttgtcgtggatgctcaccttgacgaagcggatcgtgagccacatgcggatgccggcgttcagcttctccgattccgggtcgtcgccgaacatcatctcgatgggcttccagtacgtgtcgtacaggcgctcttgctcgtcgcggtcctcggcgatcagcaggtagttgcgcaccatgtcgcccgtcgtgagcggcgtgcccttggtgttgaggctctcgaagacgagctggggacggtcttcgcccacgagctcggcggagatgagcatgagcccacgcaggccgcgcacgacgagctcggggtcgaaatcgtcttgctccatgcgcttcttgaaccactggtagttgttgatgatgcgctcggacttgcgggcggggagctcggcatggtcgacgatcgcgaacagcgtcgcgcggtccgtgcgcgagagcacgagtttgtgctggtcgccgcacatcaggtagtgggtgcggatgaagtccgcgtcgatgccctcgacggtgaggtcgtgcgcgcgcatatactcctcgagcgctatcaagagcagtgtgatcgtcgtcgtgcgctgctggccgtcgacgaccgcgaggcccttgatgcccggcgtgcgctcgggctcgcgggagtagaggatcgtgccgaggaagtgcggaaggcccgtgcgcccggaccggacgacgtccatccagatgccgtcgcactgctcgtcgttccaggaatagacgcgctggaacacggggatcacgaactgcgtgccctcctcgcccagcaggtcgaggtacattttctgagaagtctccattgctcactctcttcacatgcgaaaaacgaacaaacgaagcagattgtactccacgcgcaacagacggatcgaacggccgtgttaaatctcgtccgaatcgaggcgcgtcttcgtgcgggcctcgtatttcgcatccgacagcggagagacgaggaagttgtccccgagcatcttgacgaaatcgctcacatcggtgttggaggtgagcatgaccttgccgtcttcgttgaacttgatcttgcggctgtagtacccgatgcggttcacgtggtactggagctcctcggcggacatgtcgacgaccggcgacccctccttctgcagcttgagcagcttgtttgccagcgtgcggctctcgtcgatgcgctggtcgagcttctcgaagtcggccaggatcgggtcgaacgagtcggcgtagtccttggcacgctgggccacgagcttgtcgtacttgaacaggatctcgagcgccttgaggctgcggaagtagacgctctgcccgtagagcacgaagtcgaagctgttgccgatcttgaccgatcggtcggagaaggcgaacggctcgtcttcttccgtaccgaacagaaggtagctcgacttctgctggatccacatgcgctgcacgcgctggaaggcgacgaccgtctgacgcccgccctcgcccgcgcactcgtacttgaacacgaggccgacgagcttctcgacgtcgtcgtaggcgacgcccgcagagggagagccgtcgacgacggagcctgccaccgacttcaagaagaacaggaaacgctgggcatcgagatcctcgagctcgtcgtcgtcctcgtctgcgccgtgtgccatgcgggcgactgtcttgtcgtcgtcgaagaacgagaccggcgcgcagccgatgcagtcgggatcggcgtagagttcctcgatgggctggtaggcaacaccctcgatctggttctcgtcgaggacctcgtgaaagccatagtcgaggaacgcgcggtcgaagaggcgctcgttgatgagcttcatgtcatccgatgccgttcccggctttgccacccacctgatgtcgaacggccagctcgggtcttgcgtctcgaggacggcgtagacggatacgttgcggtgcaggtccgcgttgaccgcatcgagcgcggccatgagggccttcttctcttcgagtagttctgtaagcatcgtgcctcggtattcagtcgttggtgtcaatcgcggggcggtattgtaccccactcgagagacgtgctttagcccggacgggaaaagacggcaaagccgcagacgggcacccgccg

SEQ ID NO: 3455 - DNA, 11762 bp, Unknown
  16S sequences of unknown bacteria
agttttgaggctttcacgacatagggtcgtgaattttgaaagacggacaagccgtctttcaaaaccgcctcaaaactgtaagcttgtacgaaaggcatggtcataaaaatgaaaattgtccaagagaaaattaactcagtgcattgaaatcggctattggctgtggtataattgatatacagcgtgtccggacacgatctgattttatggaaaaattattcatcaaatttattgattggtattgcaatttttgaatgcgtgtgctataatatgaatatacaaataattctgtgaaaggacagttatacagatatgaaacgttatatttctatcatgctcattttcgcgtcgcttctgacctcctgcgccatcacttcgtgtggtggacagggcacggggaacgacgagacctccacttccggagacacaaccccggcggaggagacgacggctgagcccgaccgccttgatgagctcggtaagcacgacttcggaggaaagaagttcacgatcctcgacgcgaacgaccatccggactggcatgtcaacatccacggcgactcgctgaacggagacatagtaaacgacgcgctgtacgagagagacctcgcgattgaggataagtttaacgtcgatatcggctacgtgcagatgacaaacgcgaagaccggaaccgacgcgctgaagaagggcgtgctagccggcgacgatgaatacacgatgtgcatctcgacgattctgggcgggacgcttggcacgatagtctcggacggagtgctcgcgaatctctgcgacaatgagtatctgtcgcttgataagagctggtggagctatctcttcaagaagaacctcgagctcgacgggaagatgtatttcacgaccggcgacatttcaccgacaatgtatcagatgccgcactgcctgtacctgaacacgaagctcgccgaggattatcaggtcgacaccgaggcgctgtgccagcttgtgcgggacggaaagtggacgcttgacgagctgatttcgagggtcaacggtctgaatcaggatctgaacggcgacggaaagatggagccgaccgaggatttcttcggtctcgcgttcaatacgaacagcagtcagaacaaccttgacagcttcgtcgtcgacgccggcgtcaccctgtcgaacatcacgaaagacggaaagggtctcgagatcgacatcatgaacgagtatacgctgaagatactcgacaaggtgaagaatctctacatagacaagtacaagttcggcgaccagtgggagtatatcaacagcgcgttcaaggacggcagggcgctcttcatgtaccatatgaccgagagcgcgcagaacttccttcgcgatatgcaggacgactatatgattctcccgatgccgaagggagaggtttcgcaggatgattatcattcttacgtgaacgcttgggcggacgcttttgtggcgatcccgacgacggctgacccggagcttgcgggagtggtgaccgaggcgctggcgttctggtcttggaagtacatcagaccgaagtcctacgagatgacctacaagctgaagaccgcgagaaacgacaacagcgccgagatgcttgatatcgtgttcagtacgctctgccttgacttcaactacatttatgatttcggcggaaccttcaccgcgctgagaagcgttgccggcggcgacaaggagctcgcgagcgctctggcgtcgaagatggacaaggcaaacacggagatcgagaagttcgtcgagagctggataaacgagtaaaagccaaacaatcgcaaagagactgccataatggacatggcagtctctttttttggagaaaataaagaaaggtttctgaaaactattgcatttccccggaatgtgtgttataattgtgtaaactgagaaaggggcgatgaccatgaaacaaaaaaatacagcacttatactcgcggcgatcatgctcgcgacaagctttgttgcgtcctgtggttcgacagagacgccggagggcgacaccacaaccggagggacgacaacggcaagcgctgagaaagagcgcgacccgatagcggagctgggagaccatgacctcggcggcaggacaatccgtatgctgtcgcaccatgacgcgctgagcgacgagcggacgatctggtcgaccgaaatgaacggcgatatgatcaacgacatcatctacaagcgcaactcggacgtgcaggatatgtacaatttcacgctcgaaatgaatacgggcgacggctgggcggccgattactcgaagctcaaaaacagcgtgctcgcggggtcgcgggactatgatttgtgcttcctgctcccgttcgcggcgcgggcgaatatcgtgatcgacgggctgatgtataatatgctcgaagttccgcacctgcgttttgatgaggcgtggtggcacagcaatgtgaatgatctgttcacgtttgacgaatatcttccgttcgtctcgagcgatatgctcctcagctcgtatcagtacgcgaacgcgctgatcttcaacaagaagacagccgatgactacgggctgaacgatatctatgacgttgtgaggagcgggaagtggacgcttgacaaattcgcagagtacgccgagaagacttcggcagacctgaacgcgaacggaaaagcggacgttgaggacagattcggcttcgcgacaaacttcggctaccacgcgataacatggcagtacgcgataggtgagatcacggtcagacttgacccgaaggaaggagttgaactcgggcttaaggatgagcggttctacaatctcgcggagtggatgtacgacctgttctacaattcgggcagtgtgtttgagatcgaatgggacaaggagtgcgacataaagtgggacgaggacagggtgttcatgcaggcaatatgggtgaacgatctcgagaagttccgctcgtacagaagcgagttcggcgtgattccgtacgcgaagtacgatgagactcaggaagggtattatacatacgttgacgcgcgcgcgggcggtctcgcgataccggttgactgcgacgagcagacgatcgacgacgacgggctcataatcgaggcaatgtcatacctgtcctatcgcgacctgattccggcttatcttgagtctgtgacgtcgagcaagctgacgcgcgacgaggactccatcgagatgcttgagattataaacgccggaagacgctgggatatcggctacacgatgtccgaggataactcgtacacgtgggtgctcaggaccgacctgaagaagtcgggcggaaagctggcgtcgacgctcgagtccatgaccgacaagactgttgctaatttcgagaaagtgctcgaagcttataagggactcagtgaactgtataaataaaaagaaagactgccgtttttcgcggcggtcttttctattttttgaaataagcggttggagtgacgcctatatatttcgtgaacgactttgagaagcacgaatagtccccgaacccgacattcgcggcgatgtccggaagggacattgaggagccgcggtaatcgtcagcggcgcgtcggacgcggtattcgctcaggtactttataaacgtagtgccgaagttgtcacggaagagcgcgcagaaatagttgcggttgtagccgagcgcggcgcttatgtccgacgttgagaggcgttctctgaaatggatatctatgtatcgtccgacaagctcgatgaagctgttgtcgcgcgactcgggagcgccgcgatggatgagcccttcggtgagtatggctgacatgatgttcgagagacaggcacacgcctcgagttcacccgccgccgtcacaggttgccggaagaggaggcgttcgaccgcgagcatatttctgccgaccttttcggacagagtgccggtcagcttgtccgggaagagcgctccgccctgcctgagggctgttatctcgtccgcggttttcttcccgcagccggagaggattccgaggtcgaagatgagatagcagtactcgagaaagtcacagccggggacaaaatccgctccgtgcgcggtgtgggggctgatgagcgcggtttcgccttttctgagtctgtcgcatcgaccgccggttgttatgtcaagctcgccgttcaggacgtggatgagttcgggttcctcgtggctgtggacgaagatcgggcagacgtgctgattgtgggtgagggcgtactcgatgaacggcgggtagcttttgcccgtgaagtcgaagctgtagatttcggtgcagaccgggagcgagccgtacctttcccggtgaagcgagtttatcatgccatgcgcctccttttgtcaattataacatataatttcggaaatgtcaacaaaaaactgagttttgaccatcgaaaactgaatatcggcacttgaaatttgtgtaaaatatgttataatagaaacatagctgatcggttaacagaaaataaaacgatatgaaaggctggggataaagcatgaaaaggattatatcaacactgctgttttgtactcttctcttggcgtcctgcgggagcacggttgagccgcaggaaacgacaaaggcggacggagagatgtcggacagcacacaaccggtggagactgacagacttgacgcgctcggagaaaaggatctcggcggcagagagtttgtgattatggacgcgaacgattatccgacaacgtcttcaaatgtgtatgacgaggagaggatcggagacgcggtcaacgacgccgtgcatatgcgggacacgaagatcggcgagagatacaacacaaagatcacctatctccgacctgacagcgcgggcgccgggtgcaagcagatatctcagggttatctcgcgggcgacaaggtgtgcgatctggtgttctccacatcggcggacacgggtacgcttctgaatctgatatcgcagggaatgctcgctgacctcaacagcatatcatatctgtcgtttgataagccgtggtggagccggttcgcttacgataacctgacgttcggtggtaagacgtttatggcgataggcgaaataacggcgacaacatataacgcgccggttattatgtacggaaacctgaatctgctcgacaagtacactccggagacggatattttcgggcttgtcaacgacggaaaatggactatcgacaggcttcttgagtacacgaaattcaacgacgacctcgacggggacgggaagcttcatacggggcatgatttcttcgggtatgtcggagacagcacgggaagcggactttccgcgggcgcgttcgtcgtggcgggcggtgttgatctctgcacgaataacggtgatgagataacgattgatcttgtgagcgacagagctgtgaaggttgtggagaagctcgcccagctgatgccgaaggagaggatggacgaccgccgcgagtatctcaacggcacttttaagaccggaagggctatcttcatccagagttatatgggcggcaatctgagggatatggaggatgatttcgcgattatcccgcttccgaagtttgacgaggcgcaggaggattataagtgccagatcaacggttggggcgcgtgcgcgactgctgttccggataacgcggacattgacgagtcgggatttatcatggaggcgctcgcgtatgaggcttatggcacggtcagacctgagatatatgataaactgctcaaacagaaattggcgcgcgacgagcggacgacggcgatgatcgacctgatcttcagtgacctgacaatcgacttcaacgctctgtgcgatttcggcggaactctgacggtagtggcgaacgctgtctacaaggacaagcccctcgcgtcgaacatagcgaagaagcagtccgcagcggatgaggcgatagcaaagttcataaccggctggatgcaggagtaaaaccagaggagggcgaaagccctcctctttctctattcgcttaccccgaactgcccgccgccgatttctgtcgtgtattcccacacaatgacatcgtcctgtttcagctgataccgtgagcacccgtagttaggataccacccgttgacgctgtagagccacccggagaacttcccggcgtcgaactcgtagaggttcgcgattccctcgatgtaggcggagttgtagatgggggtgtcctcaaactcgaggtggatggagttctgccggcagacgcggcgcaggaggttgaagacgctttctccctcaaagaaggtgacttcggtttcggggaggatgattccgtcgtcgggtacgagttcccgcttgtccgggtcaaggtcggggttgtctacaagcgtagcacaggttatcgtgattttgcaggtgtgttcggtgtcctcgtcgatgacggcgtcctgcgggtctaccggggcgggcattccttcggggactgtttcggttgtgttggttgtgttggtggtatctgtggtgtagccaggtccggttttgctgcatgagactgccgacagggctatgatggcggcggtcatcagtgcgatgagttttttcatatctctacgtcggaatttccggcgtcctttctttttatatgagtttcgcggcgccgagcatcgcgtggagcatgattgcggcttcggcgcgggtggttttgtctttcgggcggaggtttactgcctcggcgtcgagcatattgcagtcgaccgcgaaagaaagcccggcgcgtgcccatttcgacgaggtcgtgtagtccgagaaaaccgagagagtatcgcgtatctgtgcgtctgtgcgttctgtgtcgagaccgcagagctttgccgcgcgggcgcagatgacggcggcttcttcacgggttatcgttccgtccgggaggaagcggttatcgccgattccgaggatcagcccgtattcgctcgcggcggcgacagacctcgcgtaccacgctgttttcggaacatcggagaatttcgcgtcgctttttgcctcaagtccgagggcacggacgatcagggcggcgaattcggcgcgggtcagcgttctttccggcttgaagttcccgtcctcatacccgctgattatcccgcgtgaggcgagtgagcagacggcggtcgtgcaggtctgcgcgttttcaccccagatatcggggaaggtcacgtcgccttttatcccgggaactttcacgtccttgttctttccgggaagcccgcttttgccgccgaccgggcggttgttttccctgaccgacgagaaatcgaacgggaaggatgatatcttcgccgctgacgaaatggcgagaagcgcctgttcggtgcccatgcggttgtactcgtaatttccctttatcttcgcgtgcgcgaaaccgtcgccggcgcggtaggacaggagattgtcccagagtgacttcccgctctttgtgaaccgtgtatcgtccggcgagacgccgaccgaggcgagcgccattatgatctgtgatgtcgtctcggagctttcaccccatttggacggatatccgccgcgctcgttctgcgccgacgcgaggtattttatgccgttgtctattgctgttttgacgtctttccgatcctgatagtttgagagcgcgagcagagccatcgcggtgtattcggggtcgcagccctcaagatccgagaaattaccatcttttttctggaatgagagaatgtgggagatgagcttgtcgcgggttgtcctgtcctttgccgatgtcgacggaatctcgtatccgcgggaatcgagagcgataagcgcccacgccgcgccgttcataccctgctttgtcacgaacgcgaaatcggacagcccggagagaagatcatacccgccgacgtccgaagggtcgcgcccgatcgacgagagcgcgagaataacgcggctgtaatcggttgaccggcttgtgctgagtatgcccttttgcgacttcacatatcctacgacattcgaatagtatttgtcagccatgtcgtcagtgagaagaccggctttcgagagtatcatgaccgaccagtccccgccgatagagccgggctggagggagggtgtggcgtcgaggagctttttggcgagggaggagaagagcgttgacgcctcattcgagacggagatatttgtctgagccgcgctgaccgaataaaccggcgtctcataaacctgcgcggcggggaagagcgtgagcacggcgagcagagccgctgtcagtctgatgtttttcttcactatgttatatatacacggcgcgcgagggctgccggaacgggtttcctacagcatatattatactaaaaaaaccgggttttgtcaagcgccgggcaaacgaaaaaatccccctccgcgcgggaagggggaaatattcatggtttcagcgttccgtcagtctcgatgacgtccgcgccgtagaggttcacggcgtcctgaagctcgctttcctcgcggattatccatacgccgagtttgccgattttgtggatcttttcggcggattccttgttcaccggcggggttgtgttccatgaggtggcggcgttgtcatagcgcatccagaccgtgagctgggatttcgggacgagctcagatacctcggcgagagtatcgtcattcacgggtccgtcgtagtgaatctgaacggtcgggaagcgcgcgagcaccttctttatgaatcctgtgtcgaaggcggtgaagccgatgtattcgactgccatgtagttctcaaccgtcgagaagaagctctcgagctgttcggcgctcgccgaggcgaggacattgtcgaacttgagcggtatcttttccttcacggcgaaagcgaggatttcctcgagagacggtatcttctcgcctttgtacttcgcgtccttcgcgacgccgaagtcgagcgctctcgcctcatcgaaggtgagcgaggatatcttcgtgtccggagcgatttccgagccgtcggcgtttcttccggtgcggttcaccgtgttgtcgtggagcaggacgcagcgcccgtccgacgtgaatttcgtgtcgacctcgatcatgccgtagccctgttctttcgcgagcttcagcgcggcgagggtgttttccggggcgtctgtgccgactccgcggtgcgcctcgaggatgtaggttttgtctgccatttgtgtgtctgtcctttcttcggcgcgcggggaatcgttgtgatctctccgcgcggggtcagttcatttatcggcgaactgcgcgagaacgtcggagagctgcgtctcgacctgagagcgccatttttcgagcattgaagagaggttgtagttcttcttctgcatctcggcgtagatcgcgtccgagaacttcgtgccgattatcttgatgacataggagacgctgttgtggatgaggtcgagcatctcgatggattcatcatcgcgcgtcgccttgcccttgaggacgttttcgtagtacgcgggaaggagagtgatgtgcgactggtaagcgagctcttccattgccgctccggcgaaatcgatgtcctgaaccgttgtagggacgagcatggcgtgcgggttcgggctgacgttctggtagctttcctgttcctcgttgtacttgggcgtcgggatgataccgaagtcgcccttcatctcgcggagattcgacgcgtcgacaaggctgttcaccatgaagagcgcgtgatcgctcatgaactcgttcgcgcccgcgccgagataaaccacgttgtcattgatgaggaaatcgagcacctttgaatagatagtcgcgaactgctccgtgaagcagtagaagtaaggctcgccgcccgcgtccttttgattatctcggcgtcgcatccggtcagaagtgcctcaccgagaccgacgaagccccagttgaggacgccgacgcggtcttccttgttgattttcgtgtcgccgttcagatccttgaccgccattttgccgtagttgaacatgagatccatcgtccatttcccgtcacgcacagtctgataaagcccttcggggtcgacgccgatctcctcggctatcgccttgttgaagaagacggcgcggcagttctcggtctgcgtgaagatatggtcgttgaacgtgtagtagagctgaccgtcgaaggagagcttttcctccgcgttgtgatcccaccacgcctttgagaggtcgatgttcgggatgtcgtagaaatcgcggcagtagccctcggtgacaagccccatgatgctcgagagatccgcgtaggtgacgtccgcgaaatcatccgcggcggcgatgctgttcttgatgttcgacagggttccgtcggtcacctcgattgtgattccgagcctgtcctcggtgtcggcgcagcgcttgtggagcgcgtcgttcaggacttcgccgtccatttcctctgggtagatgtcgttagtcacgtactttgtctggtcggagtagccgttgaagatgcggtaggtcttgccctgatatttgtcggtcgcttccggtgggacgagggtcgggtcggtggtttcggtcgcggtggtggttgtgttgtcggagccggatgtgccgtcagtcggagttttgccgtcagaggtgctcccgcaggcggcgagggatgcgagcattgaacatagaatgatcagggaaattgtgcgtttcatttatacatatcctttcaaaatataatactacaattatagaatattgtcatgtacgacatcccggagaatgccgtattttattcaaagaacggtaactgtgactttttcgtgaattttccttatatcatcgggacgcggaggatttgtgccctcggtcaggcaggcggcggtgccgtaggtgacggcttctctcagacagtccgcctttgacgcgttccggctgaaagcggtgatgaatccggcaatcgagctgtcgcccgcgcctatcgtggatatcgcgtctatcttcgggtttttcgcccgccagagctttccgtccgacgcgagaatcgcgccgtctccgccgagcgagatcatgacgttctctatcccggacgccgcgacgtcaagagcggttttctcgagcagcttttcatccggagaagtgttccggtcggcgtcttttccgaagaaatcgaatatttcctcggcgttcggtttgatgagccacggctttatctcgcggagatctgacggagagatcgactttgagtcaacgacgacccgtacgccctgccgcgtgaggtctttcaggaacgagattgccgcgtccttccctatgccgccgggcagactgccggtgaaggtcagtatatcgccagacccgacgcggataagctcctttacacactcaagcgtgccggtggggcatgtgaagcctttgaacgaaagtctcgtctcgccgccttccgcagggtgtatcgtgatgttctcgcgtatccttccggggacggtcagcgttattgtgtcgatgtcctcgttttcaagtccctcgcggaaatccgcggcgttatcttctccgagaataacaaacgccgagtgaccggttcctgttccgagcctgccggagttcagtctcagcgcgcgggagatgttgactccctttccgccgatatcgcgcgagaccgagtcggcgaggttctcatgaccggcgcggaactcaccgatctgtacatggacgtcgtacgccgggttcagtgtcagtgtcacaatcttcatgtttcttgtcattgatcaagcctccttgcgtgttcaagcagataattctcggcttcaccgcaccagaga

SEQ ID NO: 3456 - DNA, 3009 bp, Unknown
  16S sequences of unknown bacteria
cacgctcaaaatcacgctcgaatagaaaaaggggcacccctacgaggtgccccaatgcttctatgctgcttgcggcttgcgctctacagctcgacgaaccatgcgcgcgtgcagttgactgccttctcgatgtcgtcttggatacgcgcggtgatgggcttgtcgaggttcatgagcaccagtgcggtgtccgtctcgtcgttgcgcgcgatctgcatcgactcgacgctgatgcccgcgtcgcccagaatcgtgccgatcttgccgatgcggcccgggccgtcaacgtattcgaggatgatgacgtcttgctcgggaacgaagtcgacggtgtagcccgagatgtcgatgatgcgcgggttgtcatggccgagcgcctgcgttgccgccacctcgacgtcgcctttgttcgtgcgcgccgtgatctcgacgtaggacggatagacgtagctcagcgggtcggtcttcgtctcgacctcgatgccgcgctgctccgccaggtacccggcgttaatgatgttgaccggcacctcgctgcccggggcgacgatacccgcaagcgccgccgtgccaagtgccgtcgggtcggtcttggaaatctcgccgcagaccctcacggtcaccttgctcacgctgccggtcgtcagctgcgcgatcagctcgccggtcttctggcagacgggcatgtacgtgccgatcttctgcatgacgtcttcggggatgcgcgcggcgttgaccaccgtgttgacggtcttgccctgcaggcccgcgatgacgtattccgcgatctgcgttgcagcgcgcgtctgggcctcgtgcgtggaggcacccagatgcggggtgagcacgacgttgtcgaagccatgaatcggggagtcgctgaccggttcattctcccacacgtcgatgcccgcaccgccgatatgaccggtctcgagcgccgtcgccagtgcatcgaggtcgacgaggccgccgcgtgccacgttgaggacgatggcaccctcgggcatcgcgttgagctgctcggcgccgatcatgttggtagtctcaggcgtcttgggcatatgcagcgtgatcacgtcagagcgcttgcacacctcgagaatgtcgtcatagagcgtgatcccgtagtgggcggcaagctcgaccgggcaatacgggtcgtagccgatgaggttcatgccaaatgccgctgcgcgctccgcgacgagctgccccacatggccagtgccaaagatgccgagcgtcttgccctgcaactctgtgccgacgaacttggagcggtcccacttgccatccttcatgctcttgtcggcgcgagccgtgttgcgcgcaacggcgagcatgagcgccatcgtctgttcggcggcagaaacgatgttggaaagcggcgcattgcatacgataacgccgcgctcggtggcagcctcgcggtcgatgttgtcgactccgacgccggcacggccgatgatcttgagcttcttgcccgcttcgatgacctcgcgggtcaccgtcgtggcggatcggacgatcagagcatcataatcggaaatcatatcgagcagctgctcgggagtggtgtcgggcttaaaggttacgtcgtaaccagcgtcttcgagaacggcaatgccatccttcgagaacttctctgggatcaagaccttcatgtagcatcctctgctttcaattggacctgtcttgcgaacgacgacaattgtaagagtttgcctacttattcagttggcaatacgaaaagaaatggaaatatacgtaatgtattgtcgttttggttgtgttttgtaatttggatatataacggtctataaggtttgctgccttttcgtgttctttttacaatatagctatgactaccataatactcacgcatacaagcgcgcttgaatactggcgttgtgtcgcctcggacaacactgaccatgcagatttttcaagctcgtcgttcacccgagcaccgcaccttcacgagctcgcgatgctcataaacacaccgccactgcaacagctcagcacgcccctgacgcttctcacgcttcatcgcgatgaacgccggaacaccgctgcggcacgctatatctgccagcagggaccgttcccgcaaggctcattcatggctagtggatatgacacagcctcgcacacgaccatcgccgtatgcagccccgagctgctgttcattcaggcggcaaaaagctgcagcgcactcgaggcaaccgctctcggcttcgagctttgcgggagctacaggggcagcaaacccttgaccacgccagaagagctctcttcctttgcagataaggcacagggcgtgagcggtgcaaagcaggcgcgcaagtacgcacggcacgtcttacccaacgccacatccccagaagtgacacgactcgcgatgctcgtacaccttccacgctcccttggaggacttggggtatccgcaccccagctcgatgcgcgtatccccgcaccggacgaagcagcgcgcatcatcgggagcaggcacttcgcaccagatctcttctggcctgaactcaacgttgcggtggaatacgactcacgcgaatggcacagtgagcagactcatgccgagcacacgcggagaaaagaactcgcctatactttagcgggcgtagacgttatctcactcgatcaaaaacaggtgagagacctcgatctcatgcgaaagatctttgaagggatcgaccacaaacttgggaacagaaagctccccgccaacgagaaacaaagggagcgtcaggagcagacccatgagcttctctgcaagctcgagccaatcgcacgtatcgagagcagacggtcataagtctcgggcaccagcacacatcacagaaaatcaagggcataaaaaatgcaccccaaaaagaggtgcatatacagagcaaattgtaagctgcggtcaaaagaccaacgaacgactaacttcgccctccagaaactataggggcccccggaaggcccagctgcgtcctgccc

SEQ ID NO: 3457 - DNA, 2656 bp, Unknown
  16S sequences of unknown bacteria
cttccgatcttatcttctttcaattccgggcaacggtccgtatttttcatcacggtgtacatcgcttctgtcgcgggctggctcgttcccatagagaaaggggagatcgcggtatcgatgccgtcacagcccgcttctatggctttcaggtaggtcatgggcgccagtccgctggtgcagtgagaatgtacgtgtacagggagttttgtcgtcttttttacgacctttaccagcttttccgcgttatatggtgtgagcaggccggccatatctttgatgcagatggagtctgcccccatgtccgccatctggcgtgccaggattctccaataattcagcgtatatgcttttcctgtggtgtacgccattgccagctggacgtgggcgccttctttttttgctgccagaactgcgcgttccagattccggatgtcattgagagcatcgaagatacggataatgtcgataccgttggataccgctttccggacgaaggcgtcgactacgtcgtcggagtagtggcgatagcccagaagattctgcccccgaaggagcatctgaagttttgtctttttgaatcctttccgaaggacgcgcagacgttcccacggatcctcgtcgagaaaccgcatgcagacgtcgaaagtagctccgccccagcattccacagaatcgtatccagcttcatccatcgtttctatgatcggcagcatatcttcggttctcatccgcgtagccatcagggactgatgtgcgtctcgcagtacggtttccgtgattttcagcggattatttttatgaaaaatcatatgttttctccgttttttagtaagtgaaaaaagaaatatcatatttttgttttgattatcaaaatatattgtaatatatattttaatctgtttcagggattaatcaagtgaaaaattacaaagcggattcgtattttgcagaagatgacatagcgtcggcatttcgataccggcagaaccgacggatttcatttccgagctccggcgggaaagcacggttttatgccgggaaccgagatccttcgtatactctgatcagagatatttgctgagggccgcttctgatggcaaaaagagtttgactttcccatcggcgcaggatacaatagtaatgcttgcattcccgcaggcgtcaggctgggactgccggccgcgacaaaagttattttttagtgccgaaaccgttttttatgaagaacagagtaggcgtcgaaatcgtatctcttttcagagatcagagtagacattcaggaggttaaaatgaaatcttacatcgcaaagcctcaggaagtggaaagaaagtggtacgtactggacgcagaggggaagactctcggccgtctcgctacagaagctgcatccatcttaagaggtaagagaaagccaatctacacaccgcacgttgataccggcgactatgtcatcgtcatcaacgctgaaaagattgaagtgacaggcaaaaaaagaaaagaaaagatttataagagacataccggctatccgggcggtcttcgcgaaatcactttcgaaaagttacaggcaaagaagcctgatgaaatcatccgccacgctgtaaagggcatgcttccgaagggtcctctcggcagacagatgtataagaagttaaaggtttatgccggccctgagcacaatcatgcagctcagaagcctgagacatggacttggtaaggaagggaggaatcgtaaatggcgaaacagtatatcggtacaggcagaagaaagtccgcaattgccagagtaagattaatccctggtacaggtaaggtcactgtcaataagaaggatcttgacgattatttcccgatggaaatcctcaagaacgaagtgaagcgtccgttctccatctcaggaaacgaaggcaagtatgacgttatcgcgctcgtaaacggcggcggtacgacaggccaggccggcgctttaagacacggcatctccagagctctctgccaggcggatcctgaaaacagaccttctctgaaggctgcaggtttcctcacaagagacccgagaatgaaggaaagaaagaagtacggcttaaagaaggcaagaagagcttcccagttctccaagagataatcgcgaaacagattcaaaatcgtttgcagaccccgaaatccactggatttcggggttttttggtctgtatttcttcatatatgcagttgaaatcaataatcatatctgtcctgtatcgatataggccggtaaaacagatttatcaatatggctgcgtacctgcgcctcggcggaagaggtacatcggggattaaaaagacgaagactgaaccatgatcggtatgatacaataagattatcaaaaattggctattcgagaggaggataaacatgatttctgaagtcgcaaacggaatccatatgatctcgctgccttttccgcgcaccagagtcaagtcgatcaacgagataaagttatatgtcgtcagaggaggggagcgaaatcttctcatagatacggggctgaatgaaccgcagaattttgaactgctcatggaggacctccggcagttaagtatcgatatggaaaatactgatatatttctcactcatatccatgcggatcacagcggttcgctgaacaggctaaa

SEQ ID NO: 3458 - DNA, 4196 bp, Unknown
  16S sequences of unknown bacteria
gtctggggcggaccggtccgtgatgccggggtgatcgacaagcccattgcccgactgccaaagccgagcctgctacgctgtgtcgcggcggatgggcagcgggctgtgacccgctaccgggtgctggatcggcgcgacggctgcagcctactggagctggagccggtcaccggccggacccatcagctgcgggttcactgcgccgacggcggcttccccatcctgggcgacccccagtacggtacgcctgcctcccaagcggtgtccgcgcagcggggcttttccacccagcagctgtgcgcggcgcgcctgattttcccccatcccatgaccagcgcggcgataacgctgcactcgcggcggtctgtctccctttttccggcgaatttttccggctctccttgtcaggagcggaaattagatgtataataaaggcaacatatcgggatttttacccgtctcatgggaggtatctacatgtttaccaagctgatccaggcgctgcatacgacgcgccgcaccatcgtctttaccgagggccccgatgcccggatcctggaagccgccagccgacttctggcagaggacctgatggatgtcattctcgtcggcaatgtggacgaagtccgcgccgccgcgcagaagggaaattttgccattgacaaggccaccatcctcgacccggcgacgtatccggagatggacgagatggtcgcccagatggtcgcgctgcgtaagggcaagatgacggaagagcagtgccgcgatgcgctgaaaaagggcaactacttcggtacgatgctcgtcaagatgggcaaggccgacgcgctgctgggcggcgcgacctactccaccgctgataccgtccgcccggcgctgcagctggtcaagacgagaaagggcgcgcacttggtctcctccagcttcatcctgacgcggggcaccgccgacggcgcgcagacgatctgcatgggcgactgcgccatcaacatctcctatgaagacagcgtcgataaagaaggcaatgtcgtcttcaccgccgcgcagaagctggcagaggtcgctgtggaatctgcccggacggccgccttcttcggcattgatccgaaggtcgcgctgctgagcttctccaccaagggctccggcaagggcggcactgtcgccctctcccaggctgcaacgcaggaagcccagaagctggcccccgagcttgccattgacggcgagatgcagtttgacgcggccgtctccccggtcgtcgggcagctgaaattcccgggcagcaaggtcgccggctatgccaacaccttcatcttcccgtgcatcgaagctggtaacattggctacaagatcgcccagcggctgggcggctttgaagcctatggcccgatcctgcagggcctgaatgcgcccatcaacgatctctcccgcggctgcaacgccgaagaggtctacaagatggccatcatcacggccgggatggcataagcaaacacagtatcagcgccagactgccgggcccagttccctgggcggcagcctggcgctgtcttttttattctaagacaggcgggctgctgcatggcgctcacgatccaacggctggccgcccgcgtctgggctgcgtcgctccccgggcccgccccggactttgacacggccaacggcaggggaggcactgtaccttgcctggcgggcccgccagtggcctggtatcgttttctttattccgcttcacgttccccatactgccgcaacacatcaaggaatgctgcgccgtaccgggcggctttgatccgcccgacgccagagacctccagcagtgcttcctcgtcctgtgggcagcgccgcgccatatcctccagcgtcgcattggagaagatgatatagcccgggacccgctcctgctgggccagccggttgcgcacctccttcagggcggacagcagcgccgcgtcggccgggcgcagctgcgcctttgccagcgcaagcggatcgaccttcgcgatctcctgccgccggatccggcgtgtgacctttttcccgtggaacaggacctctgccgcggccgcgcagggccgcagcgcgccaaattcatttttggcgcagtagccgcctgcctccagcgcttccatataccggctgacctccgcctggggcgtctttttcagcaggccgtaggtagatacgctgtccagctgcagctccagcacccgtttattcttgctgccccgcagaacctgcgctagcaagctggggccgacataatagcccagcttcttgcgtacccgctcgatgcacgagaggatcatctgggcgatcatcgtaatatcctgctcggtaaaatccccggcgcagttgccgcaattgccgcagctctccgggtgcgcttggccaaagtaatccagcagcagtccgcgatagcaggcgccactcttgcaataggccaccatctggtccagccgccgccgattttgcgtcaggacggcggccgcttccttctccgtcagctgttcattctcattgtgctccatcagatacttggccgtcataatatcgccgggggagaagagcaaaatgcaatccgccgcgctgccgtcacgcccggcccggcccgcctcctgataatacgcctccatgcttttgggcatattataatgaatcacatagctgacattggatttatcgatccccatgccgaaggcgtttgtcgcgaccatgatccggcagcggtcatactgaaacgcctcctggttttggctgcgctcatcctcggaaaggcccgcgtgatagcgggtcgcggcgtagccctggcgctgcaacgcgtcacacacccgctccacattggcgcggctcgcgcagtagacgatcccgcatttctcccgccgcgcttcgatcagctcctgcagcgcggtcagcttatcctgcggacgctgcacgtcaaaatatagattggggcggtcaaatccggtgatgacctgcaccggatcctccagctgcagcagccgaagaatatcctcctggacaaaggccgtcgccgtcgccgtaaaggctgcgacgaccgggcggacgggcagcgcctggataaactccaaaatgcgcagatagctcggtcggaaatcctgcccccattgggagatgcaatgggcctcatccactgccagcaaggataccagcacattctgcagcagctgggcaaatcccggcgcttccagccgctccggcgcgacatacaggagcttatacgccccgcgccgggccccggcatagacctcccgcatctgcggaccggttagggagctgttgataaacgccgcagggacgcccgccgccgtcagtgcggcgacttggtccttcatcagggagatcagcggcgataccaccagggtaagccccggcagcagcagcgctgggacctgatagcacagggatttgccgccgcccgtcggcataacacccaaggcatcccgcccctgcaggatcgcatcgaccagtgcctcctgcccgggtcggaatgccgcatggccaaaatattccgttaaaaccgccgctttatccacaaaaatccccccatttctacaagctgccttaattttaacagacagccccggcaattgcaaccggaagccctcgggcaggggcgactccacacaggctatatgtaggcgtctagccccagcttcggaatctttgccgtgctttttgtgtataagatttctgctggattattagaattcccgccatcacagcacctcgtatgcttcgtctgataccggctcgcaccattcgtttttgcaggcctcgccggggacttctacagcgatatggctgaaccagctgtcgcccttggcggcaaacaggccgcttttcgggtcagtcatcggatttaagaaggaatcgccgataaaaaacttggcatacgccgtgttgggcgcgccggtcccaaatacattttgccgcttcaaatgcggttttgtcttccagcttcatcgaaaaaaagcctccttcagacattgacctattgcgatttccccagcgagcacgggacgcgcatccgcaccaacaacgtgattgagcggctaaaccgtgagatccgccgcacccgggtggtggggatgttcccggatgggaactccgccctgatgctggtctgcgcgaggctgcgccatgtggcgggcagccagcggggcaacaag

SEQ ID NO: 3459 - DNA, 2057 bp, Unknown
  16S sequences of unknown bacteria
tttgaacaggcgggaaaaatagttcgcgttggcgatgcccaccaggctggcgatttccgccacgctcttatcgccctcgcacagcagcgacttggcggcgcggatgcgccgcgcgtttacatattcggagaatcccgcgcccacgtggtttttgaacaggcggctgagcgaataggtggaaaggccaaagtgatccgccaccatcacttggcacagctcggggttggcgtagttgctctcgatgaattccagcacggcgtcgcgcagggctagcacgttttcacccgtgtttttgtgctgggcggcgggatccgcgcaggcctcataggagcggcggatttcgttggccgagggcaccaccggcccggtgcgcacagaaagcgtacccggcacgttggcctccaaccaatcgcgcacaaaggcggaaaaaccttgcccgtctgccgcgggcaagagggaaatcatcaccgtttcgccgctgcccacgatatcggtgatgtacattttggccgcgaagcgctcccgcacgccctccgccagcgcggcccgttccgcccagcgcaaggcgccgccccgcacgcaggttacgcaataccagcccttttccggcaggcccaggcgctccatttcgcggctgggaatgggcgcgccggagagcatgttgcccaatagcagatccatcagcgccaggtttcgctcgttcatttcgctctggatgcgctccacatagcgcacaatgccgcccagttcatccgtggagccgtcgtccgcggggaagtggtcggccattttttggatgggccggtagttcacatacaccatggcgatgcccaacagtaccacggagaagattgcgagcagcagcgcgagctgcatgctggaataaaaggtgtacaggctctgctgcatggcgtccagcggcacgatagcggcgaaatacaacccgccgttttccagcaaaaacgcggtttggctctggcccgcccgctcgatccggcgaatgcgcgcgccgtccgccacattttccagcaccgtggcgttcgcgcccgcgctggaaagcagcaggcgcgaatccggcgcgtaaatgctgaattgcgcgttgtacgccccggcggcggcgaattgcgccacgtccagcgcgctggcgtccaggatgtaaaagatcagcgcgtccaggcgcgccgcgcccaggcgcacgggcatgctcaccagcagcgtttttccatcggaaaaatagcccacgttgctttccgccgcttcgcgaaaaaaggcgctcagttccgcgccggaggcggcgtctttatataggaaatcgcaaacgccctccacggtgtacttgcaagagttgtagagcaccgcgccagtttcatagtaatacacgcccagaggatattgggcggtattttccagcgtgcgcagcgcctgcagggcgttccaataatagtattcgtttacctctggctgaatgcgcgaaagcgcgtaggccgtgttgccgttttcccggctatccaggctgatctggttggccagcttgcgcatgtcatagagcttcgattgaaaataggcgcagaacatgctggtggtgttgtgatagtattcctcattcgcgctttccagctggccgcgcgccacgcccaaaaacaggcccagcgccaccatgcagggcaccagcaaaaaaatgatgcacgtggacgcgatctttaccagatagcggcggcgcgtgagaaaggctttcagcttcaagcggtacccctccaaatcttttgatcgtgggccaatctacagtatcaggcgaaccaatcgccgtcgcggctgcgccgcaatggattggttttccgccacagttgcgccgtgccaaaaggctcccctttcccaaaggggagctcagaccactgacaaacccctgcgtttgtgtgtaaacgcaggggtaagatatataagagcgtggagcaaagaggccaccagcctcttgatgttttgcaccgccgctgtcaggaaacattgctcccgcatgttccgtatcccaagcatgcgcgcatagcgcaggccgtggttct

SEQ ID NO: 3460 - DNA, 6466 bp, Unknown
  16S sequences of unknown bacteria
acaaaataatcctgaaccgatttataaggaaaatgatttcgggatatacggaggaagatatgaaaacggacagagagcagggaacttatcagggtattcgccataatgtcgagcttgacggtgtggtttatgaggtctgtcgtgcgtatgcgggcaggcagagcgcggtcgatcttgtgcatgaccgcatacttgagctctccggcggagctgactgccataacccaccattgacacgacagggcgtagaggtgtataatatttatcgtggagtcggtatgggtaaggaggcaagatgaaaaccggcaaaatgattctggctttcgcgtatctgaggctttcccgcgaggaaatgcaggcgtgcgaatccggaagtataaagaaccaaagaatgataatctcggactattgcaggcagaacgacattactctcgtgcgtgagtttgtggacgacggatggtcgggcggaaattttgaccgcccggcgtttcaggagatgttgcggcagctgagcgacggttcggcgaacactgtgataactaaggatttatcgagacttggtcgtgatatgcgcgagtcgagctattacgcggagcagtttttccctgagaactgcatccgctatatcgcgatcgcggataatttcgatacggagcatgacaatataatggcgcctttccagttcgcgatgaacgaggtctacctgcgcgacggttcacggaaggtcagggatgttctgaaaaacaagcgcgagaatggtctgtactgtgcctgcccgccgtatggttaccgcaaggacggcagaaataagaatcttcttgtcccggatgaaatgacggcgccggttgtacagcgcatattcagaagcgcggctgagggcgattcgtcccgtaagatcgcgcttgatctcaacagggatggtattattccgcctttgaagtatcgggtcctttacagggacgatttcagcgatgaaggggcgctccgtgcgtcggacgtgtggaattacacaacggtcaagcgtattctgaaaaaccgtgtctatctcggacacacaattctgggtcggagccgcaaggtcagcgttaagtcaaaaaagaaagtaagtatccctgaggaagactggatcgtaacgaagaacacgcacgaggcgcttgtcacggagaatgtatttgagcgcgcgcagaagaacctcgggaaggggacaaagaggtttcaggacagcgggcagttccggaacagcatattcggagggattgccgtctgcgaaaggtgcggacacgcgctgtgttcggcgggaactgtctacaagaatgagcgtaaaaagtactggtatctcacgtgtactcacaagcggtcggatatatcaaacccgtgtgaaggggtgcgaatcagatattcggatcttattgagatcgtgagacgggatctcaactcgctgatatcctttactgatgaagagatacgtgtcatggtcgaggacattataaaaacaaggactcagggggtggatgccgaggcggcaggaaagcagaaggaaaaagccgtggcgcgtcttgagacgatcaacaggatcatcacgaagctgtactttgataacgccgagggaaatcttgacgatgacagactgaaggctatggtgtcagaccttgagactgagtctctggggctcagaaagactatagaggaactgagcggaaatacgggagatccggcggcggagatcggggaaaattacgcgcgttttttcgcgctcgcgagaaagtatacgcatatagaagtgctggaccgtgatatattacagacattcgttgagcggatagaggtcggacccaaggagctgccggatggtgtgaagcatcagtcgaggaagaagcctgaatacaggcagaatatccggataatatacaaattcataggcgagcttcaggacaagcagcctataggcggcttgcccgtgacggacgaaaaagcagagtgacagagaaatttcaagatgtaaaaggaacgtcaagggaggtcggtgtcaacctcaagcagggctataacggagaacttacctccaagcaggccggctcggtcggcggacagatggttaagaaaatgagccccgcacgaaccataaagttcacgcggggcgaccgcacagcggcggggcatgaggtggaagttacttatattgttgaggtggatacataaggaaactctgatttaatgtggtactcggttttggatgagcctattaaactttttctgtaaattccccgaatctgtggtataatagaataaaaaaacacaggagaataaaattgggaagatcaagaaaatcaccgtcgatgacagacgacaagtgagagatcgtcccgagatcaatcgaggaatacgatataaagaccgcggaggatatacagaataatatagatggggctgtcgcatttaagggtaatatttccattttcatggcattatgcaaaataattcaagtttgccaatatggtatggacttcgaaaattgttcatattgaccatcaaatggaagtaatttccaaacttgcgacagccccatttatattcaacttattctgacgttcactcatcaagcgaggagaaattctcaacgagtttgtcgagcttcgcctgtgccgccgcctcgtacttcgcgaaattcgacgagaaatcattgctctttctcgaaagtggaagatagaacgccgtctgctggaagatcgcgtcgcagttgttagagtacgcgagagcgaatgaaccgccgatgttcccgtggattatgtcgatcatctgtgacgaataatcatcacgcgaatacttgaccttgagtcccgtctcataatacgccgggatcacaagcttcgctgtctctcggttcagtacctcaagaaccgcgcagacattctcaaaattctgacaggtcacaggtatcacgccgatttcggtcgtatcgtgcgacgacgagacgtattccttctggttcgggtcgaatttcggatacggaactattccgacctcgaattcgacgtcgcgcaaagctcaagtgagccaagacggtttgaaccgagaaaaagtgagcgcccatttctgaacaaattgttctgtgcctgaatagcgtcttcatcaagcttcataaactcagtcacacacgtcgcttcactgtaaaaaatcttattgagtagctcaagcagccgcactgagttctcattattcatcgcgatcttcagcttgccatctgacgttttctcagtgagcttcaggccagcggaaacaagaaacgggatcatcggtccccatgtctgaaaggcaacataaccatactggtcacctatgtcatgctctgagtttccgttcagatcggaatacatcccattcacataggtgaggaaagtatcgaacgtccatttattgtcgaggacatccttgtacagcgcgtctccgtcgccagtatgcgtttcaagaagatccttattgaaatagagggcgtgcgcggagcggaggacatctataaaatagtccccggcgagaatatattctttcttgccgtcgagcgagagttctgacatatatccgtcataccagtaatcctgtgtagtgtcgatatacggcgcgttcgcgatattccggaaatttccctcagctgaaagccccgccatcggataaagcttggagataattatgtcgtagagatcgtcaccgctcatcacaagcttcgatatctcagccgccgcgctggcgtagttcacgtcgtagtcagtgtaaacaagcttgacgttaagtgtctcctcgacgctgcggttacggaaatacgccgaatcctgaacaacatcacctgtctcttcatctggaccctcgataagataattagaggttctggaatccacatcggcattagtgctcgtgtaaatccttatctcctgtccgccgagatccatatcggcaaattcgtcctgttccccggtcacagtcccggaagtcgtgccagtatcattttccgatgtttcatcggcagtcttcccgtccccgcatgccgccatgtaagacgcggcaagcaggagcgtgaggaaaagcgagacatttcttaaatatgaacgtttcattgtgttttccctttctgataaaagtcagaatcaactgctccgttactctattataccagatcacggacagaaagtatatcaaaaaaacgcattcttgagccccaaaattgcttttttgcgtatttcgcgtcccgtcaaaatgaaaacacgccgggatattccggctgtgtcgaataatatttgattataggtgaataatcttaaccgaaacctcttgaaaaattcaaaagaatgtgttataatatatatacgatcggaaggtccggtatgtatgttttgagaggaagtgtgatcatggcggacaacaaaaccggcacgaagcttatcgcgccgaacaagaaggctcgtcacgattactttgtactcgatacgtatgaggcgggcatagagcttttcggcaccgaggtcaaatcaatccggcgcggcggagtgaatctcaaggattcctattgctgcattgaaaaaggcgagatgttcgctgagggcatacacataagcccatacgagcagggcaatattttcaatcgcgagcctctgcgcaaaaagaagctgctgatgcacaagaaggagataaacaagctcctcggcaccgtgtcgcagcaagggctgacgttggttccgctctcgatgtacttcaagggttcgagggtcaaggtcgagatcggactgtgcaaaggaaagaagctctacgacaagcgcgacgccgccgccgcgaaggaagccgaccgcaacatcgagcgcacgatgaaaactcgcgcgcgagacggatattgaccgtcaggaacatggggatgtaaaggtttcgacggggattttgaaatacggtaagcgggtagagacgcctgatctcttaaaaattggcaaacttaaatttaaacgctaacgataatctcgaattagctgctgcctaagtgcggcatgtccgatgagtgagtactgcggctctcatccgggcatcaatcagcagtgaacgtgagcagtggtttcgcccttaaagctgccatgaacaaaagagctaccgataacccgagcctgtcatccggcgcgggataacgggaatcacaaaagaatgacttcacccgaagaaagccgtgtggatggattttcggacaggggttcgactcccctcatctccaccacctaccgtgtacaaaaaagatgcaccccgaaaaacgcaggttttcctgcgtttttctcgttttatctccgtttttcttgatttttcaaaaatcggattttgagtgcaaaaaaaagatgcattcgggggttttcggggttttgagtgaaacgaacccgtgtctgacatatattaacaatattttgcgaagctgagccacagtgtgatcatcacattgtggctcttttttatttttataaaaggaaggagctatcaatgttcaaagcaaaaattgaaaacggcaaggaaacacagtacctcgagcttccatgcgatcaggagatgctgaacgcaaaaatcggaggtggaagcgatgaaatcaaagtcaccttctccggcgaaagcgagttcgaaagtaggctcatatcgctggtccgtcctgggaatcgcctctcgaccatcaactgcgtctgcggattttacgagaacctgccgtcagctgataagaccgacattcaggacgccgtgatgaacggcaaggtctttacattctctgacttcggcaagctggtgattgatcgacgtcagcaggacgtaaccgaatactactattgcccgctcgttgcgagagtttatccgcgtgacgagtacggaggttacgatgagtatccggacgactacgacggagattatctcacgcagtacgaggataagatccgtaagctcatcaagcagaaagaacttcgcggcgaaaaccccgcgaagtacttcgccgggagcgacggggtggtatcaaagctcaaagaaattcacttcggaacgcagaatgttgacggcgttctctatggaaagattcgtgttgaactcactgagcagcttacagaggaggaagatgccgaaatcaaggaatttctcatcggtcaatgcgtcgatggatttggtgaagggcttgaacagcgcgagattgagatttcggaaggaatcatgtacgtcagcttctggaacgccgatgattatttcatgctcaatgaaaatgagttcgacgagcgtcttaccgggcttgagatgggaggtattgaatgatggcttctgtctgtagcaacggagaaacaatacgcgcgtctccgactgagtcgtatttaaatgaagattttgaaatgtgaaaggagactttgaatgccaaatcatgtaattaaccgcctggcctttgactgtccggaagatcggctcaagcagattctgt

SEQ ID NO: 3461 - DNA, 4692 bp, Unknown
  16S sequences of unknown bacteria
ctcggcgacattgattattatatcagcttatcccctccctgtcaacaccttttttcaaattttttatcagaaattgtatattctttttccagcccccggaaaccgcatcactacacgctttttccgattccggcacctgccggttctcaccatgccgccagaaaatcctccacaacttcccggaaatgttccggacacagccgtcccagattacaccgccgggccagatccagtaccggctccgccctgccgcacagatcccggaacacccgcagctgtttgccatcccataccatcagtccatagccagtgcgtccctcttccagctggtcacagatcaccatgtattccaaacccattcagcccctttttatcagtttaacaccctacttcgcatcctaaatcacccgtttcaaaagcgcaatgaactgcagttcatggttcgaccggcttcgacagattccgcaaaaacttctttcggttcgacatttttcccatcaaaaaagcggagagctcacagccctccgctttttgccggtactttgaaatcttattcggcccggtagatcgcccggccgtccttgatggtttccagcaccttgatattcttcagttccattgccggtactgccagcgggttccggtccaggattaccagatcggcccgtttgcccggctcgatgctgcccttttccttctcctcgaagtactgataggcagcgttgatggtcacgccgcgcagtgcctcccagacactgatgcgctgatcggctcccatctcggtgccattcttggagatgcggttcactgccgcccagatggtcagcagcatatccggcggcaccactggggtatcctggtgcatggtgtacaccacaccccggtcaatggcggcacgcatggggctgatcattttgccccggcgctcgccgaagttgcggatatgcacatcgccccaataataggtatgcactacaaagaagctgccgatcatgcccagaggcgccatacggtccagctgatcgggacgtacggtctggcagtgcaccatcaccggacgcagctcagcagtgctgcccagctcctccttgaccttggtatagcagcgcagcagctgttccgaagccgcatcgccgttgcagtgggtcagcagctgcttttcccgggagattgccacccggatcagctcacagacctggtcgtcctgatagatgggatagccgcagtagcccggctcgccgcccagatagggttcgctcatccaggcagtccggccctggggagaaccatccaggaacagcttgtagccgccggtgcggtaatgtccatgataggtataggggtcatccgagatggcgccggtggcagtgcggagatccgcatagcccacgatgtccagatagcatgcctccgactgaccgaaccgctccaaacgcacagcattttccgccgaggtcatgccgtcctgcacagtggcaataccatggctggcatagaccttctgggcttcggcataggtggcagcgatctcctcctcggtaggaaccggcatggctaccgccacatggataaaggcattctcctccatatagccgttgggagtgccgtccgccagccgtccatagacgccgccttcggggtccggagtatccttggtgatccccagcttttccagcatgcgggtattggctgtgcccatgtgccccgaagcgtgggcaatgatgatgggattgggcagttccggatcgtccaggtcagccgcggtgggatgctgatagcccggcagatcgttgtggtcatagccggtgcccaccaggaaggcatcatccgccaggtttctggccttgcggaactccttgagccgggtgcggatctcctccatgctggtgcagccgctgagatccaccttatccagcatggaagccacactggtgaaatggctgtgcgggtcgataaaggcgggcagcatggtcttgccctccaggttgatgacctccgcctcaggggatttccggttgaggatctcgttgttgctgcccacttcccggatgcgtccgtcctccaccagaatggcttccacaatctgttcgccattcatggtgatgatttttccgttataataaactgtctgattcattcaaacacctctttctctgtaaaaagtcacctgtattcagtatagcagaaaaatcggcggataaatcagaattttgtgaacagtcgggaaactctttcccaaaatctggacacatcttaaaaaaccgggagacggattttcctgccgtctcccggttctgtgcggggatttacagctcctctgccttgagaagctccgttttcagttcaaattccccggcctccatgggacggtcggcatattctgcctcgcccacctggttatcgtaggggtcattgcgggggaacttccgggcaggcgagaactcctgctggaaatcggacgccgccggcatgcggaagggctccagattgccgaagtagaagtcatggcgcagggtgctgccggcccgccaggcagagccgccgaaggaacagtcggcaaagagccagccatagggctccacatagaactgggcccagtcatggcagcccacattcaccggtgtggtatagagtcccgactgccagcgggccggaatgtccgccgcccggcagagggtgacaaagagcagcgcctggatgccgcagtctcccttccagcccgaagccgcatagccgggaatatcggtgatcgccatatagggacgcacaaaggaatacatcagatgtctggtgatatagtcatagatgcgccgggcccggatcagcgggttcttgtcgccgccggtgatctccgccgccactgcccggatgtaaggggtcagggcgatatggggcagctgctcctcggtatagaaggtgggctgctcattgagcacctttgaggggtcgggccggacataatccgcccggatggtatagctaaactccacttcgatggtctccccggccttcatggggcgttcaaagaagatggtgcggtggggctgtgcggcaggcgcaatgaaggcaggctcctccgaagtgcgcagcagggtgaaggactccacctgggcatattccaccggcagcggcagatgcacccggacaatcccggggccgtcctcccggtcctttttgagggtgaagctctcccggagggtaaaacgccaccgggaactgcccttctcctgcatggtatggatcacctggtccagacgctcggcattggcctgattgtcccggacctgggcctggtactcgcccttggcacgggccgagtaagctggacgggtcttgagcaggttctcagcgaagttatagatgatgcggcgctccccttcacaccagatccagtccactgcgccgttctccaccagctcttccagctccccggcggaagcgtcctcaaatacctcgtcaaaccggcggacagcctcttcccaggtcagggtataggcttcgggcaggcgtcggagcacttccttctcggcttccaggcggctgcgctgggcctggggcagatccccctccagatacttgtcgatccggcgggcggcatgggccagatcaccatgccatttgagcttctccacatcttccggcagcggcgcccccagaaacagcagatcggtatacttcatcatattcggtcactccttttgcggcagctgccgcctttctgatgctattgtaccagaatccaccgtggggacgcaatcgtccgccagcagttttcccgaaaaaagaaaactgcccggtatcaaaccggacagctcttctgatgtattactcgttgcaggcggggttttcgtcccgtacccgatccagggaatcctccagacccagtgccgcatacttttcccggcgctcccgtaccagatccgcaatggtcacagtatcggtcaccgaggcaatggcctggttgatcttctgccacaggccgatcaccgaacaggtatccgcccggggacagccgccgatctctcccacacaggcccgctggctggcttctccctccagggccgcaatcaccatgtgtgctgtgagttcctcagcagaacgccccatcacatacccgccgttcgcgccgcgcaggcttttgagatacccggccttggtcagcggaatgacaatctgttccagatacttttcactggcattgattttccgggcaatcgacttgagcgatgccgccttcccttcgggctgagctgcgatctccacaatcatacgcattccatatttgcttttggtcgtaatgcgcatacaagctccctcccatccatcttttactattctgtattataacgcaaagtgcctgcaacatcaaggaacaatctatataaaaatactatgtttttcacctgggcttccggtcgtccggggaaatcttgctttcccggcagggtatgctatactgaagtggaaatccctgtttcggaaggtgactgtctatggatacgcccctgcgggtgatcacattcaacctcaaacgcgacctgccctttttccgttcccaccgctgggcccagcgccgggagatcgccgcggaactctgccggcgctccaaagcggatctcatcggcgtgcaggagctgatgccggatatgcgccgggatctggaagaattgctcgccggtgaatatgccattg

SEQ ID NO: 3462 - DNA, 4275 bp, Unknown
  16S sequences of unknown bacteria
actgctgcacgacatcggcaaggcgctcgattatgaagtggacggcagtcacatcgagctgggctataaattctgcaagaagcacggtgagcgggacgtcgtcctcaacgcgatccagtctcaccatggcgaggtagagccgaaatatctcatttccaatctggtcatcgcagcggatacgatcagcgcggcccgtccgggcgcacgctatgaagcgctgcagaattacatcaaccgactggaagagctggaaaagatctctaagaacttcgacggcgtcgaatccgcatacgcgatccaggccggacgcgaggtgcgcgtgatggtcgtgccggaaaagatggatgatcttgcctgccataagcttgcgcgtgagatcaaggacaagatcgaggcggaactgacctatccgggacagatcaaggttaccgtcatccgcgagatcagggcctgcgagctcgccaaatagcatgaatattctctttatcggggatatcgtcggaagtgtcgggagggaaatggtcagaagccatctccctcttttaacatcccgctaccagatcgatctggtcgtggccaacggggagaacgcggcgcacggcaaagggatcacgcgccggatctaccatcagctcatcggctatgggatcgatgtgatgacgatgggcaaccacaccttcgcgaagagcgacctgtacaatttcatcgatgaggcggaccggatggtgcgcccgatgaacatggcgccgaccgaatatggcaggtcggtgctggtcagggaagtgaagggcaagcgggtcgccgtcgtcaacctgtgcggcgagatcttcatgcacgatatcacggattcgccgtttcgctgcatggaggaggcgctgaggcacatcgacgcggatatcgtgctcgtcgatctgcatgcggaggcgaccagcgaaaagatcgcctttgcctatgcgtttgccggccgcatcagcgcggtcgtcggcacgcatacgcatgtgcagacggcagatgagcgcatcgtgaacgggacggcggccatcagcgacctgggcatgtgcggcgcttataccagcgtgctgggcagggatgtcgatgagatcgtcacccggttcatgaccgatgccaagaccaggtatacgatcgcagaaggacccggaatcttctgcggcgccgtcgtgcgcatcgacgatgaaaccaacagagcatgctctatcgagcggatccagatccgcccgcaaggagaatgatcgtttgaactgtaccgagatactggatgaactacttgatcgtgaccgttgacagcttaatgagcggcttagtcaacggtctttttcgatgctctttttgcttgcgataaatatgtttttcttcatatcatattaaattcagaaaatttatataaaaaaacggatgacactttacgtattttgcagaatttaggatcatcaggaaaaaactgcttgcagcggctgtgaaacgatgtgataataaaaatagaatgatgttacagaagaagcgtcttgttcagtaaaggagggagggcaaagataacaaaacggcttttttgcaacatcactgtcatcaagatctgatcaccttaagggaagaaggtgtatttgtgatgatctgatggatgacgagcatagtattcatgtttagcacgcgtgtcgtgcagaaaggagctcaagatgggaatatataaaaaaatgacgaagaaattgctgggggcattgcttgctttcgcaatgcttgtgtcgattgcgcctcttccggctcaagcaatcgaaggaatcgatggaaagatcgtcgtggtcataggggataaagagtatgatatgaccgaactgatgaaaacgagcgatcaatcgccctattgggatgatccactgatcattgatgatgcaatcggagaaaacccgacgatcaaagtgaccggtacggatatctatcaaatcagcgtgagcatggaaggcgttcttggtgaacgcgtctggaaagccatgatttccgatcacgtcaccgaaagagagatggatctttttgatgcaaatcgatatggcaacaataaatataagattacggtcggcgtagacaacaggatcttgcgtggcagcgtgcagatcaatgattatacattgccatcgatggacgacatgaaagcgaagctggatgaagcgaaggcgatccaggcagacggatatacagaagaaagttatgctgaattgcagaaagtcatcaagagcgtaaacaatacggtcattatttataaaaatagattgtgggacgccaaacagtcgatttttgacaatcagttgagcaaattggaaacagcgattgcaaatttagagcaggcgggcagcggagctgattttaccaatttgcaaaaattatatgaagatactgtgaattataaagcggagggcgtaacaggttttgatgtctttcaggagcagcttgaaaaaacaaagaagctgctggatgatccgactgcgacacaggaagagatcgataaacagttcatccagttggacggccgatatacatttgtcagattgaaagagatgaataaagaaaaccaggatgttctctttgatcatgaatcgatgtatgcgaccagttctttaaaagcacttgcggaaatttatgcagcggtacaggataaatctctttctaaagcgctggtattgaaacaagctgatgtagataaagcaaaggcatggctttccgcatatgaggaggctgtgaaatctctgatacctgcgtcgaaggatgatatggaaatcggaacatatgagaaagcgatggcgagaggagacaatcagggtgaatttgcgcttatctcaagtcagccgttgatggtcgaagggacattatgcaaagagctgacgatccgttttacaaataatgcggttcatccgctctttggtgaaagttatacgaattacgatggtgatgagacggcttttgctaaatatggcggaacaaaagaagcggtgatgaaggtcactgcatatgatgagcagtttaatgccattgaaatgccatggagcggagatgaagacttcaaggcactggaggggaatagttcaaagacgcctggatttgagacgaagataatcgtagatggtgagacaaagtatgtcacgatggagtacacttataattgggataaagcgtattcagcaggttattgggtcattgacaacattccggacatggatgcgccaactgcagaagtgatgacatccaacaatgatgaggcgactgattcgccagtgacagtaacgatcaaagctaacgaagcaattcagccggtagaaggatggactttgagtgatgaccaaacgatattgaccaaagtatttacagaaaatacaacaggtacagtaacgattaccgaccttgccggcaatgtctcacaaatcgcatataaggtcagcggcattgagatcccgagcgaggaagcagctagtgaagcagcgctcgaagcattgcgtgatatggtggaaaaagccattgcgcttggttctgaagaggaagcgttgaacgcagcgatcacagctgcacaggccgtgctggcgaaggacgcgccgaccgcagccgaagttgtaagcgctctgctcgatctgagcgcagcgatgcaggatctgagcggatccagtgatgcggatgctctgcgtgcagatgttcaggcaacgatcgacttcatcaatgaaaacatcctgagcgatatggagggacttcgtccgggcaaggtacaggcgctggtcaatgccgtgaaagctgcacaagatgtcgttgatgacccggatgcgactgcagatgagctgaaggcagcgaacagagcgatgaccaaagcggcacaggagctgtgggagatcgtttccaaggcagaactgaacgccttgatcgaagccgcaaatggttacctcgaaggtgactacacggcggaaagtttggaagcactgcagacagcgcttactgctgcacaggatacagcagccaacgatgatgcaacgactgctgaggtaaccgaagccatcacgaacctggctgacgcgatcgcgaacctggagaagatcacgctggatacgagcgcgctcgaacatgagatcgagatcgtgattgagatgatcgcgaacatcgatgactatgtgccaagcagcgtagaagaattgcaggataagctggatgcagcgaagacagttctgagcaatgcggcaagccaggaagagatcgatgaagcggtgaatagcttacgagaagcacgtc

SEQ ID NO: 3463 - DNA, 32698 bp, Unknown
  16S sequences of unknown bacteria
cgcgagcgtgagaatctcctccggcgcgccgaactcgtggaatctttcgagcacataccggcagatcgggtcgtttattctggtgacgagctttccgtccgagaaggtcccggctccgcccgctccgaactgtatgtttgtcgaggtgtcgagtactccggtgcgcatgaatctgtcgaccgacacctgacgctccttcacgtttgccccgcgctcgataacgatcggtctcatcccgctctcggcgagtatcagcgccgcgaacatccccgcgggtccgaagcccacgatcaccgggcggatatcgcttttcgcgcgcggtatgacaagcggctcacggtgaattatctcgatcccgcggagggctttcaggcgttcgagctttttatcgctgacacgacagctgacgtttaccgaaaagacgaaggtcgggtcctttcccccgcggcgtctcgcgtcgatcgagcggcggtgtatgtccgcgcggatgagctcagaggatgaaaggctcaggcgtttcgccgcctcggcgcaggcttcctccggggttgtccctaccggcagggatatgtcttttacgaggatttcggttggttcgtttggcatgggttctctctttcacattttgtaataacacaaacggggggcgggcgacgggtggtcgcccctacaagcgtggtacacagacccgaagatggtacgtatgtccaaagtcggtacgtgtatccgaaggtggtatgtatgtccaaaggtggtactcgtgtccgttgtgggctcttcatacaaacaaataccgccgcacgaatgattgagacaatccccgtgggggcgggcgaccaatggtcgcccctacaaaggtagtgcgttgttccgttaaacgaagaggacctttacacatacaaataccgccgcacgaatggttgaggacaagaccccgtaggggcgaccattggtcgcccgctatacaagggtatcactcatacttcattggcggcgttctttattttatcgtgacattcatcgagtaatccccgatctcatacaccttccccgaaagcgtcgactgcacgttcaccgtgaccggaaccgaaactgtccccgaggtcttgttcaggtagccgaggtcgagcgtcagagacacattcctcgaggagagcatatcgagcattgtcttcgttcctctgaaggtgacggtcagggagttgcgctcgagcgtgtactcgagcccgttcgggttcacgacgtttatgtcggtgacgttcagcttcttcgtggtcgtgccgatctgggttatcgtgacggtcgcggttgtcgtgccgctgaggttttctacgccgtccgggagcattatcgccatggtcttcgtctcgtcgccggtgatcttcttctcgtcgatctggccgagggagacagagtccatcgagcttatgacatccggatcgccgcgcacctgaatcgacgccgggcttatcgttatccgcgaattcgtcgagtcgtagtacccgtacttcgtgtcgaccttcaggtcaaaatcacggtagatatagacagggaagcgcacggtcacctctgaggtctggagcctcacatacgggtcgtttatctcgttcccgttcgcgtcgacgagagtcagcttgcctgtcgaaatgagcgtcttggacacccgcccgaggtcaaaggaagcctcggcgtggtcaatcgtccggagcacctcctcgggtcccgaaacattcactgtctcgatcgaaggctcgggcgtgcccatcgtgaagtccgcctcgatcacctgagaggtcacgatctttaccggaacgctgattgttgtgcgtttgtcgacatagacggtcatatagttcgcggacagtgacccggcggtgattccgttcggcagggatgtgcgtatcgggagcgtgtactcgcccgcgccgtccacggttttcatgtcaatgtaggcttttacgtcatcgacggtcaggcggtttatatcggctctcggtcccttgacggtcacgtcaactgtcaggtcgtagccggagattatcgtcagtccgagggtgtcctcaatcctgtcgcggccgcgtatgtcgaccgatatgccggaaaatactttctcgtcggttgtagtatcagtcataacgacgtagaaccacaggattatagccgcgagtacacagagaatcttcgcgatgagcttctcgttccggctttccttcacctgatagtcgcctttcgaggcgtcggcggtcgggaggttcttttcgttatcgctcatcgtccttcgctcccttctgttttctcgtgaagcgtaagccgcgcttcttgttctcgctgtcggtcggtttctcgttcaggagaagtcttgtcagctcggctttcagtgagttgtagctgaaattgcgcttaagctcgccctcgaccgcgatcgagatcgttccgttctcctcagacacgacaacaatcacggcgtcgctgttctcgctcatgccgatagccgcgcggtgacgtgtgccgaggtccttgattatgtcgttgttggtggataatgggagaaagcatcccgccgcgtatatccggtcgtcgcggatgatcatggccccgtcgtggagcggcgcgttcttgaagaatatgttgcggatgaggaacgccgtggtgtccgcgttgacgattgttccggtcttgatgatgtccccgagcttagttgttctctcgatgacgatgagagcgccggtcttgtcgagcgacatatcgcacgcggcttcggtgacctcgtttatcatggcgatggtcgacgcgtcgttaccggacttctcgctgattgacctcagccccctgagcggctccgcgccgaccttttccagggcggacctgagctcgggctggaagacgacgatgaccgcgaccattccgacctggaagagattctgcattatgaactgcatcgcccgcatatcaagtatgtcggacagaagcagtatgagaaggagtatcaggagcccggcggcgagcttcccggcgcgtctctcgcgtatgaacctgtagacatagtagaacattacggcgacgaggattatatcgattatatccgtaacccggatgtttttgagtgtgttccagacggctgagagcgtctgtgtgatgaattccataagtgaaccgtgccttccttgatggattggcaattgcctcatattctattgtaccacaaatccgtgaattttgcaaaccctttcacgaaaatttccataataaatatcaggcgggcgtttatgtaatatatgtacaatacgccgatgaaaatagtttgcggattcttcaagaatggctcttttattttctgtcggtttgtggtataatataagataacctgaaaaacgggacggaggtcaaaaatgccagaactgaaagatttagagaaaattatcgtcgtgaccggacatttcggcgccgggaagacaaattttgcggtgaatctcgcaaaggaagcgaaaaagaacggacgccccgtgacgctgatcgacctcgatatagtcaacccctacttccgcgccgcggacgacaagggcgagctcgaggagcttggcatcaggtgcataatcccggatttcgcgaacacgaacgtcgatatcccaaccctcccgccggagatctattcggcgctcgaggcgtacgagaacccggactatgacggcgtcacaatctttgacgtcggcggcgacaacggcgcggcggctctcgggatgtacgagaagtggttcagggaatacccgtacagtatgctttactgctgtagtctgtaccgccccctgaccgaggagccggaggacgccctcgggtgtatgcgcgagatcgagtattactcgagacttaagacgcatggcatcgtcaatacctcgaacctcggtgaggagacgacggctgagctcatccgcgagtcgattccgtgggcggagaggatatccgaattatccgggctgccggtcgtcgcgactgtcgcggacaagcggttcgaggcggagctctcggacattccgggtctcttcacgatagagaacgccacgaaagcgctttactgacgtgacatcacgtttcacaacgttctatatatataaaagttgacaggaggaaacaaaaggtgaacaaggtaacattcagggaagatctctgcaagggctgcgggctctgcgtccgcgtatgtccgaagaagataatctcgctcgatcacggcaagctcaacaagaagggctaccatccggcacacatcaccgacgccgagaagtgcatagcctgcgcgatgtgcgcgacaatgtgccccgacgtcgtcatcacggtcgagaagatataacgaaaggaactttgaaatggcaaagaaagtacttatgaagggcaacgaagccatcgccgaggcggctataaagagcggctgtctgcatttcttcggatacccgataacccctcagaccgagatttccgagtatatggcgaagcgtatgccgaaggtcggcgggctctgccttcaggctgaatccgaggtctccgctataaacatgatcatgggcgcggcggcggctggctcaaggtgcctgacctcgtcctcttcccccggaatctcgcttaagagcgagggaatctcgtacatagtcggctgcgatctcccgtgcgtcatcgtaaacgttcagcgcggcggaccgggtctcggcggcattcagccgtcccagcaggactactatcaggcgacaaaggcgaacggtcacggcgacgagcagattatcgtcctcgccccggcgtcggttcaggagatggcgcagctcacgagcgaggcgttcgatctcgcggatatctacagaatgcccgcgatgattttagccgacggcgcgctcggtcagatgatggagccggtcgacttcgagctctcgtcaaagcgcgagattcccgagaagacatgggcgacgaacggaaccttcggcaagagaaagaagaatataataaactccctctacatgaacccgaacgagcttgagcagtcgataatcgaccgttacaagcgctatgacgaggtcgccgagaaggagacaaagtacgaggaatacaagtgcgacgacgcggatatagtccttgtcgcttacggcataacttcccgtatctgcaagaccgcgatcgcggcagcgagagcgaagggcataaaggtcggacttctgcgcccgataacgctctggccgtacccgaagaagccgcttcgcgccctcgccgacacggcaaagcatttcctcgtggttgagctgaacatggggcagatggtcgacgacgtgaaggtgtccaccgagtgcaagcgcccggtttccttctacggcagaaccggcggcgttatcccgaccccggcggaagtgctcgcggagattgaaaagatcgcaggaggtctgaactgatgatagtatttgataaaccgaaatccctgtcccccgtcccgttccactactgcccgggatgtactcacggaatcgttcacagactggtcgccgaggctcttgacgagcttgatatctgcggcaggacggtcggtatcgcgccggtcggatgctcggtgttcgcgtataactactttgagtgcgatatgatcgaggcggcgcacggacgcgctccggctgtcgctacgggcgttaagagaactcacccggacaatatcgtcttcacctatcagggcgacggcgacctcgcggctatcggtacggctgagaccgtccatgtcggcgcgcgcggcgagaacatcacgataatcttcatcaacaactgcatttacggcatgaccggcggtcagatggctccgacgactcttccgggtcaggtcacgacgacctctccgtacggacgcgacagacgcattcagggctcgccgattcatgtctgcgagatgctctccacccttgacggtgtggcttacgccgagcgtgtcgcggtcaacaccgtcccgcacataaaggcggctaagaaggctatagtaaaggcgttccagaaccagatcgacaggaagggtctctcgattgtcgaggttctttccacctgcccgacgaactggggcatgacgccggaaaaggctcttgactgggtcgagagcgacatgataccgttctatccgctcggcgtctacaaggacaccgacgtgaagaagctgaaccccacctcgacaaaggaggagaattgacatgacgatgaacatattactcgcgggcttcggcggacagggaatcctgttcgcgggcaaggctctggcgaagatggcgatggacgctgagcttcaggtctcgtggctcccgtcctatggtccggagatgcgcggcggcgcggcgaactgctcggtcatcatatccgacgaggagatcggttccccggtcgtcgtgacgcctgacctgctgatcgcgatgaacatcccgtcgtacgacaagtttgagccgaacgtgaccgcgggcggcagggtcatctatgactccacgctgattccggctccggcgatgagggacggaatcgagcacgacgctatcccggcgacgggtctcgcggcggagaacgggcttgagggcatggctaacgtcatcatcctcgggtatctcctgaagctcaccggtcttttcgagtatgacgcgttcctcgagcacatgatagccggcataccggcaagcaaggctgcccttgtcgagaagaacaagaaggcgcttgagctcggatacaattacgcaaagtaaacacatgggtgtcggtcggcggataaccggctggcactctttttgatatgaaaggaaatccacatgaaagtaacaatgcttgaaaacgaggtctggtacggtctcgcggtctcggaggggctgaagatgccggtcgggaaggacgacaatttctcgttcgcgatgcagccggtcaacaccaacaatcagtactcacctctgcttctgtcgaacaaaggacgctatatctggggcgaggacgctttcgacacgaagatatccgacggcgtcatcgaggtcacgtcgaagctcagacctgcggagctgtacgagggctataccgacctacgcggagcgttcagggcggcggcggaggctcatttcccggcagacggaaagctcccgcccgaggagttcttctcgaagccgcagtacaacacctggatcgagcttatctacaaccagaaccagaaggacattaccgagtactgccgccacatagtcgagaacgatatgccgaagggtgtcatcatgatcgacgacctctggacgccgtactatggcagctgggagttcgaccgtgttaagttcccggatccgaaggggatgatcgatcttctccacgagtggggcttcagggtgatgctgtggatatgcccgtttgtcagcccggactcgttcgagttcagatacctccgcgataagggcggacttgtcaggaatccggacgggaaggtcagaattgtcgggtggtggaacggcttctccggagttctcgatctgtcgaacccggtcgatatcgagtggttcaggtcgagatgcagccatctgacagaggattacggcgtggacggcttcaagttcgacgccggcgacgcgtgtttctaccgtccggacgacaagactgccggaaatgtcacgccgaacgagcagtgccgcctgtgggctgatatcggtctcggctacccctacaacgaataccgcgcctgctaccgcaacgccgggcgtcctctcgttcagcgtcttcaggacaagagccacagctggaccgggcacggaatcaacgagcttatcccgaatatgctggcacagggcattctcggctattcctacggctgcccggacatggtcggcggtggctcgttctctgacttccttccaggctcgacgaaattcgatccggagctgttcgtgagatactgcgcgacggcggctctgatgccgatgatacagttctcggcggctccgtggagggtgcttgacgaggagcattacgcgatgatactcgggcttatgaaactgcgtgaggagttcctgccgaccatccttgagctggtgaagaactccgcgaagaccggtgaacccgctgtcaggtacatggagtatgtcttcccgggtcagggctttgagaaggtcatcgaccagttctgccttggcgatgatataatagttgcgccggttctcacaaagggcgccgtgacgcgcgatatcgctcttccggacggaaagtggaaggatcaccgcaccggaaagatatacgacggcggaaagacaatcacggtcgacgcgcctgtagacagcctgccgataatggagagggtgagataatgtttgacgagcttgacccgaaagagatgatatccgagctgtgcgaagcctttccgggcgtgcagacggagatacattatcgagacgacgacgagtacgattatctggtggacgacgaggtctgcgtggtgttcataaacccacgcggagagaatgtgtcagtcgatctgagaggtgagttcacgcttacctgcggcggagaagaggatgtgttcttcccggacgaggaaggctttgaggagctttgcgaggagatacgcgggatactcggggaataaaacagaacagaaaagggggagcggctgctcccctgtttttttgttatccttttgcttttacgtacatcatcagcccggtgaacacctctgtcagcatctcgctgacctgctcatcgctgacctcggaagcaccggtcgcgcacatgacgccgattccgtaggtgtatatccacatatgcccgaagatttttctcgcggtcttctcgtcgacgttgtggtcgtcgcatatggcttttacgcacagattgacgtcaaccccgagctcgcggaacagctcgtcggtcccgatggcgttctcggtcacccgcatgaagagcagctgaaagagcttcggctcccgcttcgagaacaggacggtgcgcatacctatccgcttgaacatgggcatctcctcgcccgtgtcctcggtgacgaaggcgttgaagcgctttatcgcgagaaggcgtgtctgctctatgacttcatccatgctgtgatagagggtgaatatcggtcttgacgagccgccgagtcttgccccgagattcctcgcggtcagggcggagagtcccttttcggacacgatatcaagcgcggcggtgatcatctggtcttttgtgaattttggtttcggcggcatagcgtcttcctccggttatgttgtataacatttgattcagtataccatatattccgccatttgtcaagtggatgttatgaatgtttacaagtgctgtaaagttttattgcggatgacacgaaaatatggacagattgaaaaagggggcgccagatggacgtccccacagcatatcaattagtctttgtccgcttttaacaccgcgccgagcatgacagtcgcgccctccgtgcagtgctcagggctggaatactccggctcgcagtgggacagaccgtccttcgactggacgaaaatcatcgtggtcgggagcatatacgacgcgaactgagcgtcgtgaccggctccggaatggatgcgcatatggctgacgcccgcctccgtggctgattcctcgacatagccgacgagcttcttgtcccagtagacggtgtcgcggttccacgccttgaccacctcgcagcggcatcccgcccactgtctgtcggcaaggctcatcacgacctcgagaaccttcgcgagcaaatccgggtcctcgtgtctcgcgtcgacagagaagtcgaagtagtccggcacgcaggtgtgaacgcacggatggcatacaacctcgccggttgtgtagacgagatcctttatcccgagcttgtcgatctcgtcgtgcatatagcagagagcctgcgcggcggcatagaacgcgtcgcgccgcttcggcattgggaaagttccggcgtgaaccgtctgaccgtagaacttcacgcggtagttgaacatcccgagcacacagtcgacgacgcctatgtcgcatccggcgtcctcgagtatcggtccctgctcgatgtgcgtctcgaacatatactgatacctgtccggcgagagacggtacttcttatctcccttgaagccggacttatcgagcgcctcaccgaaggtcttcgtcgggtcgaggatggactttgagttcatcatgtcctcaaacctgaacttcgcgccgatatcctccgggagatagtcgttgcagacgataccggagcacatcatcgccgggggatagagcgagccttcctcgttcgtccagatcatggcggtcagcggatgcttgtgcggtatctttttctcggctacggtctcgagcacttccatcgcggacatgacgccgaggattccgtcgtagttgccgccgtttttgacagaatcgacgtgtgagcccaagacgatgcgtttcgcgtccgggtcactgccctcgagggtcgcgtacatatcgccgaggtcgtcggtctcgatcttcgcgccgatcttctccatgcgcttcttaaattcgttccgtgccattattgcggcttccgagagcgagtagcgggtgattccgccgtgtccggcgtcgccgaacgccgagaaggtctttatcttgtccttcattctttcaagactgcaagtgtacatacgatcatttcctttcgtttattttaagttcacgctgtgcggggatcctacagcatttttcgagaagcgttttcatttcctccggggtgacgtagaagctgaagttcttcttccccggctcgtcgtcgagcgccatgaggaacctgtcgtcccagtcgttcatgcagaacaccgcgcactccgggtcgacgccctccccgcggcagagatcgtcgagagcctttgtgcgtctgacatatccgagcagcgcgccgtcccacgggagccggaactcaagtctgtccatgaacggtgccttcagtcctatctccgccttcatctcgctcttcgcctttgccatgtcgaacgattcgaccgttctgaagtggtcgtagggcagtatcgacgataaagcgatatattgtctttccttcttgtcttccggcatctgaccgactcctttcagatgagtgattttctgtatatgtcgaggagcgcgctgacgtccggctccgcgacgcagttctttatgttcttcgcggtgacggcgatcttcgagtaatcctcaagctcttttccggtgaatttctctttctcaccgagaagcgcgccgatcccggcgccgagctcgtcaaggctctccgcgccgattccgtgaagcagctccgacaccttttcgggcagagcgttttcggtgtatctcaggtattcggtgagcagaagcccgttcacccttccgtggtcgatgtggcggaaataggtcagcgagtagcccatcgcgtgtacggcggtcgtggcggtctgcgcgattacgattccgccgagaagggctccgtactgcaaactttcaagctccttcttcccggtctcgccggatatcagggcggggaagcatttataaatctccctcgcgccgtcaagagccagaagcgacgataacctgtcagcgctcaccgcgagataactctcgatacagtgcgacagggcgtcgagcgccgtgttgactgtcgtcctgtatggaacagccgccagatacctgctgtcgagaagcgcgagatccgggaacatctccggggaagcgatggttttctttgtcttcgccgcgtcgtcggtcagtatcgagtactgcgtgacctccgagccggtgcccgccgtcgtcgggacgaacaccgtcgggaggatatctttcgtgtagtttccggagaatagcctgtcgcgcgggatatcctgcgccgcgagtagggcgatcgccttcgcggtgtccatcggggagccgccgcctatcgctatgatgaggtcggctccggcgcttttcgcagcgtcagcgccatcgtatacgctgtctatcgtcgggttcgggacggctctgtcgaatatctcataacccacgccggcgctgtcgagggcttttgtcatgtcgtcgagcgcgccacataccttcgcggagtgctttccggtgacgatgagcgccttttttccgagcgacgctatcttcgcagcgtttcctgtgacacagccgttgcccatgatgatctctgtcggaagaaagaatctcgttttcatatcatcttatcgacctccgataatacctcgtcgagcttcacgaactcctcgtcgagctgttcgggcgtgatgatcagcggcggggaaacgaagatcatgttctcgtgcgagtaggtcatgaagcccttcgcggcaagctttccgattatcttcttcatcgttccgtccgggtcctttccgtaggggacgagcggttccttcgtctcacggtcctttacgagctctatcgacgagaacagaccgatgtatctgacgtcgccgatcgcgatgtgctttgccttcagcccttcgagcagttcgccgagatgcttgccgctcttctgaacgttgtcgaggatgtttgcttccttgtaatattcaaggcacgccacaccggcggcgcaggcgagcgggtgtccgctgtaggtcagaccgcagagaagcgtgtgatcgtcgaaatactccgcgatcttcttcgacacgacgcagcctccgagctgtacgtagccgcaggtgacgcccttggcgaagctgacgatatccggtttcacgccgaagttctcgaacgcgaacatctttccggtgcgcccgaagcccgccatgacctcgtcacagatcatcatgatgccgaactcgtcgcagattctgcgcacgccggcgagatagcccttcggcgggattatgacgccgttcgaaccggtgatggtctccatgacgatggcggcgacgctgtccggtccctcgtagatcacctgctcacggagctttgagacgtagtaatcgctcgcctcttcctcactcgcgaactttatcttctcgcggtagatgtacgggtcgaagaactttacgaatcccggaatgcccggctcgagagggtagcgtctcggctcgccggtgaggttgcccgcgccgaacgtggagccgtgatagctgcggtagcgggagaagatcttgttgcgtccggtgtacatacgcgcgatcttgatggcgttctcgttggcgtccgcgccggcgttcgcgaagaagaccttgcccatgttgtcgggcatcaggtcgagaatcatgcgtgccagctttcctctcggctcgctcgcgtaggacggggctacgtagcatattttctccgcctgagcctttatcgcgtcgattatcttgcggttgccgaaaccgacgttcaggttgacgagctgggacgacatatctgtgtatctattcccgtcgtagtcccacatatagatgccgtcagccttttctatcggtatcgggtgaagccctttctgcttcgaccacgactgcaatacgttctctgtctgtaatctgcttatttcttcgcctgtcatttttcattaccaaagctttcgccgcagcgaaagcatcctttctgcccattttggggctggttttgcggagcaaaatcgttgtcggaagacaacgaaagtcacaaaatgcttggattgaaagatttatctttcaatccttactcctttcatatcgtcgagcgcgatcgctaccgacagggaggttatccccgggtagtcgaacccgattccgaaatgttcctttatgaaccttatcttgttgtttaccgtgtttctgtgtataccgagcatatccgccgcgtcctgtacactgccgccgcatctcatgtacgctttgagtgtcttcagaagatcggtgtgctccgcggcgtcatggctctttatctgaccgaggattccggagacatattcgtcggcttccctcgagtcctgaactgaccgcaggagcgtgaacagcccgacgccgttgtagaatacagttcctgttctcgtcgccgccgctgtccttgacgccgacaccgcctgcctgtacgccgtcgggagagagtcgagagaagtgaacatatccgatatcccgacgaacccgccgtccgacagggttccgagcgtcatgtggatgttttccgccatctcgccgcacttcgactgtgagccggtgcagacgatgaaggacaccgtgtccgcgtacctgaacatacagctgcgggtcccgggcactgagggaggctcgatcgcgctctgcgcgtgcgtctgacttgttccgggtctgaagcacatgacgaagtacttcgtcatcgcgggatagccgtgctgttcgagatatctcgccgcgccgtcgctgacactgccgttcatcaggatgctcttgaacgccttgacgacggtgagctccttcgcctcctgacgtgtcaggaagtgacagcagtcgtacatgagagaggcaatatctgtccccgcgggcatcgtgaagagcggtatcccggcgctcccgaccgtctcaggcggaaagctcccgccgacgagtatcagtcccgccgccatcgcgtctctcagaccggtcagcatctttccgagcgcttccgggtcgtccttcatcatgagcccggtcgtgacgacaagcgcgcccgctccgagagtacctgccgccgccgggtcctcgagctggtagatccatctcaccgggtatccgttcggggaggagactgacgttacgctgtgtttctcctttatgaaggaaatgagctcgatgaccgacgccgacatatttgttacctcctcagtgctttatttttcttactcttttcgagaccgatatcgctcccgccggacatatgagacggcagagctgacatccgacgcacttcgcgccgcgcagcttcggttttctgtcctcaccgaaagctatcgcctgatgcccgccgtcgtcacaggagaccgcgcatctgccgcacccgacgcactttgtcatatcgaacgccgggaactcgatcgtctcccggtcgatctcgtccgtcccgatgaactccggcagagccgcgccgcacagcgtcttcacgtcgccgtatccgctcgctgtcaggtatctcgagagcccatcggtcaggtcgtcgatgattctgtagccgtactgcatgacagccgtcgtgacctgcaggttcatacatcccatcgcgatgaagtccaccgcgtcgcgccacgtctcgatgccgcccatgccgcttatcggaacattgtatatctccgggcagactgccatgtcgtggatgaacctgagcgctatcggcttcacagcctttcctgaatagcccgagaccgacgactttccggagaccgacaggagcggggacttcaacatggcgttccagccgcgtatcgactttatcgtgtttatcgccgcgagtccgtccgctcccgcctttacggcggctttggcgggtatctcaatgtgcgtcaggttcggggtcatcttcgccagcaccggaatcgacgcgccgcgcttcacggcttttatatacttttcgacaagcgcggggtctgtgccgacgtccgcgccgagaccgtgcgccgacatatgcggacaggagaagttgcactcgatgatgtccgcgccgcactcctcagagcgtttcgcaagatatgtccattcgtcctcgtcgcgacccattatcgacgcgactatgacttttgtcgggaagttccgcttgagttttctcagtatctcaaagttctcgtccggggacttgtcggatatctgctcgatgttgccgaagcctatgaatggagtcgcttccttgcctatcgcgtcgaacctcggggacgcctcgtccgggatgaagtttccgattgtcttgtagacgatgcctgcccagccctccgagagagccctcgcgcacatctcatagccgctcgccacgaccgacgacgacaggaagaacggattctcacacttcacaccgagaaactccgtctcaagagacgccgaggctttaaccggttccttcgcgctcctcacgagtgccgatatcccggatattctgaccggtctgtcaagagccacgcacgcgtcctcgcagggggaagcgcagcccgcgcacctgccgttcgcgaagcggtacgctcccgcggcgttgtcgaacctcacagcgcgtatcatcctcgccgggtcagctccttcgggacaagccgccgtgcatggcgcgtcgcggcagagaagacagcgctcagacagctccgggagtatctccgcgcggtatttcttcttttcttcaatataatccttcgtgtatgtcatgtgatcatcctctttttgcctgtgcttttatccttccttcggcacgggctttctcgcttcgcgtctgacgaacctgccccagcccttctcaccgacgaaatcgccgttgtcatagacgagtctgcctctcgagtaggtcttaaccgggtagccctgaagctctgtgccctcccagatcgtgtggtcgcagtcggagtgcatattcgactgatgtatcgtgaatttcttcgccgggtcgtatatcacgatgtccgcgtcctttccgatattcaggaagccctttccggtacagccgaatatcttcgcgggattctccgcgcacatcttcacgacctgctcgaacttcacctttccggtgttcgccgcggacagcatatacgggtacatattctcgatcgccgcgcagccgttcggtatcttcgtgaaatcgttcagtccccagtccttctccgactgctggaacgggcagtggtcggtcgctatcgtgtcaatatcgccgcgtctgatagcgtcccagagagcgtcctggctctccttgcccttgataggcggggagcagacgaaatttcgtccgtcaggtctcttgtatacatcggaggtgaagttcagatagtgcgggcaggtctcggcgtatatctcgtatccttcgtccttcgccttcgtcaccgcgtcgacgccctccttgttcgcgagatgcacgatgtagagggaagcgccgagcgactttgcccactcgatcgcgcgcttgtcagcctcagcctcgacgaactccggacgcgacaggtagtgataccacgcgcttgtcttgccctcagagagaaacttcttcgtcaggtatttgaccatctcgttgttctccgcgtgtacgcttatctgcgcgccgatctccttcgccttttcgagcacctgataaaacacgccgtcggtcacgccgaaatcgtagaccatgaacaccttgaaggagggaaccccgtagtcgagcgcgtccttcatcgtgtcgataagcccgccgtgaacatcctttatcgcgacatggaacgcgtaatcgaccgccgcctccggagccgccagagcgtcccggcgctttatcgaatcaagcatcgactcgtcaaaatcctgaagaacgaaatcgaacaccgtggtcgttccgccgcacgccgcggctctcgtcccggcgaaatatccgtcagcagatatcgttccgccgaacggcatcgcgaggtgggtgtgcgcgtcgatcgctcccgggagcaccaatttgtccttcgcgtcgacgacttccgcgccggctgtcggctcgatgctttccgctgtttcggttatctttccgttcgtcacggcgatatccgccctgtacattccgccggaggataccagcgttccgttctttatgagaagatccatatattaccatcctttcgtgaggcttcaggcgggcggcaggcgttctgcccgccgccataagtttacttgtttatcttgtagacaagatcaagtccggatctctgatagatctgcgctacctcgacaagctccatgccgccggcgttcgcggtgatcaggttcgatacccatgtgacaccgaaatcgacagtgccgttcgagacagctgtggtctcgccgatgtctccgccgccggggacgatttcgacctcaagtccgacgtccttatagtagcccttcgccgtcgcgacgtagtagcccatgaactgtgcctgcgggagccacttcagctgtatcttcacggaagacttctcgggagttccgatggtgtccgcgcccttttcggtgatctccttcacgaacgagtcgtcatacacgtcggaaagcgtcatgtccgccagtctctgcttcgcggcgctgtcctcgagcgggatatactgcttcgcgaggtcgagggtctgctgcattgccgactcgactatcgcgccgtaatcggtcacgtgattacccgcggtgtcggtcgtcacgagcttcgcgacctcggacgccatgtacttctggtggtcggcggagaccgaggagcctgcctcatagactatctgagcagcctcgtcagggttctcgcaggcgtactgccagcccttcagggacgcgtagaggaacgcttttacggtgttcgggttctccgacgcgaatttctttgtacagaagatattatcctcgagcatcgcgacgccctcgtcgttcatgtctatcgtcttcacgctgtcgccgtatccgtagccgccctcatagctgttgacgacgagcccgagctcgttgtaggtcattgccgaggcgagcagtatctcgtcactgtcaaaaccgtccatgtcgaagttctgcgagagatatgtcgtcgggaagccgtatttcgcgaggagcgcctgtatctcgtactcgttgccgagtccccagttgccgaccttgcccttcgacgcggcgtcctttatgacgtcggacgcggacatatccttgtcgtagtactttccggtatctgtcgatacctgacttccggaaccgctgccggtattgtttcccgagccctcagcggacgagcaggaagcggacgccgcgacgagaagcgccgccagcgcgattgaaatcattcggatcgatcttttcatgactttttatctccttttttggaattatatatcaaccggatattgccgggtgatgacttatttcgctctctttccgagaacccttttctgtatcagcatcagcagcatatacagcccgatgccgagcgcgcaggcgaacgttatataagcccacgccgaagcgtactgcgcgttcagaatgttcgagcgtatcatccgcccgagccccggaaagcttccgcttccctcaaccgtgtcgatgaaatactcgctgacaagcgccgatatgacgctgaccggcaggttgaccttcatcgccgtgaatatgaacggcagactgttcggaagcctgagttttatgaaaacagtcctcctgtccgcggcgtatgtcgccatgaggtcctctccgaacggctgaacctcggtcagcccgcggtacgcgttgtagctcattcccgcgacgcacatcactgtcacgacgaggagttttgataccatgcccctcacctgtatgtcgcttatccacaccttgacgaggttgttgaacacgggagccagcgccactatcggcaccgcactgaagcaggacacgacggcgagcccgcccttgccccatctcccggactgagccgctatcagggcgactatgaacccgagcagcgatccgagcgccagacccgctatcaccggtatcagcgtcataaggaggttcccggcgagctttgtcaggttctcgccgattatctgccctatgtgcgacggggtcgggagtatccactcctcggtgtgaaccatcctgtgcagtatctgcgtctgccacaggacgaatatcaccgcgccgaacagcaccgggtatatgaccgacgtcacagtgttgaaggtcgacggggcttccttttcccattttctggagcttttctttatcttcaccggtatcacttgcctttctttccggctctcatccgtgagttcagcagggtttccatgagtcccatgagcttcgtcacgagtattccgagcgccgcgcttatgaacactatctcccagaacgcgtatatcgacgtgttgtgcttcagcgactgggacaggagacatccgagcccgacgccgccttgcagcgtgtcgaccagtatcgacgccgttatcgccatcggagccgccgttttcagccccgtgaagaagtacggcaggcaggtcgggagcatcactttccggtaaatcgtgaaggtgtccgccgcgtatgagaacatcagctcctgcttctcgcggtcgaccgatttgaatcccgccagcatattcgccgccaccggatagaacgtgagtatcgccgctatgacgatccggctctttccgatgtcgcctgtcagcgacagcactatcggcgccatgccgagtatcggtatcatctggatgatcatgaggtacgggaacgcgatcttgccgaccgccccagaaaggctcatcaacagcgctaatatcgcgccgagcgccattccgataaggaagccctctccggctctcgagagagtcgccgccgcgttggtcatcacaagaccgaatatcgtctgatccgcgcccgcgctctgtccgaaagacgacgctatctgccacaggtgcgggagtatgtactccgggtgcctcggcgagaccctcgcaatatagaacgccccgatctcccagaccgccgccattccgataatccatacaagaagcacgaaaccgtccgatctgagtaatctctttattattgatggcttgtctgacgaacggctttcggatcttccgaccggtatcctttttttctcaatatccatatccatctaaatcccctcgaaactgtttctgaccttcgcgacgagatccgtcagctcctgcgaactccgcatctctggtgtccttggtctgtcaagcgttatatcaaccaccgccgagagccttcccgggtgcggcgacaggacgcagacgcggtctgacagatacaccgactcggatatgttgtgcgtgacgaagattatcgtcttgccggtcttgcgccagatgcggagcagatcctcatgcagcttctcgcgcgtgaactcgtcgagcgccgagaacggctcgtccatcagcaggatatccgggttcagcgccagcgccctcgcgattccgaccctctgctgcattccgccgctcagctcggacggatgatgatccgcgaagctcgagagtccgactaggtcgagcatcttcatcgctctctcctcacgctccgcttttggtatctttattatctcgagcgggagctcgatgttcttcatcaccgtgcgccactcgtagagcaccgggctctggaataccatgccgtactttctgtggagtctcgcttcctgcggcgtcgtgccgtcgactgtcacctttccctcgctggggtcgatcaggtcggctatcatacggagaagagtcgttttgccgcagcctgaagggccgaggagcgagatgaactctccgcgcgctatcccgaggctcacgtcggacagcgcagtcacctgctttttgttgttcgtgaagtgcttgctcacgtgatctatcgttattatcggtgtttccaaagtcttgtcctccttctgtgacgatggtcaggctgatcttgatatgacaaaggcgcggaacaacaggatatctgaaaccccattgtttcgcgccatttgaattattctgttatgcttcctgcaaatttctctgtcgggtgcgtgtgatcaacttgatgtatatattatagcataacaccgccccgatgtcaatggtaattcttcaaagtccggattcttctgtatttttaacaaaatccggcacatcgcgttatgcggcgctttgatacagtgtcataatgccatgcctttttcagcacatcaacattgtactccgcacacatattttgcaggatcagaatgtttatcttgcaaatacatagacgttgacacgcccgccgtaggtgtagtccccgctcttccactcgaggaacaggtactcgcgcccattgacgttccgtatctcatactccgatgcggtcaggaccttgtcgtcgagaaccatgccctttgtccatctgagtgttctctcgccggtcttcatgcgtctgacgcaggtgccgtcggggttgaagctgatctccttcacgtacagccggtcggcgcttctccgcgggtgctcagggtcaaactccatgttcttcccggataggaaatcgatagcgtgccactttccgtgcacatccgggtcgtcggtgaacgggtagtcgaccttgtcgcggatgccgatgtcgcgctcgtgacgcgccacgctgtcggtcttttcgtacacgaacacctccgtcccggcgccgtagagctttctgtcacgcatcatgagtctcgggcaggtcaggaagagaagcgttctgccgttcacctcgcgcgtctcgtaggtgcagagaacgtcgccgccaagctcgacaacgtgcaggtagagctttccttttgtccagccggagactatccagtagccctcgccgccggtcaggaaaaagagttctgacaggctttcgggcttcccgtcgcactgtgtctcgccgtccctgtagtcgccgattgtgggtacgaggtctatgaagctccatctgccgatgacgcccgggtcgttcacgaaagcttccttttgtgccagttctatcttttcgctgaggtttgtcatatcgctgtctcctttcagtatgcccccgataagggcttcgagccgctcttcgcggcgtttcagatttccgatgatttctcgtgtctcggtgagcttacgtttcgcgaggttcaggaggtcgtctctctcgcgtatctcgtcgagtgtgaagcccatctccttcatcgcgatcaccttgcggcagtcctcgaggttctcgtccgagtagtagcggtatccggtgaagcggtcggtcaggtccggaacgagtactctcaggtcgctccagtaacgcagtgtcttcaccggtactccggtcagcgcggataattcgcctatacgatacataatgtaccttcctttctacagttcggttcccgggtttcctttgctgtgataccattatatcattacaggtggggggagagtcaaggggtttacgaaaaatacttgaaattttttccgggatgtgatataatataagaaaaaagaattcagaggtaaccacacatgccaaacaaactcgaatacaacatagccgtcgccgacatggctccgggcgacaatatcgagggattctacatcctgaaggacgcgtccatccgcacaacgtcgaacgggaaggcgttcctcgccggagcgctgtctgactccaccggcgttattgatctcaaggtctgggactacacgggtccgctcggaactgacaagaatgatatcggaaaggtcatcaaggtccgcggagaggtcggagaattcaagggctcccgtcagttctccgccgcgctcatccgtctcgccgacgcgaacgaccagtacaatatctccgaactcgtcccgaccgcgccgatctccgccagcgagaccttcgctaaggtcaaggagatgataaactcggttcaggacgaggattacagaaagatcgctctcgatttcctctcgcgccacaccgacagcttccggaatctccctgcggcgaagtcgttccatcacgccttcctgcacggtctgctgatgcacacctcgaatatgatgaagctcgccgatttcctcgccgggctgtactccgaggtcatcaaccgcgacctgctgatcaccggcgcgttcctgcacgacatggcgaaggaccgcgagtttgtcacgtccccgctcggacttgtcaccgattactcggcgaaggggcagcttctcggtcacctcgtgatgggggcgcaggaggttgccgtcaccgccgaaaggctcggagtgccggaagagaagtcgatccttctccagcacctgatactctctcaccacggagaacccgagcacggagccgccgtcgtcccatgtgtcgccgaggcagagcttctcgcgtacatagacggcatcgacagccgcatggagatctacgccgaacagatggcggagatggagccgggagacataagccagagaatccccgcgctcgagaagagaatatacaaacatgagtaaagcaaaggacccgccgcatggcaggtcctgttttgttgaggatacactgaataaatcgggctttcgcagagaaaatcttgaatttatgggctttttctgcgaaaacaaccttgaatcagtgtttcctcagaatccctcgaactcgtcgaatccgactttctttatgtagcccatgtattcgtcatagtcgatatcgatgatgtttgtcatgtagtggttgacgcccgtgacagtcttgtcgccgtcagtgtagctccactcgatgaggtagaagtgcttctcgccgtcgatcatcggcttcgtccagataagcgtcgattcgttggctttcgcgaacgccgttgactctacgagcagattgtcgtccgtgaggtcggtgaccttgtagctgaccgtgacgtcatggagcaggtcggacacgacgtggagcggcagaacgccgttctccggctcgtcgaacatcaggcagacggtctgctgcgagcgcttgatgtagtggtaagccaatttcttcacaccgtagtagtcgacgacagcgtcggatatttgcggccagccgtcgatgagattccaccagatgattccggagcggcgccatttcgtgacgcggaaacgctcgatgaaatatttcttcgcctcagcctgggaaatctggctcgcatacgcgaacttttcaagcccgtactctacctcatgctccctgaacgccgggaagagcgtcttgacctgatttgacatgagacggatgcggtaagcgttcccgtcctcgccgtcgaccgcggcgcaggcggcgtgacagcaccagtcgtccttcggtatatagtcgttgtccgggtattttctccagtgccagagctgctcgggtctgatgtagcgcttcaggctctccggcgacggacagccgtgataaccggtctcggacgcgaagtggcagacggaatttctgtagaagttccccttgaagtagtcgcgcggtccccagaggtgctgttcggagatgctcccgccggttatgaaggcgttctcgtcgacatatggagaggaaggtatgtacggacgtgtgaagtcgtgggcgttcaggactttcggtatgacctctcgggtgaggcggttcttgttcgggtcgcgcctgacgtatccgcccgtccagtggtagcactcgtcgacctcgttgtctcccgcccagaggattatggaagtgtgattgcggagacgtctgacaatcttttcgacctcgctctggaatctcgcgcagtagtcgtcggtctgcgggttgatgccgcaggcgtggcagaagtcctgccagaccatgattccgttttcgtcgcagaagtcgtagaaaatgtcgtcctcatacacgttgccgccccagcacctgacgcagttgcagccgatatcggtgagcatcgggagtatgtccggaaggcgcttcgcgtcgcgggagtggtaagcgtcgaccggaacccagttcgagccgtgccagaagatcttcgtgtggttgatgtggaagcagaactcgccgtgtccttccttgtcggtggtgcttgtgcggtcgagctcgatggttctgagacccgcgcgcgccttgtgttcaaatacaggctcgcccttgtagagaagtgtagcggtgatatcgtacaggttcgcgtcgccgtagccgtgcggccaccagagcttcgggttgtttatcccgaccgagcatctgcccgcggtgtgccagagacgcttcttctcccagtcgaacttactgtcgccgcactcgccgtgcagtctcagcgtgtagtcgcgtatctcgtcctcggacaccgtgagattccagaagaaaccgaactcggcgtaggtgttctcgccgttcaggttgttcgtccagatgaagaggtcgtctatcctgtcctgtctcttttcgaggacatagcagggtctccatataccgcccgtgaccgcgcgcggcatgatgtcccagccgtacatatgcggggctttacggatgaagagcgaatcgaagccggtgggctgatgcgtgcaggtgaccggaacctcgtattccctcgcggcgatgacggcgggggtgatgtggacgacgatctcgttctcgccctttttcaggttcgctccgcaaaactcaaaggggatgagcatattgtcggtctgtccgatgagttttccgttgacgaagatgtccgcgacagtgtcgattccctcgaagacgaggaaggtgttctcatccggctcgttttcaagggtgaatctgcgcgagtagatgaggtgcaggttctcgaacttctcgttttcaatcgtgttgcacccgaagaacgggtcgctgatgagcccggcgcgctcgaaatcgagctcaaagtttccgggaactacggcgtcaacagactgccatccggtgagtttcagcgcggctatggtcgagatgtccttgttctctttcctgaaccgcttgttttcgacgtaccggagcttccatccgccgtcgaggggcgtgcgtgtgttctgaagcataaagtatcctccattatttctggaccgtgagtcctgtatgagaatattatacaacaacacatgtgcctttttccaacacatttatatgaaaattattgcgttttttcggaagatgtcactcgccgcctgtgaagcccgcgatccccgcgaatatcgccgccgcgagctgcgtctggtaactgtcggagcacagcttttcgcactcgcccggatttgacaggaacccgcactcgacgagcacagccggaattcttatcctgtcgagcacatagattgacgatcccgccgccttggtctgccggtcgtttgaagggtcgaggtaggtttttgctgtttcctgtatctttatggcgagggctgagccgcgcgggtcgttcttcgagtaccacacctgtagacctgagtatctgtccgacgggaagttgttcatgtggatgcttatgaagatcgggatgaccccgtccgcggcggcgccctccgctgtgctgacgcggtttttcaggtcgtgcatcttgcggtggcttttcaccgagtcgtcgacgagcatcgcgtcctcggtccttgtcaggatgttgtcgacccctgcggcggagcatatcgcggagagcttcttcgcgaccgagaggttgaggtccttttcgaggacgccgttcaccccgacggcgccgccgtccatgcctccgtgaccggcgtcgattataatgaggtaatggtcagctctatcggttcctgtctcctttgccggtcgtttcatcacgacgagccggagaagcgcgcagcctgttatcagcgcgagcgtgaagcttatgaatgagatgatcgtgtgagtccgcatgtgtgccaatcctttcctttatttgtcaagacaagcatattcttccgctgatttgcttatgcctgaatatttccggtcagactgcaataaaattcacatatgaattactcagaacctgttgcaaatcgtgtcgatttttgttataatattataataacaaaattaagaaagaaaggatatattgccgatatggatatgaacacgactgaaatcccacgtggcggacacagacgcagaccaaagcgcgggaacagggcacttccgataatagcggcggctctcgccggttttatgctggcgtcgtcactcgccgcggctgcgtatttcttcctgatacagccgaagatgggcggaaatccgattgaagacgtcaccccggaacccgaactcccggtcggagacgaaacatcgccggagtccgctacgaccgaaaggctcgtgaaccccgacgccgaggtgaggggcgcttatatcgcgacggctgcgaacataaacttcccgtcaaaacagggaatgagcgcggacgagctgagagcggagattgacgatatcattgctaccgcggaggacgcgaacctgaacgcgctgtactttcaggtcagacccgcgtccgacgcgctctatgactcgaagatattcccggcgtcaaacgtagtcagcggggaacagggaaagggcgtcgatggtctcgatattcttgcgtacctgatcgaaaaggcacacgtggagaacataaagattcacgcgtgggtgaacccgctccgcgtcacgaccggaacacaggcaaacccgaacaccgatgtgtcaaagctcgccgcagcgaaccccgcgagacagcaccccgagtggacggtcgcctacgcggacggaaaactatactatgacccggcgataccggaggtcaggaaactgatagccgacggggtgaaagagatagcggagaactatgacgttgacggtatactgtttgacgactatttctatccttatcctgtgagtgagaacggcgcgataatagatttcgacgacgcggacagctactcgaaatacggaaacggcaaggataaaggcgactggcgccgcgcaaacgtcaacgcgatgatcgaggaatgccatacggcgataaagtcggtaaacaccgactgcaagttcggtgtcgcgccgttcggcatctggcggaacgacgacgggaagaacggcgggagcgacacctccgggcttgagtcatacaagagcatctactgtgacccgacagcctgggtcgagggcggatatgtcgattacctcgcgccgcagatatactggcgcttctccacgcctgccgcaaaatatgacgtgctcgtgagatggtggaacacgctttgtgagggcaccggcgtcgacctgcttataagccacggtgtgtacaactacgtcgacacgtgggagaacgctgagaatgagttccgcgaccagataggcttcgcgcgcagtgagctcgcgtaccgcggttcaatcctctacggctggcaggcgctgaaaaccaacgctcaggggcttctcgacgagactaaggatgtcttcaaggaggagattgtctacaccggaacacagtctaacgacagcgcgctgaacatcagcattccgtattccggaacatatatcgacggagatgggagcttcgtaatcggctcctccgacccgtccgagccgctgtatctcgacggggaaaaggtcggacggacgaagagcggttatttctcggtctacctgccgctcgggaacggcgagaacaggttcacgttcagccacaagggcgtcgagaccgaatacatcctgaatcgaggaaagcagcccgtgacgccgtcaaagacggtttacacacagctcgacggttataagatatcttcccgcaccccgtcgaaggaatggttcagcacgaccgaggacacgataagcgtgagcgtcgccgcgccgtcaggctcgaccgtgacggcgaagctcggcggcacgaccgtgcccctgaaaccgacgataaacccgccggacgagggggatttcatgcgcgaggtctacaccggcgagctaagcctgtctgaatttagggacagtctcggtacgggcgagatattgacgacgaagatagaatttacggcaaagcgcgggaacgacagcgcaacgtccgagagcgcggagataatcatcggtccggagggaacaacgattcccgtaaaggttctgaagagtgacagcgaactgaaaatccagccggacagctggtactatgacgactatacgccgcagtcggagggaatgcaggacaacgccgtcctggcgtctggcggtctctacaagctgaggtgcggtggttacatatccgctgaccggatagaaaagcttgacacagagcctttcggtatcgcgaagctcgggaagatatcgctgacctctgacgacaagtctacatatataacgctcgacactgacgtgaatgttccggtcaactgctatatagagaacggcgagttcatcctgaccgtctacaacgttgacatatcgaccgcgccgaagcttgagatatccgataatcttcttttcacgtcggcaaggcaggaaaagagtgtcaaggcgaacgcttacaagtacttcctgaaactgtacgataccgaaaacttctacggtttcgatcattattataacgacggaaagctgatcgtatcgttcagaaatccgacgtcattgcctgacaccgacaaaccattgaccggcaagacgatagttctcgacgccggacacggaggcaggaatcccggagcgctcggaccgctcggaaacaccgagggcgcgatgaatgagtctgacttcaacctcgaaatcgtgatggcggcgaaggaaaagctcgaagagctcggcgccggcatagtcctgacgcgtgacagagagacagagatcgacgttccgataaacgaccgcatggacaagctgatcgaggttcagccggatatctgcatttctgtgcaccagaactcaatgccgtacacgacggacataacgaaggtgcgcgggcttgtaggtctgtactggtctgactcgggctatatgctgaccgatattctcggcggcacgatggcgagacggctcgacaagctcgacaggtcgccgacaaaacagcgtctcgcgatggtgagaaacccgaagttcccgtcgacgctcgttgaggtatgcttcattaccaacgtagaggagtatgagcgaatgatgcagccgggagagatcggaagaatagcggactacctctccgagggagtgctgaattactacgctgcgcaggcgaaatatctgaaaaagtaaacagaatcgggaccggacagtttttccggtccctttctgccgcaaaaaagtaagatcgggcggcgtgatgtcttggggaaatgtctattgaaacgcggggcgaaaagtgatataatgatattatcttccggaatatattgccggggaaatcctttatgaattctggttttgatatgaacaaggatttgactgccgggcgaggtgctgatacgattttgtctgccgctttttgccagcgtcatataggtataaaaaacagtcctaagatttccgagcggcttccctgttcggaaatatagacaaaaaaacacaccggaaaaccgatgcgttttgtcgggctgacagaacccgtattggtggagacaacaagacttgaacttgtgaccccttgcatgtcaagcaagtactctaaccagctgagctatgcctccgtatcgcttctcgcgattactcatatattatagcataaatcagggcggttgtcaagagggttttggaaaaaaatcggaaatgactaaatatacaatttagacactatttatctgacgtgttaaaacaaaataccgatagatgtgctttctcaacagagcgtattgattcccgataaatattccggtattattttgtctgcgatctgcggtataccgggattccctttgttgacactctgatattgattttttcatcatgttacctttcggagtctcagtttgtgccagtcttccagccgctcacatacttttcaatgtctgaatctatctttgacctcagagaatccatttcgctcgcgagctcgcccttgccgtcgagaacctttttcagcgctttgtatgacccgccgaaatccttgatataattgaaatctatgcagagcgtgtcaaagattatgtcgagcattccggcactgttttcgtctctcgcggtcttctgcttgtatgtcaggtcgtatgccttcggacgcgtgtacttgtacgaccagaagtcgagcgcctcggtgatgaatccggcgaattccgggtcggcggtctcgggtatcgctatatacgcgtttgcccacgagttgacatatgaatgataatcgctctgcgcctcgctgcccttcggagccgggagaagaagataatcgtcttccatgtcgcgcagcaggcaatcacgtcaaggcttgtgtttgagttgataagcccgaagaagtcgttatccacgctcataaccccgtcgtcgttcatatcccggctgagatcctttgtgtatcccccgaccgcgtcgagcgtccatttcccgttgcggacaagagcgcatatctcgtcgacgctcactccataatcctccgcaagcgcggtattgagatacatacagcttgccgtctgatacattgtcggggagatgtctcccatggtgaaaaacatcctgccgtcgagattcaggttttcatatataagtctgctccaccactcggcttcgagcgatatgtacggattgtcggacaggttcgcgagcacgccttcaacagcgatcttctcgagcgcgcctccgtttatgcaggagatgcagagtgaatacgcgtcgtcgccggcgagaacgctctttttcagagtattgcatcctgttgtcgcgtggtcagcctgttcgtattttatgtttatgttgtatctgtcgcttatcgccatgtcgcgctcatacaaggcgtcattcacaatatctccgttcatcgattctcccggcatatttacgtgtactgacggatagctgttcgcgtcgagtattctgaacgtccttccgccgaaatctttcgctccgagctcgtcaagccggtctttttcctctgtcggtgacgaagtgtcgggtccggtgtccgcggatgtctgtacgtccgtcggcttgccgccgtctgagcaggacgccagcagcgcgagctgaagcgccaccagtaatgccgtcttgacgattatgtatctttacattaccttctgaaacatatggcgcac

SEQ ID NO: 3464 - DNA, 18437 bp, Unknown
  16S sequences of unknown bacteria
ctggatttgcggtcggcgatgttcgtcaccgtacacgtattaattacatagacatctgctcccggctcaaacggcacaatctcataccctgcttcctccagcagctgccgcatggcctctgtctcatatgcatttactttacagcccaggttatgcagggcagccttttttctcatttttccgcctccgttcggcaaattcacgaataaatcacagtttcttagtagcttttcagcttgacttttcctatttcacccgttaatatgtggatgtaacccgctgacatctcaattatgggaggaacaacaacatgaaaacagtacagatttctttaaattcgatcgacaaagtaaagtcttttgtaaatgacatcaccaagttcaacaatgatttcgaccttgtatccggaagatacgtcatcgatgcaaagtccatcatgggtatcttcagcctggatctttccaagccgatcaatctgaacattcatgcagaagagaatatggaagatatcctgaaggtactcgctccgtatattatctaacatacggttcagtatatctctcgcaaaaagcaggccgcggcaagtgattgccgaggtctatttttttactttattctacccacacggtctctgtcgtctcgattgcagtctttacaagctcatcaatcttctcagagagcttcttctccgacgcctgaatgatatgcaggttcggcttcgtcaccggatgctttgccacaaagatcgtacagcagtcctcaaacggaaggatcgatgtctcatatgtatcgatcttctctgccacgtcgatgatctcctgcttgtcaaagccgatcagcggacggaataccggcatagagcagacttcattcgtcgctgcaaggctctgcatcgtctgactcgccacctgcccgatactctctccggtcacaagtgccagggatttcgtctcatttgcaaagtgctctgcaatacgcatcatataccgacgcataatgatggtcagttcgtcatgcggacatttatcgtaaatatagagctgaatatcggtaaaattcacaatgtgcagattgatcggtccggcataaggtgtcagcttctttgccagatcaatgaccttctgcttcgcacgctcgctcgtatatggcggcgcatgaaagtaggtcgcatccagctttacaccacgcttgcagatcatatagcctgccactgggctgtcgatgcctccggagagcagcagcattgcctttccattcgtgccgaccggcataccgcccggccccggaatgatctttgaataaatgaaaatcttgccgctctcacgcagttcaacgtgaatcagaatctccggatgatgcacatccaccttcatattcgggaatgcatccagaatccgtccacccaagatcgcattgacctccattgactcaattggatactgcttgttcgctcttcttgtattgaccttaaatgtctgtgcatcaatatcgtatacattcgtcaaaaactcgatcacactgtcaccgagctcctcaatgccgtgatcctccacctgcataaccgggcagatgccgacgataccgaacacatgctgcagatgtccgactgtctcctcatagtcgtacatcccctcacagtcgacgtaaatacgtccctgctctttgtatacactaaattccccgtcacacttctttaaggcatggcggatctggcgcaccagtgcgtcctcgaacagatgccggttcttgcccttgattgcgatctctccgtatttaatcagaaatgttttaaacatacttcctcctgttatctttgatctactcccgaatctgattttgtaaaaagacaccttctgtcccagagtatatccgaaaaaaattccgtcttagtgtcttacgtagcgcctaagcaccggaagcagctcccgcagtgcatccagacaataatcaatctcctcctccgtcgtaaaacggctgaagctgaaccgaagcgtcgactccagctgttcctgtggaaggtgaatctccttgagcaccgtgctcaccggaagctttttattcgaggaacatgcagatccggatgagacataaatctgtctgtcctccagcgcatgcagcagtacctcgctgcgcacacccggaaatgaagcacttacgatgtgcggcgcactgccttcatcccgcatagaatgtacaatcgcccacgcttcccccgtcgcaggatccttcagctgttcaagaccgtcaatcatccggtccttgatcgcataaaaatgggccgtatcatcctcaaaatgggcaaaggtctccctgactgcctgtgcaagccctgctgctcccggtacattgtccgtgccggaacgcatgccgcgctgctgcccgccaccaaaaataagcggcttcacctttgccttttcactaatgtacaaaaagccgctgcccttcggtccgtgcagcttatgtccgctgacggaaagcaggtcaatgtgctgcttcttcgggtagatcggaagcttgccataggcctgaatcgcatcaacatgaaaaagaatatccggattgtactttttgattatctccccggcctctgcgaccggctcaatcgctccgatctcattgttcaccatcatgattgatacgagaatcgtctcctcatccaatgccgccttcagatccgcaagactgatatgtccgtgctcatccaccggaagatgggtgatccgatagccctgctcagccagaaattgcagaggcatgagcacagctgcgtgctcaatcgctgtcgtaatgatatgctttccggcacgccgggaagcatacgcgctaccgagcagtgcccagttgtttgactctgtaccgccggacgtaaaatagatctccttctcgttcacctttaaggtttttgcaatcgtctctcttgcgtccttcagataacgctccgactccacgcccttcatatgcttggaagacggattgccataatcctccagcatcgtttttgacaccacatcccgtacggattccaggcaacgtgtcgtcgcagaattatccagatatgcttccattcttatttcccaacctttccgatctgaatcctccgccttttcggcagacccttccgtttattgtactaaaaagaagaagagaatgcaagcttttcttgcccgccgcacaaaaggatgatatgatgatgccagggtcaaaaggtcaaaaagccgttcatgcttgcatgataaggcttttgaacgcagatcgcgaagcgactgcgttcatgagcaagtagcaaagcggattgcgaatgtccgctttaccttgggacccgccaaacatgagaaagtagcgatttacgtagtaaatcagcggatttcgaatgtttgcagaattgcgggagctgcttcgcagcggagcaattcgtaggcatcagttgaggtcaaaatacctttcgaccccaacatcatatgatatgaaaaaacacaaaaaggaggatttccccgtgagccagacatttgatcagtttcaggccctctacagccggatccggcacttcaaccgtgccgcaaccctgatgagctgggatctgtacactgccaccccaaaaaacggatatcaggacatgtccgataccctgacttatttttcatctgaatctttttccctgtcaacttcagacgaattccgcgccctgcttacgtccttaagtcagccggaagaaataaatgcgctctctgagggcatgcagtacaccgtaaaaaagctgaaaaaacagatggaaaagaacagccgcattccgaaagatttctatgaagagctgatctccttgcagtccgcttctatgcaggcgtggggagaggcaaagcggaccgctgatttttcaatctttgccccgtatctggaaaagctcattgataagacaattcagcgctgtgcttataccgaccccggaaaggatacttatgaagtactgctcgacgagtacgaggaaggaatggattctgcttcgatcgaccgtgttttttcggaactgaaggaagggctggtgccgttgctcgatcagatcctggctgcgcctcagccggatagcagtctttttaaaggatactatgacccggatgcgcagaaaaaggtccaggagctgctgcttacctacatcggtttttcgctggaatccggtaccgttgctgaaagtgagcatccgtttacactcggattttccaaacatgatgtgcgtgtaacaaaccatttccggccggatgatccactctgtgccatgttctctgccatccacgagggtggtcatggcatctttgagcagaatgtcgattccgcgctgcaaaacacagaggccgacgactgcccgttcatgggtgttcacgagagccagtcccgcttctttgaaaatatgcttggacgcaaccgcaatttctggctcccgatctatcctcagatacaggaactgcttccggaactgaaaagaatctccctggatgattttgtccgtgaaatcaatcatgtcaaaaacagcttcatccgcacggatgccgacgaagtgacttatccactccacatcatcatccgttatgagatcgaacaggcaatcttccacgaccacacccctgtttccgagcttccgtcactctggaatcagaaaatgcagcagtatctgcacattactccgtccaacgatgctgaaggaattctgcaggatatgcactggtccgacggttcttttggatatttcccgtcctacctgctcggaagcatttatgacggcatgttccttcaggctatcgagcacgacctcggaagcatcgatgagctgctcgcagccggacagatcctggagatcactcactggctgaatgagaagattcaccgctacggcggactgcgcctgccaaaggacgtactccgcgaggtatgccatgaagaactctcggcacagccactgctgacgtatttccgcgagaaatatacaaagctgtatcaataaaaatcagcggattgcgaatgtccgctttactatttgtagaattgcgggagctgcttcgcagcaaagcctcaagaatatcaaggctttcttgaagagttcactcctcttcctttacagcttccgcatattcttcccggtatttctgattcagccatgcgaccatctcgtcaatgccctccttcgtatgcgggaacagctccgactctttttgctcctttggcgtcgcctcccagcaatacggctccggatacacagtcgccttcatcttgccatcctccatcatcaacatatagcgcataccgcaaaaggatccggcaaaccgttcctttttaatcagctccagagaaaattttcctttcaatgaaatctcttccatagcttctctacctttccttccttttctgtatttctttcctcgccgccttccaatcggtctctgattgcacttgacagaaccggcccggcctgtttatcatagaagccagtcagaaaacatcagagatgcgcagaagaaatatgtcatgcgttgcatgatgtgcatctcgcagcaagaatgccgagacattcttgaatttatgacattcccggaggatttcgcatatgaactggaaaaaagcaaagcgaatcatcgcactcatcggcgcactgattctcatcggcctgtacctggccgtcctgattctcggcatcacagccagcccggccacaaaaggcgtgctcatggccgctattggctgtactattgtccttccctgtctgctctacgcgatgatgctcatcgcacgcgtgctcagtggcaggcgggaaaatgaggatgagtcatcggataaaaattgatgcacggcccctcagtatagccgtaaagattattggcctggctggcagaaaagccggtacttgcatgtaccggctttttttacgtccatgaatgctccgccccggagactcattcactcttttctttatctgtaaataatgtcctctctgcccggtccgttggataccatggtgatcgggaaaccgatgtgcttctcgataaactcgatatacttcctgcagttctccggcagatcctcgtacttctggataccgcggatatcacacttccagcccggcagcttctcataaaccggctttgctttctcaagcagcgcggtcgtcgggaactcagtcgtcacctcaccgttaatctcgtagcctgtgcataccggaatctcatccagatagccaagcacatccagaaccgtcagggcaacatccgtcgcaccctgcagtctgcagccgtacttggaagctacacagtcataccagcccatacgtctcggacgtccggtcgtcgcaccgaactctccgccatcgccaccgcgtcttctgagttcatccgcctcgtcaccgaaaatctcactgacaaatgcgcctgctccgactgcactggagtatgccttgctgaccgtcacgatcttcttgatctcatatggcgggatacctgctccgactgcaccgtagccagccagtgtggaagaagacgtaaccatcggataaatgccgtgatccggatccttcagagaaccgagctgaccttcaagcaggatggtcttcccttcctttagtgcgttgtacagaaatgcagatgtatcacatacaaacggctcgatcatatcacgataggaatgcagctcctcgagcagtccttccggcgtgagtaccggcttgtgatagagatactccagaatcggattcttcagatcgcagatacgacgtaccttctcgttcagcagctcctcatcaaagagctcactcacctgaaaaccgatcttggaaaatttatcagaatagaacggagcgattccggacttggtcgatccgaaagaattcttgccaaggcgctcttcctcatactggtcaaacagaatatgataggacatcacgatctgtgcacggttcgataccagaatcttcggcatcggaacgccgcgatctacaatgctctttacctctttgaaaagcaccggaatatccagtgccacaccattgccgatgacactcgtcgtatggctgtaaaatataccagacggaagggtatgaagcgcgaactttccatagttgttcacaatcgtatggcctgcgtttgcaccgccctgaaaacggacgataatatcggccttctcggcaagcatatctgtgatcttgccctttccttcgtctccccagttggctcctactactgcctgtaccataatttttcctcctgaaatcagccgctttttcggctgtccttctaactcatttacggggcaaaccccacaacagtttcagtataccacaaaatcttttataagtaaaattaataattattatattaatcataatttatgctaatgtagctaagtggtaatctccagcagttccagaaattttgccgatgccgaggtcagcggcagcttttcgtttgtcacaagctccattgcgcgctccggaatggaagtctcgaaatgcagctcgaacagctcaccgcgttccagataaggggcggcaaagtcccgcatgacgcaggcgacgccgaggccgcgcagggcaaactgcacgatcatgtcgctcgtggccagttcgatctccggatgcagggctgcatcgcgagccagaaggaactcgtccacatagctgcgcgtgctgctgtttttctccaggcagacgaccggcagctcccgcaggcggctccacggaattgtctgtccctttaaggcacggaatcgctcgccggcaacgaaaacatcctgcaccatccgcaccggtgtcgcctgaaatccctttcggtggcttaagggtgtcgtcacgagaccgaagtcgatctttccctcacttaaataatgcatcgtctccggagtcggcccgttcgtgacgctgatccggatcccaggatagcgctcgtggaagcgctgcaaatgcggcaggagataaaactgcagggtcatatcgctcgcaccgatccggatctcgccggtctccatgttcgtcatctccagcatcttgcgctcacccatcctgatctgttcatagccacgtttcacataatcataaagtacctcacctgccggggtcagctgcacgcctttcccattgcgcacgaaaagctccgtaccaagtgcctttgcaagcgcacgaatcgcctgactgaccgcaggctgcgtgacagaaagcacctctgcggcctgtgtgatgctgccacattttgccgcatagtaaaaaaatttgtaatattccagattgatattcattggtgttgattccacccttgatccttatttaagcttatcactcttcgcacctaaatgtcacaacctcattcccgtgctcccggatgatccggatcagatcctccgtcttcagccacaccgtcgccgtattctcattcggatgcacgccgacaagtcccggctcctgtaaaaaatcctgatcaagaaagacttgcactgatcttgtctcatcgttcagtaccccgagtggtgtcactgcgcccggaatcaaagcgagccgctccagcagatcctctgctgacgcaaagcttaaattccgcgtcccctgcgccttccgaaaagcttttaagtttacccgtttctcaccttttaccgtaatcagataataattctgtttcttatcgtcccgcacgaacagatttttcgcatctgcctccgggtatggacacggcacctcggcaagctccgccatattgtagacggccttgtgctcggtgatttcatgccagatgctattttcctgtaaataatcgtaaatctgctgcttgttcattttatctattactccgctaacaaaaatattttatttcaccaaattatttctatatctataacctaccacaaaaccgcttctttgtccaaacaaaaagagaatacagacaccgctcctgcgatctctgtattcccctctactcctattcgtctttatctcttatatcagacattgatctcagctgtcatgccgagcagctccttattcgcctccagcaccggattcacaacggtctgtaagaagcgctctacctgctccttagagcggccgatgtaacgggacggatgcatggaccgcttcagctcatctaaggtgagattgaacgccgggtctgcggcgatcaactcgagaagattgttgtccttaccctcttctttgacattgcggcctgcttccatggaaagctcacgaatgcgctcatgcagctcctgacggtcgccgcctgcctttaccgcatccatcataatattctcggtcgccataaacggcagctctgccatcagatgcttctcaatgaccttcgggtataccttcagtccgtcggtgacattcagacacagatccaggatgccgtcgatcgcgaggaagccctccggaatcgacagacgcttgttcgcggagtcatccagagtacgctcaaaccactggcaggaggaagtgatcgccggatttaaggcatcgcagagcacgtagcgggacagggatgcgatccgctcgctgcgcatcggattgcgcttgtatgccatcgcagaggatccgatctgtgtcttctcaaacggctcctccacctcttttaagtgctgcagcaaacggatgtcgtttgacatcttatgtgcgctcgccgcaatacccgcaagcacgttgagcacacgggtatccgtctttctggaataggtctggccggatacagctacgcatgctgtaaagcccatcttttctgcaatcatcggatcgattttatcgatcgtctcctgatccccgtcaaaaagctccaggaagctcgcctgtgtaccggtcgtacccttggagccgagcagcttcataccggaaagcacatactccagatcctccagatccatcacaaattcctgtgcccataaggtcgcacgcttgcctaccgtcgtcggctgtgccggctggaaatgagtaaatgcaagagtcgggagctccttgtacttctccgcaaatgcaccaagctgcgcaatcacattgacaagctttttctttacaacctttaacgcttccgtcatgacaataatatccgtattatcgccgacatagcaggaagtggctcccagatgaatgattccctttgccttcggacactgtacaccataagcatatacatgagacatgacatcatggcggacgaccttctcccgctcctttgccacctcatagttgatatcatcctgatgtgccttcagctctgcgatctgctcgtccgtgatatccagcccgagctccttctctgtctccgccagtgcaatccaaagctttctccatgtccggaacttcatatccggggaaaaaatgtactgcatttccttacttgcataccgctctgaaagcggactctgatatctgtctgtactcatgagaattctccttttcttttattaacggtcatactctccccggatatccttcgttggcggatccagcggatacttcccggtaaaacagccacggcagaccggaagcccgtcgaccatctctgacaatcgctccagtctcagatagccaagagaatctgctccgatgatccggcagatctcgtcaaccgaacggttgtgtgcgatcagctgttcgcgttccgggacatccgtaccgaaataacacggatgcagaaatggcggagagctgacgcgcatatgaacttcttttgccccggcctcacgcaacatacgcacgatgcggtcactcgtcgtaccgcgcacaatcgagtcatcgatcataatcacacgctttccttctactgcctcgcgcagtacattcagcttcacacgcacgctcgattcccggctgctctgcttcggtttgatgaaggtccgaccgacataaccgtttttcacaaatgcagtgccgtatgggatgcccgattccagagaatatccaagcgccgctgcgtttccggactccggtacaccgacaacaagatccgcttcgaccggtgaatccatcgccaggtagcgacccgcctgaattctggaatggtaaatgctgacgccgtccatatagctgtccggacgcccgaaataaatatattcaaaaatacagcgcgccgtcttatgctgctcttccccggaaaagcacatactccgatccgattggatgccgtgatccggtgtgatcgtcacgatctcacctggctccacatcccggataaactccgcgccgatcgtatccagggcgcatgactccgaagccagaatatatgcattttcacgctttccgatgcaaagcggtttaaatccaaacggatcccgtgcaccgatcagcttccgcggtgacataaccacgagggaatacgcgcccttcagcttcttcatcgctcctgcgaccgcgcgctcgaccgacggcgtatgcaccctctcccgtgcgatatgataggcgatgacttcgctgtcaatcgttgtctggaaaatcgcaccgtcatgtgccagctcatcccgcagctccggggcgttgatcagattgccgttgtgcgccagtgccagcgtccccttgatgtagttcagcacgagcggctgtgcattctcccgtgtacttccgcctgcggtggaataccgtacatggccgacgccgatatctcctgccagcttttccatgctctcactgtcaaatacctcgttgaccagtcccattcccttgtgtgagagtaccttgcccttcggccccttcgtatcgctcaccgcaataccgcagctctcctgtccgcgatgctgcagagcgaagagcccatagtaaatcgtggaagctacattttcgcccgaaaaatcataaataccgaagaccccgcactcctctctcagcttgtcggtgatctccttctgctcatgaatttcacaatgtttcatctgtattctctcctgtctgtcgtgtcgatcggtcagtctgaactgtcctgtttcctcttacaaacgcctaaagtatacatgattctttcccgatacgcaagtctcatatttttgtacttctgcaatactgctccttcagatcctttacgacttcgctccgatctctcctgtgcatgcgttccttttcctccagatactcctccgatgtacacatttttgcattgtactcctgaattttctgtaccagatacggatctgccttcagctcttcgagctgcttctgataatcctcctcggacaaaaacagcggaagggtgctgatatatttgcggaatgtctccttcgtccgtgtgagatgatatgcctccagaaaacagtccgccgcccgtctgaaatcgagcatgcccgcgtaagccgcccctaaattattccagattgccgcataaaactgcacaccgagctttcccggattctttcgttttaaaatctcgcggtactcagataccgcgcgcccgtacatccgctccttgaccagataatcgccgcgcagcttctgcttcatatcggcagactgcacttccagcttctgaagctgctcctgatactcccgcatggcactcgtcgtaagatagcccgcctcgcgaaaaatcggaagcacaagaaatccgatcccgtcttttttctccagctgatcgtacagctgccggtacagtctggtcagtccaagctcatcccgcagccagtcgagcagccgctcattgagcagcgattcatcgatcagacaggcattgttgtacagataaaagcacagctcctccagtgaataaatgttcatccggatattttctatataataaggcttttttgcctgcggaagcaggcacagatcatagctcatagatcatccaacctttcaaaacatgatttcccgcttccagaccatgccggtcgagcggtaaaattcgccaaagccgagatcctccacctcgatatggcaacagcccggagcagaaaaataaatcgtcatccgcactctggtcgcccgtgccgggcggtgtggcagaccgacaagccgcatcatgtgcacgatcggatccccctctgccattggctgcgaagtgatccgaagctcccgctcgccgtccagaataaattcacagacgtgatgtgcctcataccagttcatccctgcgctgatcagcggatacatctgctccttcccgcgaatccgcatttccatctgcagattgacctgtatcatatcccggccaccgaacaggatcccgcgctccgcgatcagccctgcgcgctccattgctgcatagcaggctcctttggaatagagattctgtccctgataggcatgccgtttgaagcaaaggtactggatcgagcgctccgcccagcttttactgaaatagtctccaatcagatagctgaccgtcaccgtccgtcgttcaaacagcttcttgagcagttcgaaaaacagacggtcccgctctttattccagtccgcctcctccatctcgccccggacatccaatcccaccggctgacgcgctatctcagtggcacgtgcgatcgccggtcgggtcgtccggtcaatatgaagaatatatccgacgattgcctcatccacatattcgatgagtgccacgtcatgattccacagctcctttttctgattcaccgtataataataaaatgaggaaagataatcctgcagatagattcgtttccgatcaagcccgttgcgctccagtgccaggacaatcagatcgctccaccgttccgtcagcgtccgcaccgtgaccatcacctgcagctgtgcattggctgtaagcaccttcaaccgcccgatgcatgcggcaaaataatctgccagcagctcctctgccgaaacacgctccgctcctgtctcgatttcatcctctgtctgcagcttccggtacagatccgtcaccttagtcgctgcctccccggtgccgtcccacagttcccattttccacccgcggcctttctcatcgccaccggcagcagataattttctgcatccggctcgaagctcagggtgagcggctcctttactgacggatgaaagtacgtcagctgcgcgtactcctcattcagctcgattccaagaatgagctcatttgatgcctgtatcataatatcaccgccttcgtattccgttatatattccgttatatcagcggaaacagctcttttgccagataggacagcagcagataattatccagctccgtatctgccgtctccggatcctgttccttcagtgcccttgcgattcggttcacctgatcataccaggctgccccggtcgccgtctcttgtcgaaagctcagcacccgttcatccgcctttttccgttccgttccggcttcctcttcgatgcggcattccacctcatctccgtaaaaaagggtaaattcccgcacaaaaattccctcaaagcagtttttcatcgtctctttgtgatattcctcttccgaccccttcgaccggtagaagattgtcaccgtgctgtccggattgccgacatactcggcaaacacgcgcccctccatctgataaggtgccagcagttcccggtcaaatttattccagaacgcaaaacgcatccccttacggttgaactcctccagaagctgtgaggcgtattcccgccgctgtccggtcagctccacctgcgtagaataatactgcaagagcgcaaggcggcatacctcctcctgctcttccacagacttctgctccattacataggcgtaatcccgctcgagatagcggaatacgacatccgctaccgggatgccgcgcacaaaatactcataggacttcagattcagatacgcacggcagagcttccgtctgcccatcttttttgcataggactcaaagaccggttcggatccctccgtatggctgccggtaaacagaaccatcattagaattttttcttcaatcatcagagtatcgagttcaaaaccgcgcgccgcttcccatacctgcagcatattctcaatcggcccttcataatacaaaagcaggtaacggagcagcttatcgttgtatttttctttttcaaaacagtaagccgaaagtgacagcagcattggattctcggcaaattccaaatcgagaatcatcctgctgcaaatacgtaccagctgtaaaagcggaatcccctctgacccgtacatatccagaagagaaaacgcatccttacactctccttcttctgcaagcagagaaatcagagccgccttgtctgccttcacatagtccagatatgcaatccgctccagaaaatccggaagtgaatcgtcccttgcatgctcggaatagtaatgcagtaccgccgcacgcagctgcatccggaattcctctgtgaacatttccagctcgcagcctttcgtcagatacggcatggagttccggttcacgagctgctctttcatgcagctgcagcaggcaaagagcacaatgcctaccgcatccggcacgagctgcatacaccactcaagcatcggatcgctgtcaaagagcttctgtcgtgcaatcagcccttccgcggcaaatcgctccccggcccggttttcgagtacgagcacgctgtccgggtcatataaggtgatccgcgtctttcctccggaaagcacagccgactgctcctgaacaaaccgtccggaatgcaccgtcacgctgcagatctccggtgacgtacacgtcacttcataggaaagcagcaggcgaatcagctgctcacccatctgccgcgtgagcatgcttttgcgcagaaatgtgcgatacagcactgcaaggtcatccgtaaaacgccccatctcaagctgatcagaagcgaatttctccatcgcagcccgatatgtgcggaacgtctgaggatcatcctcctttcgctccacaatttcccggtaaatcgccgcacgcttccggtaatccaaggtcgtatcataggcaaaatacatgcgtatgatctgcggcatcgcagacagtgccggatgctccatcgactccatatatgcctcatacagcccggtaatgcgaagacctgcatttacgcctttttcataccaggcaaacgcctcctgatcacgccgttccccacgcagcagcagctggcagatgccctgcagcacttcaacctccggagtatgccggtatccctccttaagcacttccagcagcagaggtgaatatttaccataatgcgccacgagattcgccgtctgctgcaagagtgactgggacatcaccccatttctggtcgcaaaccgcaaaagctgcagctcaaagcttccaatgtgccgcatcataaacggattgccacacagaatctgatatgcctccagatacataatccggctgtggcagccatagcggaactggtctgcgaccgcctcatatttggccgcatcattctccagcagcgactcctgcagatagagcagaatccactgcagcttccagttcgtctgatcccggtaaaacagtccccggatctcctcttctacctgatccacgtaagaattctcctggtaaaaaaaggtcgtcagataccggtaaaacccatactgctccggtgtgcgcagccgatcttggtgctccgtcacactctcaagcaggtggatcgccttctgcttctttccgtccgcaaagtaaagctgtatcaggaacagctctgcaaacggatcatctccgccggagcttttatacatgctgatcgtctgcgtggaacgctccacccagtcggacagggatatctttttcagccggaagctgacatagagctgctccagctttttctgcatcatatggcagatatgacgctggcggcacagcccagactgcgtatgcttttctgccgtcacctcaatacacagcttctggtacggtgtggacagcatgactttcccatagttttttccggcatgcatgctgtcataatcaacaataagattcagctcacaggtgcttcccgcaaaggaatctgtcgtcatcgtctgacgctccggacagagaaatcccgcatccgactctgccgtaatcttctgaaacccccactggcttctcgtaatctgcagcctttccccaacggtctcacgcatatcctccagtacaatgctctggcggtcgacagaaattttgaccggatccttgtatcccgccccggtcagaaattcttccatcgtctgatagctgaaatccggcacagccagcgcatcgtagagtgcaagaagctccggctcctgtacacgcagcatatcgcgatagctccgactgataaagctgcggtacgcccccgcgaaatcctgctctgccagcgcagccagatcctgtggatgcgcaaacggaagtgtccctgtcttattctgctgcttcttctgtccgatcagcgtatagggaaccgtatattctccccggtctgagcacacggtaaaaaccccgtgctcctcctccccttccggaaatccgtttccgtccacctgatagtgaatctcacttttaatcccctgaaattcggtcggctcacagatcatccgaggattagatgaataaagaaagcccctgacctttttcccgtccgggctttctatccacaaagtcccgcgcatcacttcgcccggctcgaccttcacggtcacttcttccggtaacatcacaagcggcggtgcgctatattcaaattttccattgagcagctgctcgatttttcttttcaatatcatcacctgtattgtatatttctcttttctcagtgcgtaattcagagcgtaattctgtaactgccgctgcatgcaccgtctgctgcattcgggcaaatcaaacgcagtatgtaaaaacaccggctcagttcaggaatttcttcagctcatccataaacgtatttacatccttgaactcccggtatacggaagcaaagcgtacataggcaacggcatccagatccttcagccgatccatcacaatctccccgatgactttactctcgatctctttttcctcgcgccggaagatttccatttccacctcatcgatcatctcccggatcttctggatcggtgtcggacgcttatagcaggcacgcatcacaccatcctctacttttctccggtcataccgctcccgcgtctgatcctttttgatcacgatcagaggaatcgtctctactttttcataagtcgtaaaacgctttccacaggcgtcgcacagacgccgacggcgaatggaactgttgtcatctgccggtctggaatctactactcgcgtatcatcctggttacaaaacggacatttcatgcatttcctccttactatcagagcatgtcgggcaagaatacacccgtcttccgaacacactccggctccccgaaatctcaatcttgagtataacggaaagagaaaatgctgtcaagccgccgtacacacttccgcatccattacatactatgatactagggtcaaaaggtcatgcgtttcatgcttgcatgaaaaagcatgacttattgacccgcaa

SEQ ID NO: 3465 - DNA, 4000 bp, Unknown
  16S sequences of unknown bacteria
gatcgccctgatggcagctgcaggcgcagcggcaattgcagcttatcgcagaaagagaagctgaacgaccagacatctgtttggataagatcaaggcgcagcaaggaaagattgctgcgctttgatcttgatgcgtggatgaatggaacggctgatgtctctgcaggtctgcaatcacaaaaacaggcgaatgtacgaattttacaacaaagtgtaaaatattacatgtcagccggtgttataatgggaacagaagggaaacttggaataataaaaaagatcatcaatggcagaatacagcgggagaaggagatggaggtgaacggtcgatcctgctgattcaggataggcatctgctcaagagacaaaggagggatggatgaacgcgcttgagaaatgatgcgcgatcgatatcgatcacgacggcaatacggcaactgatcgcccgcgccgttcgatgaatgcgaatgcgcgggctgtttgaacaggggagacccttgcgcgacatatgggagaaaggaatgaaacagaacatacaaaaagcgctgcatgccttgcttgcactgatgctcatcttgacatcggtctccataccggtgcaggccaatgaggatcctgctgcagcagcggaacaaaacatcgcattaaacaaaccgacgaacaccagcggcggtcagggagaacgagccgttgacggtgatctgagcacttactgggatggaggtgtgtatcctggagaactgctggtcgacctggagggatattatgatgtatcccgcatcacggtcatcccttattacggcggttcccgttattatcattatgaggtctacgtcagcgatgacggcttcacgtatgatctggtcggccgcaaagacagtgatgagctgcagaccagtgaaggagagacctatgaattcgcttcgcggacagtgaagtacgtaaaggtcgtcatgacatataattccgcgaatccaagcattcacatcaatgaactgcaggtctttggcacggagaataccgattatgaaccgcctgagacaccggcagaggatcccaatgatccattgaacatcgcttatggcaagccgacgcgctctacggccaacagtggcttcactcagctggcggtagatggacaaaacagcaccgcatggagcggggaagactatccgaagtatgttgatgtcgatctgatgcgcaattatgacatcacgtccatcaacgtctgcatgccgcaggatggcacgcagtatgcgtatacgctgtatggcagcgtggacggcgtgcattttacgcggatcgcagagaccaagatgagcacgccgcaggaaaacggcgacacctatacttttgaacagccattgacatatcgggtgatccgggtcaatgtgaccggcaattccaagggagagggcgccaattccacggtgagcgagatccgggtctacggcagtgagagcgatgaaccgcttgttccgacgcgggaatcgcttgagctgacctcctatgaagactggctctatgaccatgctcaggtggatgtggacgcgctcaaggatgagaacggccattatgacatcaaagacacttatgatgaggaagatgtcatcgcggaagtgcgcggcgtcgtcagccgcatcctcggtgaacgctacaatgactggttcacctttgtgctttccccttctgaaaatggaaaagactactatgagatcagcgatgaggacggcaagatccgcatcgtcggcaacgaaggcgtatcgctgacggccggtctgaatcattatctgaagtattactgcaatgtgcatgtttcccagcagaccagccaggtcaacatgccggacaccattccggccgtgggcagcgtgatccgcaaggaatctccttatgagatccgctatgcttacaattactgcacgctgtcttataccatggcattctggggatatgacgaatggcagcgcgagctggattactttgcgctcaacggcgtcaacctgatcctggacaccacggcgacagaagcgctgtggatcgaatatctgcagaactatggctatgatatcgacgatgccaaggcctttgtctgcggatacgcctataaggcatggtggctcatgggcaacctgtcttcctatggcggtccggtcagcgatgaatgggtgatcgataccgtggagatggcgcgtgtcaatcagcgcaagatgaccgtgctgggcatgacaccgtgcctgcagggcttcatgggcgcccttccggaagatttcgcggataaatcagccgcgatcctgggagagaagggatatgacgatatccatgcatatatggtggaacagggcgactggtccggattcacgagaccgccgatcctgaagacgacatatgacggctacgatgagctggcagagacattctatgagacgcaggaattcatctatggtcagatcacggattactatgccggcgatctggcgcatgagggcggcgtcattccgccggatctcagcaagccggaaatgtctgcgtacatcctcggcaggatgatggattatgacgaagacgcggtctggatcatccagtcctggctgtccaacccggatccaggcatcctggaaggattcggcgaataccgtgaggatcacatcctcgtgctcgaccttgatgcgacggaaaaccctcactggagcgatacggtcaactggaacggcaaggagttcggcggcacttcatgggtatactgcatgctggacaactatggcggacggaccggcatgcacggcgagctggaaaacctcgccacgcagatcgcgcatgccaatgcgaacagcgagcatatgaaaggcatcggcatcacgccggaaggcacgatgctcaatccggtcaactatgatctgttttgggagatggcatgggaaagcgagccgatggacaccgaagaatggctgaaggattacgtgagcagaagatatggaagctatgcggaaaacagctggaaaggctggcagctgctgctggatacggcctacggctacaataacgatgacggcacggcgctgtaccacactggcaatgtcaactgcatcaccaatatgcggccctcctttgatccggagatcgtcatcggcgattatgaactgacctacgatccgaccgtatttgaggaagcagtcgaattgatcctgagcgatttcgatcagttcaaagacaatgaatgctacatctatgatgtggtcgatctgctcaggcagatgacggccaacagccaggtggcgttctttgagcgcatctgtgaagcttatgaaaacaacaacctggaagtgtttgaaaagtataaagaaaagctgttggacagcatcctgctgctcgatgagatcgccgcatatcaaaaggattcattgtatggcacatggatcgccaaggctgaaaactttgccgatgatccgcgcaacagcggcacctacgatgattattcccgcgatatgatggagatcaacgcgaaggcgctggtcagcatctggagctccaagacattgcagacctatgcccaccggcagtatcacggcctggagaaggattataactacccgatgtggaagctgtggctcgatgcggtggaagaagccatccgcggtggaagctacacggcaccatccagcaacgtggattatttcaacatcggctggaacatcgtgctcaatgatacggaatatccaacgataccggcaccggcagaaggcgatgcgacgcaccgcggactatatgccatctatgaagagctgatgagcgaatatacgtatgcgcaggcgcagaaagataagatcatcaatgagaatatcgcttcggaaggaacggcatatgcacagacgacccttggttcaaatgaaccatcccggatcaatgacggagatgcgggaagcctgtggatcgccggcagcagcagcgtgccggtctatgcgggcatctcctttgcccaactggaaaacatctatcggct

SEQ ID NO: 3466 - DNA, 32759 bp, Unknown
  16S sequences of unknown bacteria
aaaaatccgtttgcaattctcttaaagcggcgcggtcgaaaagttctttcgcgcataatcttccgcccgttacgggcatcagattgaaatgcaaatgcggtgtgctttcgtccaaatgaacgactgcggatacgacgttttcttttccgtagcgttccgcgaaaaactccgtgcaatcgtcaaagaattgtttttgtacttcgggcgaaatcccgtcgaaaaattctttatccgaacctaaaataaaagaagttataagcaccgcgtcgtctttaattttacgtttcggggcgagttctttaattcgctcgtcaatgaacgaaagatacttttttccataaggcaaagtatggtaattcagatatgttttcgatttgtcgatttgcggatttcgcgtggacttataattctcgtcgcgttcgttttcccgttcgattccgacaacgtcggcacgtttatatttctccatgtggcatactaaatacgacgtaattcatcacctccgtggactctgttttcgataccttttctaaaaaggtataactcactataccaaaccgcttcgcgtttggtgccgttcgcccttgcagggagcttgtgttcgttgaaaaacaccggcttcgccgtagcaagacgaacgaagattgaaatgtttttaatgtagtttttataactgttctctcctttgaaattattttttgtcgtgaaaattttatatcgatcacggcggacgatattgattgtaatttgtcattgttctacctccttaaagacgacaaaaagccgctgatattttttctatcaccgacttaaaacacaagtattaaattttaattttcgttacatgaagcacctccgattttgtatttatggataaaaaaatccgtgcgattccggttgcctttataggctcgttcttcgctcggattttaatcccgattatttaatttttagtcgatttcatctaaaaaatcgtacaacaacaaaacccacgtcgaaatctctcttttttaacgatttcaacgcccgtcgcggtagttgctatatttttagcaaccttatggcaaacgacggtaattcttctgtccgaatccgcaaaagggaacgaacaatcgggcaacttcttcacgcccgacaacgccttttcttacggcgcaataccttgaccttacatcaagtcgattttattatagcatacgaacatttgttcgtcaagtgtttttacttattattttatagaaatcgtaacagaattgatgctatatgtaaagtgcatccaaaaatctgttgtttcatgcgcattacaacttgatatttcccgaaaaatgtgctataatgtctaagaaaaacataaaatcagttgcataggagtaacagatatggctcaatcaattacatctgccgatattttgaaagagttgaatattaaacgttcaactttttactatttgttgaaaaacaaccttatctctattccaacgactgatacgggaagatatgcttggaataatgaagttgttgagcaattaaaaattgttttatctgaaccacaggaaaccgaaaaagaaatgcccgaaattaaaacgacaaaaatcaataatagaagatatctcggaaataaatacaaactactcgattttattacttctactgttgcgcgtgaatgtgtaggcgttaatactgttgcagatatttttgccggaacaggctcggtggcttctgctttttcggacaaaaaattaataaccaacgatatactttactttaattatatctgtcatattgcttggttcggttccgaaaaatatgatgagtcaaaaataaaggaattgatttgttattataatgccattgcccccaaacaagacaattatatgtcactgcattttgcaaatacattcttttctcttgaagattgcaggaagataggatttatcagagaggatatagaagataattacgcctgcggaaaaataaacggaagagaaagggctttgcttattacttctcttttgtatgcgatggataaaatagccaacacctgtgggcattatgatgcatatataaaaggcgcttcattcgataggcaccttgaactttctttaccgcttgcaagtaataaaaacaacgaaaataatcaatgttacaacgaagatgcaaataatctcgttaaaagaatagatgcagacttggtgtatattgatccaccatacaattcaagacagtattgcgatgcgtatcatttacttgaaaacgtagcaagatgggaaaaacccgaagttaagggtgttgctttaaagatggatagaagtcgtctgaaaagtaattattgcacatctaatgccgcaaaatcttttgaagatttaattgcgaatatcagggctaaatacattatattgtcttataacaatatggcagagaaaggaaatgaccgctctaatgctaaaataagcgatgctgacattatgcgaattctttcgagaaaaggaaaggttaaagtgttctcagaaagttataaggcatttagtacgggaaaatcatctattgagaataatgaagaaagacttttcttatgcgaatgctacgattacaagaaaaaagagattatacaatcacctttaaattatactgggggcaagtataaacttttaccacagcttctaccgcatttccccgatgatattgactgttttatagatctattctgcggcggcggtaatgttggtataaatgttccgtgtaataaagttttatttaacgacagtaatagtctgttgcgttttatgttcgggacatttaaaaatcttgataaagaatccacttttgagatgattgataaaattattgaagattatggattgtctaatactgataaatatggatatgaacactatggttgcaatagtgccgatggattatcgtcttataattccgaaaaatttttgaaactacggaatgatttcaaccatagaaaaaatcttgaatacaactactatgttatgttgtacgttttgattgtttatgcatttaacaatcaaattagatttaataaaaaaggtgaatttaatcttcccgtaggcaaaagagatttcaataaaaaaatgcgagagaaactatccatatttattgataggttaaaaagcggagattataaatttgaaagtatggatttccgagagttagatactgacgattggagtgaaaaaacgtttgtttatgcagatcctccttacctgattacttgcgcaacttacaatgaacaagatggctggaacgaagatttagaaaaagaattgttatcgtatttagataagcttaacgatcgaagaattcgatttgctttatctaatgttctacgttcaaaaggcaaagagaatactatacttatggattggattaatcgtaatatcggaaaataccacgttgtttatcttgattatgactattctaattcgaattatcaaacaaaagacaaaaattctaaagcagaagaagttttaatagtaaattattaaggggtaaacgttatgtcttcgtacaaaagttattgttggtcgcttggaactacaagtttcagaatggtagaattcaataaaaagattgaggaacaattaaggttgctcaatcaattttggcatacacctgaatataccgacgaaaaatggagttcaaacagcgctattcaagttgcttactataattttattcgagagcaaggctttattgaggaaaaagatgccctgcgaaaagataaagacgcaagagaaaaaacttcgggtttagttgatttgggtataattaacgacgaacgtagactaacagatgccggctgtgcattacttgctatcgcggaaagcggaaacttttcaagagataatatactccgtattccagcagacagttttatttatttcaaacagttgttaaaatcgtcttgcccgtttgaaaataataatgtacgcccgtttgctgttttagcatacatattgtccgaaatcggtgaaataagtaaatcggaatttacatatcttttacctcttgcaatcaataaagaaaaaacagagcgaatagtgaactatatcaaagctataagggctaataatgccacaatagacgaagctattatatccatactttatgaaatggaaaattatcaagaagcaaaggatatcttcattaaggcttccagtattgatgaattgctcattcaagaaataggaatgaatcgtaaaagtagaacttatgatattccctatgctacactgtatgatactttacaatcatttcgcactaaccccacgaacgagtttgtaattgctttgtttaatgccgtagataaaatttccggcaaagcgcgtttatactggaagatgtatctttttaattccgtatcgcgtaggaaaattgaaacaataggcattagagcggttaaacaaaatataccaattataacggcaaatagtgataccgcgtttaaagaagaattttttaaactactacacttatttaaagcaaaaagtttgcttgatgactattatgatctaaataaacgttactttaagacaagcgatacaattattttccaagatgataaagtcagatttgatatcataccaaattgctatttttcattggtaaagaacggtctgttaaacatagcattttcaaaagccgataatttagaggtaaattgtgaattatcagcaattgaaacaacttttgcaattactcaagaacagttgttccataaagccgaagaaatttatggcgttcaggttcatagcctttttgacgtccaggacctcgtcgaaaaagaaagatatgaacggtttaataaaatgattgatactcgctttaccgatgacgtactcgttgatttaatgacgatgtttgaaaatcgtaatgatgacaatattcaatctattgttaccaataacgccgacgtccccaccatttttgaatatgtgcttgctatcgtgtggtataagatttcgggtagacaaggcaaagtattggagtatatgaatctatcgttagatgcagatttgcttccgataactcacgccgcaggtggacacgaagatattacttataagtacgaagctacagcaatttatcccgcacatacacttttgatagaaatgacattagcaaacaaaacaaatcaacgtcgtatggaaatggaacctgtgtcaagacatttgggtgattatatgcttgctcaccgaaatgaagaggcttattgcttatttgctactaccttcctccacatcaatgtaacttccgatttcagaataagaaagaacgcaccatactattcaatggacggctcggaatttgtagatggaatgaaaattattccttttcaaaccagcgaaataaagacaataatacaaaagaaaataacctatgcgcaactttatcacatcttcgatctcgcataccgatctggtgttgcaccgaatatgtggtatgagcaagaaataataaacagactttaaggtgaaaaatgacatctaactgtgcgcttattaataaagaaactttgaattttatctgtaaaggcaaaggagttacggtggaatttttggcgcaaaagtcaaaatttccttcatcaaaaataaaacgatggttggacacaagcgataaattgctaccaaccattaatcaggcaaaatctttggctggttgtctacatataccatttgccagtctatatatgaattcaaaagatatcccaatgaaagtcataccatcatacaaaaatatgcgcactatattcaatatggcttgtattgacgatagtgcaataaatattgcaattattgatgtattaactgcattggattttcttgaggaaaccaataaggaactcgatcgcactaatcctctttatgaagaattccctttaataaactcaaatgatccgatgatttgggcaaacgagataagaaaatatcttaatttaagccttgatgaacagtttgcgctttcttcttcgagaaagttctatttgtacttacgtaacaaagttgaaagcaaaggaatttttatccattgttttaatggtgtacccatagaagtggcgcgaggttttgcattatacgataaaaaacatcccattattgggttgaatgctgatgatcgacatcccgcaaaatgctttagtataatacacgaattggttcatatcattaaacgagactcatcattgtgcaacgataattatagctcatttactgcgctatctgaagaaattttttgcaacgccgttgcgggcgaattattggtacccaattcagcctttagtacgcttcttttgaaaggtaaatatagtacgccttattctcttgcagatatcaaacttatagctgatactttttctgtaagtagggaagttatagtaagacgaatgcttgataatggtaagattgatatgagtgcttacgatacatacaatgatttatttagaaaagaaattgaaagacagcgtgaacaaaataaaatagatcgcgcaaatggtctacctcctacatttccgcgaaatatgagtttaatcgctgtagatagaacaagcccctctatatgcactgcactttatcttggatatgctgcagatttatatacaagaaacgatattgccaatcatttaggtattaaacttaataaagtcgatggcttcttaagggaggctgcgatatggaacaactaagtttttttccaattccttataagtatatcattgatacttcggctattctgtcacaaaaaccagatgaacaacatcgtaggactgtgcataaaagtcaatggaaaaaaattgatgaacttattaaaagccaagaaatagtaatgtgttctgagatatttgacgaagtaaaggatgaagatataaaaaagttattagtgaccttaaattgtaaagtgtttgaagtagatgatgatatacaaaggaacgtaagacggatagttgctgaatgtccaaagctaatttcatttacagataagtcggggacttcttccggtgatgcttttttaatagcaacagcaatgaaatacaatttagttattataacagaagaaaataagcaaagcgaaaagaaaatacctcaggtctgtaaaaggttcaatgttgaatccattaatattttagagttgtgtgagcgagaaaattgggttttttaactataaggagaatatcgatgaaagcagtaatatacgcgcgatttagttcggacaagcagaacgaagcaagtatcgaaggtcagcttcgcgagtgtatgcagtatgccgaatataacggtatgcaagtcatcggcaattacatagatcgtgcattttctgctaaaacagatcaccgccccgaatttcagcacatgattaaggacagttataaaaatctgttcgatatcgttcttgtgtggaaattagatagattttcgcgcgaccgttacgattccgctcattataagcgaatattaaaaaagaacggcgtgcgcgtcatctcggcaacagaggctatatccgaaagtccggaaggaattttgcttgaatcgctgcttgagggctgtgccgaatactactctgccgaacttgccgtaaaagtcagacgcggtatgaccgaaaatgcgttaaaagccaaagcaaacggcgtccgcgctccgttcgggtattatatcgacggcgacgacaagtatcaaatagacgaaactctcgcgccggttgtaaaagaaatttattcgctttatctcgaaggaaaacgcgtaaaagaaattgcgaagttgatgaacgcccgcggaataaaaaatcgcggctacgatatgaattacaattcggtatttcgcatacttacaaaccgaaaatatatcggcgaatataaattcggcgatatccttctccccgacgctattcccgcgattattgataaagatacattcgacgacgtgcaacaacggcttaaaaacaataaaaaagcccctgcaatgcacaggagcgaagacgattatctgctgactactcggttattttgcggtaaatgcggcgcaatgatggtcggcgaaatcggtacaagtcatacgcagtcgaaatatcgttattacaagtgcaatcaggcaaaaaagcataaatgcgataaaaaagccgtaaaaaaagattggatagaagattcggttatcgaagaaatactttccctgatttccaacgatgaggttatcgaagaactttccgaccgcatatatgaaatgcagacggaagaaaatgcggcgatagcggtcgtgaaaaatcaactatcggaagtcgacaagaaattaaataaccttgccgaagcaattgctcagggcgtgttttcttcgacaacgaaaaaactgctcgacgatttggaagaacaaaaaagcaatctcgaggtagaattatttaaaacgcaaatcaatcaccccgtactaacgaaagaacagattcaatttgccttgtatagttatcgcaaactcgacttatcttcgcaagaaggaaaacaacaactgattgacggtttcgtgaacagcattttcctttacgacgatcgctttcttatcaccttcaattacaaagggcaaagcaaaaccgttacgtttgaacaagtaaatagttcgtctttaacttcaaaggggtcaccattcagatacacgaaaaaggagcgttagcaaacgctcctttttcgtgtatctttttgccgtttcggtcttttttcgcttaaaaatcctttttcttcaacttgccgcacaggcgggacgggagtcgcaccccgcccttttttctccccttttgagcttcttattttttccttggagaaacctttctttacgtcgccttaaaataaccctttcagggacggaggcaaaggcgaaacgacagaaatttccttgcccgtaacgggatgcgtaaattccagtttcgacgcgtgcaaccccaatctccccaagggatttttcgttcccccgtatttttcgtcgccgacaatcggaaatccctcctccttgaattgtacgcggatctgattttttctgcctgtgtctatttgtacacgcacaagcgcatattgcgcgctttccttcacgacggcgtaatgcgtaatcgctttttgtcccgacggatcgtgcgtagaatatacgatgttgtttatattttccttcaaaaaggaaacgatagtcccctcctttttcgacggtttcccttctgtcaccgcgtagtattcccgcgtttttacatactcgttccagttcattctcaacatggaatgtacttttatatttttggcgaatatcaaaacgcccgaagtttccttgtctatcctgtgcagaataaacggacgaccgccttttttccgcagatattccaacacgtaagcgaaagcgcattccgcttccttatcgctttccacagacagcagccccgcaggcttatccaccgcgataaaatcctcgtcttcgtacaagatctttagagaaaatcgttttctcggcgcctccgcgctccttccttcctcctctcgtatagggtatttggaaattttcacttcgtcgtcttttgccagcggaaaatcgtgccgtgtggcgacgctgccgttgatcaggacaaaccgtcccgacaaaagcgctttgacgttgtttctcgatgtgccgagcttcgccaaaagaaactctaacagcgctccgctgcggtttactttatattccgccgtatatgtcctgccccagcctcttccgccatccgcagaacgaggcacttttcggcccgcaacgcccttttccattctctctctcgaacgtccgtccgaagctcttttatccgacggcatttcagccctcccgtttattttcggcaaagaggaaaagcaataaaatccttccgtcctcgtcctgtttgatgtatcgccgcatagcataaaacaaaagcccgctgcgtccatgcgatatctatttccttaagtttactataaaaacgtcctatttgtcaagcggcggaaaaaataaaagccgagtttctgtattcggctttttcaactaaaagagaagtataaagcgcgtacgttacacggaacagaaaataccctttcgacctgatatattttataaagcccacgcatttctattttttcagagtacgtccgaattttgcgcgccgtggtctccggccgccgcgtaaaaagtaaacttcaaatccgccgacaacggaatcgtcgaaccgattgcggacgaagtgagttcgccgtaatttaaccccgtaaccgcgcaaaattcacgcacgagactttcctcatattcgagattgatccaaagacaagcgtatttttccccgactgccccgcttccgcccaagctcgcgccgggattttctttggtcgaatttatagtgaggttaagcacattgaagtttgatacgtttgccccgtccgtaaccgtgccgaacaatcccacatgagggaaataggctcttttaccgtctaaaaggacgttgtccgtcacactgcaattggcaatagtgattccgttgccgcgaaacgtgtgacaaaattccgtgtttgcgccgctcaccccgatcggcggaataccgccgtatttggtataagcgctcatatcgataaccttttccgtcagatttaagtcgcttttttcgttatccgtgttgtttttataggcaaaatattcaccccccccccgcgaaggagcggaagcatcgcccagcgtcgaatcccccagcctcggcttaccgagctgaaacgtcgttctctcgttgaaaattcctttatccgtcagatacgcgaggttataaagatgtacgggtttggtaatgataaacacgcaatcggtaagcttaccgtccgcccctatattgataacggaatcggcgtcgaaataggattttaccaccgaggcgttaaaagaagtatctattttaggccttgcaaaccaggccaccgaggaggcgataagcgtaaaaatgcaaacgggcagtaaggcgcagcaaaaaaatatcgttctgattcttttacggacggctatgtttttgggtagttctttctttttcatcggccttcttcctcctttgtcttttcttgtttcaaagcaaaagacgtttataacagataaacccgttttccgctttatgtataaaaatagcgtccttacttttttcaaatttttattgcactgccataacagtatagcataaaataaacggtttgtaaaaggttttgctgaggtctgctccatatatcttagtattgcgtgcgtcgttaagttaaagtaaacaaagccaaagcaattataaaagcacgggaaggttttatcccggacttgatatctattcctttttgtctataaaaagagatacaggcgatttttacgctttttatggagatatcctttcactgcggggcggagcgtaaaccgcagcgcgcctttcggacacagacggatacagcgcagacagcgaatacacttttcgtcgggccttccgttatgcatggcgtgcatcggacaatttatttcacatattttacaatcattacattgagaagagcacgtaatttttacgcccaccctgctgcgccacgcgggaaaaaaatcggagaacggatttttgaaaagcttggggatttccgccttttgcggccgataaatccgctcgattaccggggataaaaaagaattttccccaccgtcaggctcggataaaaagctatgccccgtcggaaccaccgccgcggcaatcacggtaccgcaaacgcaatcggacgcttcccttaaaacatttcccggcgatatgccgccataggctgcgatcagcacgacatattttgcggaaaccgcatgcagaaatccgcggaccggcgtcggaatattttgacaataaaccggaaacacgatcaccgccgtttccgcgccgtaaaaggcggcctggccgataagacagacgggcgcgttcagacgttcggcaatccgtttcgccacgcttaaactatgccccgcgcccgaaaaacaatagacggcaacgctcatacgtctttctccacaaactcgcacatctgccgatactcgggaatttcgtcaaaggaaaaccccaacaggttttcgatttcgtaagccgcttcctcgcgggtaagattacgttttcgggtcgctagagaaatttctatggcgctgaaagggatcatttggcttttgcattgataaaaacgctgaaattgcgtgtattctttgcacttttcgatattacagctcgtatgtaatccccttcccgattcctccggcgccacccagccgcattcgccgattaaaatttctttcacggaattccaatcgtaacggccgccgcaaatacggtcgaaatcgagatggacaaaggcggggatatttccgctccgggaagatctgcatatcgcgccgcgcaacggcggcaaaaagagcggctccgcatgaattgcctccactacgttttcgaccaattcattggaatagggcaatcgatttttcgagccgccgccatacgcaagcttccgcatagtagccagcgtatgaaattgtcccctgcgaagcggcggatgcaacgttaagatacgtccgatgttcacaataatctgcaaggccttattatccgcgaaagaataagccattttcggcgccatgtggttgtaatagagccccaacatctgcaccggctcgtttcccgccagaaaatacggcacgcggttggccacaagttcgggataaaacagaacataagccaacgacggacacgcgcaggtattgccgctcaaggcgaaaagcttccgatatacccgacgcagatcctcgcggctgacggtacgggagataaattccacatttgaaaatgcctttttcgcgttttcgacgcttttttttgcgttttcggacataaacggaatttcccacgtcatggcgaggactcgcagcccctttactttcgaaagataatacagcataaaggcggaatccttgccgcccgtataaaataatcccgcgtcgaatctggagcgtttggagcgagggatttcctccatcagcggcacgatgcttctcagattttccgtttccttttccgtctgacacatcgggcatcgtccctgcgcgtcgaattccagccccggaatgataaaatcgttggccgcgcatttggtacagaaagtcgcttccttaacagaacggggcgtcttacgaagctcggttgaaagaacgacttgcgttcctaaaagtttgccgagacattttttctcgcgtttgttcaggtctttgggaagcgaggagataaccgccgcttgacggttggtcaattttatccgattacggaacatattttctttgtttcgcaagccgtaatagagcagctgcttatcggaaagaacccatctgttttgcaaaatatacatcccttttcccccgtcagttttccatacgtattatatcatagccgccgccaaaaagcaatagcggcaaatgaaaaacctatttccaaagatatattgtgacaaaaaagccgtccgcataaacgcggacggcttttgttcgtttttaatttatcgtccttttcccgccgaaccgaacaatcggattttcgtctttacggcctccttgatcgtacgtacctttaagcttctcgtttcgagatagcccagctccttttccgtcccctccttcatcgccttatcgcccgccagacacaggtcggtaaagatatttacctttgcgatgccctcgcggatcgcgtttctgaaatcgtcgtccgaaagtccgcttccgccgtgcagcaccaacggaacgcccacttttccgcgtatttctcttaagcgatcgagattgagcttcggcttgctcctatagacgccgtgcgccgtgccgatggataccgccagggcgtccacgcctgtcgcggcgagatattcgtttgcctcttcgggcgtcgtgtagagggcatcggaaagattttcgtccgccgcggcgtcccccacatgtccgatctccccctccaccgtcgccccgaaggaatgcgcgatttttacgatctcccgcgtttccgcgatattcgtttcgcgcttctttgccgagccgtcgtacatgaccgacgaaaagcccagcttcaacgcttccatgcaccgctcaaacgtcagcccgtgatcgtaatgcacggcgacggggaccttggcgcgctttgccgcctcgacgaccgacggcgcgatcagctttaattccccatagggcagcagtatctccgccgtgccgatcacaatcggcgaaaccagctcctccgccgcctctatcgccgcctgaagcatgtccgtgtcggtggtattgaacagccccaccgcatacttttcccgttgcgcccttttcaatatcccgtctaaatttacaagcatatctttttcctttcaaagtttttgcagagctctctcacctgcgcttcgcttttcatgccgctgacggaatccgtcccactcaacgcggcgacggcggcagcggaagcgaaaccgaggatttccgaatcgcttttcccccgataaatttccaaaaggcaccccgcgcaaaacgcgtctcccgcgcccgtcgcgcccgcaataaagccctgcggcaactcgtacgaacccaaagccgaaaaaccgttttcggacaggcagagcgacaattcgggcctatgtataatcactcgttcccttaccccgtattctttcagcctttgtgcgatttgccgaagattttcgttttcgggagacgtctgcgccagcagccccgcctccgcctcgttgatgatgaggttgtccgtatagggcaggcaggacaatatcgtctcatacctgcccccgcttcggctcaccagatcgatcgaggtttttataccgcggcgctttgcttcctctaaaattttcagtccgtccccgcggtcgatccgatcgaggagaagaaaataacccaggtgcagcatttttgcgtccaatccgtcaaaatcgacgtcctcccgtccgaaatccgcacttgcgcccgcataggtgaaaaaggtccgttcgcccccgcgcacgctcatcacttcggtgaaacttgtggctttgccgtccgtcgattttataccgtcgatttccaccccgcgtgcggataattcccgaaggataaacgccccgtccccgtctttgccgatttttccgagcgcgcacaccgacaacccgggcgcaagcgttttcagatcgattgcaacgttgggcacgcacccgcctaccgcgcggcttacggcggagatttccgataattctcccgcacggggatatctttctatctcgttgagcttatcgacgaggaggctacccgccaccgcgatcccgtccatgtcaattgacgtcgggacagagcggccccgccagctccttcaggaaaaacagctttccgggaagggtgggaatatagcttgaggggacgaaccgcgtcggcccgtaccgcagcgtcatccaaaagctcatgccctgccactgcatgccgcgggaaaacgcgccgtccgcgccgccgatcgcgtaatccgcctcaaacaacagcgcggggccgaccgtattcgcgcggcagggcacaaggctcgtacggcttcgaaacgacgtcagcgcgttttgttctatcgtcagcgggtgcaattttgcgccgagacggtaaggctgcttcagccattccttatccgtttcaaactccgcgccgaaatgcggctcccaaaacgcgatatgacacattctgcctatgccgtaaacgaggacgagccttgcgcccgcctttttcagcgcggcgattttttcgggataggtcggaaggttctcccttgtcgcaaaatttctttgggcttcgggaacggtcagcccgcccaaaggagtgtaaaatgccgtttccatggcgttttggaaggaggcttcgcccgtaatcgtgtttccgtccccgtccgaccattcgtccatgttgaaacaccatacgttttcgcaggattcgttccattcccttaagaaatataccgcccatctgtacatgcccatcggccccacgggaagaataaacgccagcttccgcttctccgcgttcgcctttcgtatctcgttggcaatctcatgccccatttttacatcgaattccgccacgtcgccgcactgcacgggcataaaatccttattccagaagctttgccgctccgtcgccgcttcgggcgcgtgcgcacagcaggcgtcgatcttttcaaaatcccagccctcgggataaaagccctccagcaggctgccctttaccgtcgaattaaaatccatttctttctcccttttgcctcgttacggcaacaacctttttgtcgttccttttaagtacgcccggcattggcgaaagccctccgcatatgccgcgccgcactgatacccgcgatatttcgaacacgtctttaccatgtccgaaaagtcgatcccgtcgtgttccttcatccagaccagctggctttcgtgacagttgagcattttgagcttcagcccgatctcggcggaaatatccacatattccgtcggctgaaaatcgacgcctgcaagagtgtccatataataaatcggcaccaaagcggccgccttttcgtatccgcttttgtaattgggcaaagtcgccgcaaagctcgcgtcgaataccagccgcgacaccgccgtgtggtcgggcatgtaatcgtcgggattatgcgtgatgataaaatcgggttgcgcatatttgatcacgtccacgagcttgtcccgcgccgccttgttgccatcgaaaatattcagatcgtcgaacattccgccgatcacctctatccccgccaagccgcccgcctttttcgcttcctccgcccggattgtcgtcagctcgtcgggcggaatgactacgtgtcccaaatttcccgtgctcgcgtggcagacgatcactttgtccccgcgcttcacacattttgcaagcgttcccgaacacgcgatctctacgtcgtcggggtgcgcccctatcgccaatacgttcatgctttttctccttgtctttacgcttttattttataacagcgcaccctcgattacaatggcttacagtctccaaaaagagtaaaatagtctatttgacaaatttatttttctatgctatactttttttatgaaaaaatatttcaagcacaaattggaaaatcttctcgtcatcgacaaaatcgttacgatccattatttcgaatttgataaaaattttaagtccaaagtcgaagcgcacgatttttgggagcttgtctatgcggacaaggaggatattctctgtaccgccgacggggagacgctggttctgaaacagggcgagctgctgtttcataagcccgacgaggttcattcgctggccgcgaacggaaaaaacgcgcccaacgtctttatcgtctctttcgaatgtaaatcggaggccgtacaatttttcgggcataaaaaaatacgccttgaaaaggcgtacgtcaaatttatttattccattatccaagaggcgaaaaggacttttgatatcccctattccgaccccgaactgaaaaagctgaaactgctttcacgtcccacgctgggagggcagcagctgattaaaaattatctcgaaattctcctgatcaacgtcatgcgttcgctgacggagacggagggcggaaatcccgtctttttacaaaaggacgagctcgaaaacaggctcgtcaaagacgtcttaaagcttttaaccgcaaatctctgcggcgtcctcaccatagacgagatctgcgagacggtgggctacagcagagcgtatgtctttcgggagtttaagggcgcgacgggcaaaagcataatggaatatttcaccttcctgaagatcgaaaaagccaaacagcttttgcgggaaaacgagttgtccgtcaaggaaatcgcggacgcgctggctttcgacaccccgaattatttttcaaaaacctttaagcagctgacggggcaaacgccctcctcctacaaaaagcacagcttctttcagtagaatttttacagtccgtactatccccctcaacgtgaataagccccgacgaaaccatgccttcatacaaaaaccgcccgcaaaacgcttgcagacggcttttatattttatctggtcataatctcctcaagcgtggaacaggcggacagccctaccgcgcccgacagggagggcggcacacttttcccgtaaccgaatatctaatgttccaaacgattcccggacgtattgaaggaaagattttcccgggcattttgtccttccgctttcaggagaccgtatttcgtttcggccgccgtttcataattgatgcttttgcgcacggcggtattgcacttcgggaaactcgcgcgagaacttttcctctacctctttatgcgatttagtttataacctttattttttaattatatcactcacattttcgtttatcaatagctttttcgaaattttattcgaaaaattttttcggcactttttgcacgaaaaaagccccattttgagggcttttaacgttacattatccataaaaagggaaaatttacaggatatctatgcctttgcttttacactttttaagcgtttccgccgtccaataggaggcttgaacctcgccgatgtgcaacttttcgagaagaagcatacacagcctcgactggcctatgccgcctccgatcgtcaagggcagcgttccgtccgcaatcagacggtgatattcgtacttcatcctgtcccgctcgccggaaatttccagctggcgtttcagggcctgtgcatctacccgtacgcccatggaggaaagctccagcggctgtcccagagtatcgttccagaaaagaaggtccccgttaagcgaccaatcgtcgtaatcgggcgcgcgtccgtcgtgtcggtttccgctcctcagcgcgccgccgattcccatcagaaatacggtgcggtatttctccgtcgcggcgcgctccctctccttcggcgtcaaatggggatagacgtcctccagctcctgcgcggtgacgaaataaacgtctctctccaacgtccgcgtaagggcgggatacatgcgcttgatacgattatgcgtatcgacgaccgcatcgacgatcctctgtacaatcattttgagaaagtcaaggtttcgttcttttgaagtaattaccctctcccaatcccattgatcgacaaatacggaatgtaagttatccatatcgtcgtcccgacggatggcgttcatatccgtatagagaccctcgccgggaaggaagccgtagcggtaaagcgccatgcgcttccactttgcgagggactgaacgatttcgcagcgggcgtccgcctccttcaaaccgaattcaaccttccgctcgacgccgttaaggtcgtcgttgagtccgctcgccttttcgacaaacagcggcgcggtgatcctttcgaggttcagccgttccgcaagcgaacgctcgaagatgtccttcacggccttgattgcccgttcggtctctcttaagctgagtacggaggcataaccctcgggaatgatcagatctttcatgctatctctctcccttgatattgcgaaatataaaactcttttgcggctccttcgctatttcgcgccgcatgctttgcccgccagctccagcgttcgccgataagaggcctccgcggcggaacgcacgatctcggccaaaccgtctttttccaagctttttacgccctcgatcgtcgtgccgcccgggctgcatacttcttttttcagctcgtcgggcgcctttccgctttccatcgccaattttgccgaaccgaatacggtctgttcggcatagagaagcgagcttttctcgtccagccctaacgaaacgcccgcgtccgcaagcgcctttataaacatgaatacatacgcgggggcgcagccgctgataatgcttgcggcgtccatctccgcttcggatatttcgtgtgttttccctgtaaactccagcgcggaaacgagcgtttccgtctcctctttcgtcgcggaggaattggccgcatagagcaccatgcccgcaccgacggaaacgggagtattcggcatgatgcggacgacgggtacctccgccccgtatagttcggcaattgcggccgcggacagtcccgccgccatggatacgagaataaaacggccgcccgttgccgcgcgcgccctcaatacaggagaaatttccgcaaacagttcgcgcatgccctgcggcttcaccccgagaaaaatatagcggcaggaagaagcgatttcctcattagtcgctaccctgccccctgtctttgtagcaagggcttccgcttttgcccgcgtgcggttggaaagcatcacctcgtcgggggaaagcctgcggcatacggcctccgccagcgcgccgcccatatttcccgtcccgataaatccgaacaattccattttatgctccttattctctgatttgtccgtcgccgacaatccgatacagataactcgtcaactccctcaagcccatgggaccccgcgcatgaagcttctgcgtggagatacccatttcacagccgagcccgaactcgccgccgtccgtaaagcgggtggaagcgttgacatagacggccgcgctgtcaacaagggacaaaaaggccttttgaacctctttatcctcggcaatcaccgcttcgctgtgccccgtggagtgacggtcgatatgctccgcggccgcatatacgtcgtcaacgacggcaacggctaaaatataatcgaggaattcggtatcgaaatccccctctgccgcaggaactccctccgtcagcgccgccgcgcggccgtcgagccgcagctgaacggggatttttccctcatgcaggcggtcgtcaacgagcgtctttttcagtttgggcagaaaggaagccgcaatttctttatgtacaaggcacacctccgccgcgttgcatacggagggacggtcggtttttgcgttttcgacaatcctcagcgccttctccatatccgcactcgcatctacgtaaatatgacagattcccgttcccgtttcgatacacggcaccgtcgcgttttccacgcaggcacggataagccccgcaccgcctcgggggatcagcagatcgacaagcccgcgcgcccgcatcaacgtttcggcccccgctttcgaggtatcgtccagaatgttgacgagctcacgcggcaggccgcacgcttcaagcgcgcggcgcatggccctcacgactgcgtgagaggactcaaacgcttccttcccgccgcgcagaatacatacattgccgctctttaagcacagcgccgcggcgtccgaggtcacgtttggacggctttcgtaaataaccgccacgacgcccatgggcacggatactttttcaatcgtcaagccgttggggcgtacgacgcgctccaaaacgcgccctgcgggatcgtcgagcttcgctaccgcgcggacgccttccgccatagcggcaatgcgctgctttgtcagcgtcagacggtcgagcatgacctcggaaacggttcccctcgcccgctccacgtcggcacggttcgcctcgaggatacgctccgtatcttcgaccaacgcatccgccatagcgtacagcgcctcgttcttcttttcgcaatcgagacacgccgcacggcgcacggcgcctttggcatccgataaaatctcttccgtccttttcatttcgtctcctttcccctgccgaaaaatcttgttccgaagggcagaccgtccgcaatattatataaagccgacggacgcgagccgttggcgatgatcatatcgatccccgaccccatagcgatcgctgccgcgtgaagctttgttttcatgccgcccgtaccgagttccgacccctttccctcgcccagagcaagtatttcgggcgtaagggcggacacctccgaaaggaacgtcgcatcgggatatttgtgcggatctttggtgtataagccgtcgatatccgacaaaaggacgagcagatccgcgccgacgtttgccgcgacgatcgccgccagcgtatcgttgtcgccgatgacgatttcgtccgtagctaccgtatcgttttcgttgacgatcggaaaggcgcccagctccagcagacggaaaacggtgttgcggaaattttcgcatcgcttttcgttttcgatgtcctcgcccgtcagcaagatctgcgcaaccgtgtggttatagcctccgatcagtttgtcgtaggtgtacatcaattcgcactgcccgacggccgcggcagcctgtttggtggggatatcctcgggacgggatttcagccccagctttcctacccccatgccgattgcgcccgaagaaattaaaataatctcgtttcccgcgtttttaaggtcgcacattacccggcaaagctcctcgacgcggcggatattcagccgccccgtcgcataagcgagcgtagaagtgcctattttgattacgattctcatacgttttcctttacagagcggacaacaccgcgtcgccgaacgcctccgcttttgcccccgcggcagagccgtcgcataccgcgcgggacgccgcttcgtcgagggcgcgggaaagcctttcgctctctttgacaaaccctatatgcgcaagcagcaacgcttccgcgcgcagaatactttcgggggaggcgtattcgcccagcccctccgcgaccagacggggcgcgctgccgtgcaccgcctcgaacatcgcatacctcgcccccacgttggcgctgcctgccgtaccgacgccgccctgtatctgcgcggcctcgtccgtgatgatgtcgccgtaaagattgggcaggacgaagacctgaaacttttgacgtatctgcccgttgagcaggttggcgcacataatgtcgatataataatcctctacgacaatttcgggatagtctttggccacctcgcggcagatttccgaaaatttgccgtccgtctttttcatgatattcgctttggtgacgatactgacgtgcgttttgccgtttttcctcgcaaagtcaaacgccgcgcgcgcgatccgcctcgtgccttcgtctgtaatcaccttgaaatcgaacgctagcacgccgggaatctccacgcccgaactgcccaaaacgtattccccctcggtgttttccctgaaaaacgtccagtctatccccagttctttcacccgcacggggcggacattggaaaacaggtcgagctctcgcctcagcgcgacgttggcgctttcgagcgtgccgcccttgggcgtttccgtggggcctttcagcaaaacgtcgcatttcctgatttccgcaagcgtatcctcgggaacggagacccccaggcgcagacggttttcgatggtgagtccgcttatttccttcagctcaaccctgccccccgcaatctgttccttcaacagttcgcaaagaactcttttcgcctcgcgcatgatgatcgggccgatgccgtcgccgtcgatcagccctatccttatttttccgtccgccctcttttgcgcaggcggatttttcattttttccgcgcgttcgcattgttcggtcaataattttctgaatttttccacagcggcttcgatcgcttccattcggcttatacccccttggtgtaattgagcagaccgcccgcgcggagaatattgtacgtccgctccgtcagtgcacatttgagccatatcgttttgccgtttgtcaaatcgacgaccttcacgcggcccttttccaaagacgcatgcagattttcgaaagcgagttcatccgaaagggatatcgcgtcataatcctccgcgttttcaaattcgagcggaataatgcccgcgttgacgaggttggcaatatggatacgtgcaaagctcttggcgattaccgccttgacgccgagatacatgggcacgagcgccgcgtgctccctcgacgaaccctggccgtaattgacgccgcccacaatcacgcttcggccgtattctttcgcccgcgcagggaattgttgatccactgcggaaaaacaaaattccgacatatacggaatgttcgaacggaaaggcagtatcttcgcgcccgcgggcatgatatggtcggtggtgatattgtcgcccgttttcagcgagacttttaccgtcatttcatcggcgatcgggtcgtttacggggaaaggcttgatgttcggcccccgcaccacctcgacgcgttccgcttccgcctcgcctgcgggagaaatgaccgcgctgtcgtcaatcttaaacgcttcgggcatcgtaaccgagatttctccgccgaacgacctcggatcggtgatcgtgccgcaaagagcggataccgcggccgtttcgggagaacataaataaatctgcgcgtccttggttccgcttctgccctcaaaatttctgttgaacgtgcgcagggaaactccgccggagttaggcgaaaatcccatgccgatacaggggccgcaggcgcattccaaaagtcttgcacccgaagcgataatatctcccatcgcacccgattccgccaactgcaaaagcacctgcttcgagccgggggaaacggagacggaaacgctgtcggacacctttttgccgcgaaaaatcgccgccaccttcagcatgtcgtacagagacgaattggtacaggagccgatacacacctgatccaccctcgtccctttcagcgagcttaccttcaccacgttgtcggggctgtgcggcatggcgatcaggggctcgagcgaaccgaggtcgatctccaccaccttatcatataccgcgtcgggatcgctttgcaaagccacgaaatcctccgcccgcccttgagcggccaaaaattgttccgtcacctcgtcggagggaaaaatcgaagtggttgcgccgagctccgcgcccatgttggtaatcgtcgcccgttcgggcacagtcagtgccttgacgccctcgccgccccattcgacaatgtatccgacgccgcccttgacggaaagcaggcggaggatttccaggctgacgtccttcgccgtgacaaacggacgaagctttcccgtcagatttactttcaacattttgggcatcgtgatataataagctcctccgcccatcgcgacggcgacgtccatgccgcccgcgccgaacgccagcatacccagcccgccgcccgtcggcgtatggctgtcggaaccgatcagcgttttgcccgggataccgaagcgctcgagatgcacctgatggcagatgccgttgccgggcctggaaaaataaatcccgtgcttttttgccgccgtttgaataaagcggtgatcgtcgggattttcaaaacccgtctgaagcgtgttgtgatcgacgtaggcgacggacttttccgtccgtacgcggtcgatgcccatgctctcgaattcgagatatgccatcgtgcccgtggcgtcctgcgtcagcgtctgatcgattttgagcgcgatctccgcccccgccttcatctctcccgaaacgaggtgcgccgcgataattttttgtgcgattgtctgtcccatattcttcctttacgatttattatttgttactatatttatataccccgcaaaaggggccgttactcaagcgcgaggcttaaacttttccggattgatcgaagaaagcatttcttccagttcgctttccgcgattgtcgaagccctgcccccttcgtatatttcgtcgagctttttcttaagctcgataaccgcgtcctcgcccttcatgacgagatcgtcgcctttgaacccgtagtggtggttgatccagtacgcgatccccgcgaggccgctgttttggcccagcatgacgcccgcgctcctgcccaaaatctttttcgtgtcgaaaatattgtaaatgcgttcgtccttcatcagtccgtcggcatggattcccgcccgcgtcatattgaactgactgcccacatagggcgtcatgggcggaatatcgaagccgataacgtcgcggtaataatccgcgatctccgtaatcaccgtcgtatccatgccgtccagcgaaccgcgcagggaagcgtattccagcaccatggcctccaaaggcacgttccccgtcctttcccctatgccgagcatggaacaattgaccgcgcttgcgccgtagagccaggcggtggtggcgttggccacggccttgtgaaaatcgttgtggccgtgccactccagacggtcggaggtaatgcccgaatagtgctgaaggccatatataatccccgcgacgcttctggggagcgccacttcggcaaacggtacgccgtaacccatcgtatcgcatgcgcgcacctttacgggaatccccgcctcctcggacaccctttccagctcgttgacgaaaggtacgacaaacccgtaaaaatccgcccgcgtgatgtcctcgaggtgacagcggggaacaattccaacatcgaaagcgtccttgacgatacccaggtatttatcgagggcctgttttctcgtcaatcccatctttttgaaaatatgataatcggacgcgctgacaagaatacccgtctccctgatgcccaggctctttaccagcccgaaatcctcctttttcgccctgatccaggtggtgatttcgggaaacttaagccccatcgactggcatttctcgatcgcctccctgtcctttttgctgtaggcaaaaaattcggtctgacggataatccccttttccccgccgagacgggagagcagacgaaacagcgaggaaatttcctccaccgtatagggttccctagactgctgtccgtcacgaaaagaagtatcggtgatccatatctcgtcggccatgcccaaaggcacgcgcctgtgattgaacggaactttgggcacctccgcgtaatcgtatatttccgaatagagattcggcttctccacatcgtgaagctcgtatttataagacctctgttccaacagatttgtttttttcgatctttccagcatagaaaatcctcccaagactgtgcgcgggctttactttctgcgccgcattatccgcgcggcgcgtaactcccgctatggcgaacggccggaaacgctccctttcggaacctccggccgcccctctttatcccgcttctccgagataggcctttttgacgctttcgttggtcaaaagctccctgcccgtaccttcgagaatgatatttcccgtctccagcacatacgccctgtttgcgacggaaagcgccttcttcgcgttctgttccaccagcaagacggtgatcccgctgtcgtttatcttttttatcatgtcgaaaatctgatttacatagagcggggaaagccccatgctcggttcgtccagaagcagcagcttcggatgcgccatcatcgcccgcgccacggccagcatctgttgttctccgcccgaaagcgtacccgcgacttggttttccctctccttgagaatgggaaaaagggaatacatctcctcgcgggtgcgcgccgtttccgttttatcttttcgcgtaaacgcgcccaacgtaagattttccttcaccttaagctcctgaaaaatccttcggccttcgggaacctgactcatgcccagctgcacgatcttatgcgcgggatatttcgtaatatccgtccctgcaaactctattttgcccgcctcggaggaaatcagccgcgcgatcgcgtgcatggtggttgtcttacccgcgccgttcgcgccgatcagcgcgacgatctcaccttcctcgacgtgaaaggaaattcctttgattgctttgataagtccgtaagaaacctcgaggttttcgacgttgagtattgccattttattcacctccgagatatgctttcaccacttcgggatcgttcagcactgccttggtatccccctgcgccagcgtctggccgaaattcagcaccgtcagctcgtcgcagatgcccgaaaccagcttcatatcgtgctcgatcagcaggatcgtcaggcccatttcgtcgcgcagcaggcggatcgtatccatcagctcccgcgtctcgttggggttcatgcccgccgcgggttcgtccaagagcagaattttcgggttagaggcaagcgccctcgcaatctccagcttccgctgcttcccgtaggggaggttggacgcaagatgattgcgttccttttccagatcgaacacccgcagcagctccttcgccctgtcccgcatcgctttttccacgcggaaatgcttggggagccgaaatacgctctcaaaaaaattacagcggtattccttttgattgtgcatgcctaccaatacgtttctgatcacgctcatgttattaaacaggcggatattctgaaaggtacgggccattcccttgcgattgatttgaatcgcggaaagccccgtgatgtcctctccgcacagcccgatggtgcccgacgtcggcttataaacgcccgtcagcatattgaaggccgtcgtttttcccgctccgttcgggccgatcaggccgtaaatctgcttctcttcgatgcggatattcaagttttccaccgccttcagcccgccgaaggcaattccgagatttttcgtttccaatacgatttccgacatttacttgtcctccgcgccgagatcggtcggctcttcactttcgcgccgcaaatcgacggacaaaatctcgttcatttcaatcttggtcgggatttcgctccagtcggcaggatcatcgacgatttcttcctccgggcgttcggggttctttttccttatcctggcgatcaacttgcgaagccccgcggaaaggaagctgcccagcgtcttgaagctgaaacggttgcggaactttttaagcgcgggcgcgttgttgacgatgacgatggaaatgaggatcagcgcgtaaatgatattgcgcatcgccgaaagattgctcggcaaaaccagcgataattccacgtcgaggtaggtaagcgcggccgcggcgacgatcgagccgttgaggcttcccaaaccgcccaaaaccaccatgaccagcatttgtatagaataattgtacgaaaacgcgccggacttgatcggcgtaacgccgtggccgtacaaaacgcccgccacgcccgcgaaaaacgccgcgacaacgaataccaacagtttataatacgtcacgttgatgcccgaagcgcgcgcggcaatctcgttgtcgcggatcgcggtaatcgcccggccgtgcttgctgcggataaagttttgcacaataaacagcatgaaaatcaatacgacgaaagagacgacaaacagcgagtcggaataggttttcaccgacagcccctgcggccctccaaacgccttttccagcggctgggagctcaacaccgtccgaatgatttccccgaacgccagcgtgacgatcgccaaataatcccctttcagccgaagcgcgggaagcccgataatcagcccgaacacagctgcaaccgcgccgccgactatcagggaaagaatcagcgtaacgaggggaacgggaataaatttccccagcaggctgcccgcgtaacagccgatgattgcaccgacgtacataaagcccgcgtgaccgagggataattctcccaaaaagcccacgacgagattgagcgataccgccagaatgatgctgtaagcgatctgatggagcaaacgcgccgacgaacgtttcatattgcccgtataatacagcaccgcaaacaggacgagcaggacgccgaggataagaaaacacatatagtttttcggcttcaatacgatctttcttttcgttaacgttttttccgtcatatcacaccttctcgctgcgttttacgcccagcagccccgtcggcttcaccagaagaatgagaatgagtatcccgaattcgatcgcggtcgtaaagggactcaacggcgtggcaaggcacaatttttccaccaatcccagcaggataccgcccagcatagcgccggggatagaaccgatgcctccgataacggccgcggtaaacgccatgatgccgggaagcgcgcccgtcgtaggcgtgactgcggggatttgcatgagataaaacataccggccacggcggcgagcgcagaaccgatgataaaggtgagagaaatcaagcgattggcgttgatgcccatcagctgagccgcgccgcggtcctcggaaagagcgagcatggcctgccccgtgcgggtctttttgatgaaaagcgtcagccccaccattaaggctacgcccacaatcagggtaaaaattgtagaatacgtaatcgtcagtccgcccaacgcgaagctggccttgccgtttattgcaatcgctacgttgacgttttttgtccccgcgccaaaagcgacctgcgcgaccccttgcagaaaataactgacgccgatagccgtcagaagcaccgcgagcggcgacgcaccgcgcaaaggcttataagctattttttccacggcaaaaccgagcagggcgcacaccgctaccgcgaagaaaaacgcggcgatcggcatgttccaccatcccaaaaagacaaaaacggaataagcccccaccatgatgatatcgccgtgcgcaaagttcagcattttggcgattccgtacaccatggtgtatcccagcgcgatcagcgcgtagatactgccgaggctcaacccgttgatgagggcactgactatattcataatatctcctatattcttcccataaacgccgataacggcgcaattttataaaagtaagcttttcaaaagcggaagcgggaaaaggactcttttttcgagccttttcctcgccgttgcctcgtcaggagagcttgacgataaccggttcttttgcaggcgcgcccgaagcgtcccaggtcatgccgcccgtggtgcccgtaaagctgaaatcgtccgcactgatcgtcgtctttaatatctcgcaaaggtcgctggcagaaatttttacgtccttgacgtccgcctttttcattgcttcgtaaagtacatacaccgcgtcgtaaccgtccgcagcgaattgatcgggcgtcaccttataggcttctttataagccgcgacgaagttcttggttttttcgtcctgcgcttccgcgtcgaacggggtcatataggaaacctcgccttcaatatcggctattttattatcgacctcaagcaacgccttcagtccgtcaaggccgtcgcagccgaagaaatcgggctggtagctctgctttaccgcttctcggataatcagattcgcctgcgtgtaatagataggcagatacaccacctcgcagcccgcgtttttcagatcggagacctgctgggagaaatcgacggcggtttcggacgtaaaagatttttccgtcacggcgattctttctttcgtcttgacctgttccttaaagctcgcataaattccgctggaatacgtatcgctcgaatcgtaaatcacgccgattttggtatagctttccgccagcgtatcggcggaaataattccctggtcgggatctccgaagcaaatgcggtaggcattgtcgtcctgtatagccttcgccgaggaggcggaaggcgtcatgaagaacatattatctttcttcgcttcgtttgcaaaagcctcacaagcgccggaggtcaccgaccccagcgaaacctgcatccccgcctcataaagcgcggtatagccgtttgccgcttttgtagcgtcggcctcatcgtccttcatatcgaaataaaactcgtatccgttaagtccgcccgccgcgttgatctccttcacggcaagctcggcgccctgcttgacggaaattccgtagctggaagtgtctcccgtcaggggacccgtggcgccgataaaaaatttgttctcggcgggatttttgccgcaggaagcgaaggcggccacgctcatcgcggcggccattgctgcgcacatagctttgattgctgtctttttcatgattttatatctcctaaaattttttatacttgtggcaaatataacaataaagggatcgttgtatttttatcctgcaacaatccctttaccgatggaaaaaatatatggaatacatcggaactcgtcgtcctcgacgtttccttatgcttcggcgttccgtcaaatgctttcaattgacgcttagtcgaaaaaaccgccttatattctttccgtcagcttctacgtcgggtagtatccataccgtaatcgacagcaaaagctttttgccatatactttcatttctattttcctttgaaatccgttttattttggagaacgtctgtccttgaaattatttcttattattatactatacattatttcaaaacacaagcgtttgaaagaaagttttccaatattatctataagaattatttatatataaatcgtatgtatcgatttaagttatatctattatccatttgtccgattgattgtcgtcttttatgcgttgctttttgccaagcattagcgccgtttattctcgccgcaaaaatttactttaatatagattatacatttataccgtataacaagaagcgacgaaatatattttcaaaattttccgctccgcataaaatgtttttgaaaacttttcaaaaattcaatatgttgaaaggttttgaagcgttaaaataatacaatttaagggaagattttacataggagtatttttatggaacttaatcaagccgtttcgcaacgcatcaagaagcttctca

SEQ ID NO: 3467 - DNA, 32759 bp, Unknown
  16S sequences of unknown bacteria
aaattttttcaatttccttcttcatttctcttgacttttatttgcaggtcttatttttatttctattttatctttgcttccattccgtccttaaaaaggcggtaagcgcatacctgtatagggcgtttctctatttgtcccgatacgtacaggcggatataattttccgaatacccctcggtatatccgtttgaaaagctttcggggaccagctccaacgtatttccgataaacctttccatatatttcctcttttcctcggctcctttttccaaaaggcggttcagccgctctttctttacggcatacggcagttctttatatcgtttataggccgccgtaccctctctcggggaatagggaaaagcgtgtatttgagcgaatcccgcttcctccacgatacgcagggaatcgcaaaaatcctcctccgtctccgtggggaaaccgacgatgatatccgtggtaatcgccgcgtcggggaaacagcgatagatcatctcgcacttttcgagatattccgcccgcgtgtaatgtcggttcatgcttttgagcaccttatccgagccgctttgcaaagacaaatggaactgcggcgcaaacctctttaccgacttcgccgcagataaaaaccgctcggtaatgaggctgacttctatcgatcccaagcgtatcctcgtctccgcgtccttgaccaacgtcaataaatcggctaaatcccgtcccttttcgtcccgataatcggagacatctatgcccgtaatcaccgtttcctgcgcgccgcccgacaagatttccgccgccgcgctctccgccgccctcgagcggctgcggccgcgcagatacggaatgacgcaataggaacagaaacggttgcagccgtcctgaatcttgacgaagctgcgggttttgagacattcgggcgcaggcagctcctcatatcccgtatcttcggccccgacgtgtacgccccgccattcctccgaaaagcccgaagccgctatctcgaggatttttcccttgcttctcgctcccgtcacggaaatcacgtttttccgttctgcaaaggcaagcggatttttttcggaggcacacccgcagaccagcaccttggccgtcggattaaatttcagggctttggagatcgcctgtcggcttttatgctccgcctccgccgtgacggcgcaggtattgatcacataaagatcggcgctttccagctcccgcgagacggcgtagcccatctcctccaggccgcggatcagcgacccgctctctacgtcgttgaccttgcagcccagcgtaaacaccaccgccttcatgcctttctccccaattcgcccagcgcaaacatagtcaccgccgtcagggccacggccgccgtttccgcccgaaggatacgctttcccagcgtcacggaagcgaaaccgaactcctttgccgatgcctcctccttccgcgaaaagcctccctcgctgcccacgaccagagccgtgcttcccgaaagggaggaaatatccgcttcgctttccgccgcaaactcgcacgcaaacagcttgtttttatactcctttaccgcagacagcgcgcttttcagatcgccgcaataggcgacctcgggcgccacggaacgcagacattgcttcgccgcttccctggataccttatttaatctttccagcttgttttcgttcatgtatgcggaggaaaattccgaggaaaacgcgatcagctttttgacgccgagctccaccgctttctgtacgataaattcgtttttatcggcgtttttcagatatccgaacagcagcgcaacctccgtcgccgcttccctgtccccctcgttttccttcaaaacgtttaatctcatccgccgcttttccacggctgcgatcactgccgaatattcttttccgctgttgtccaaaaggattacctcgtccccgacgcttaaacgcaaaacgtttttcgcgtgttcgaattcctcgccctccagacagggttcctcgccgatcgattttacaaaaaaccttttcaccgcagacatgtcacgcctctttgtgctttaagaccagcgcaaaccattctcccttgcgccgttcccttactgcccgcatgcccacctcctcgtaggcatccttgaccatggaaagacggctttcgataatgccgctcaggatcaaaacgccgtctttcttgagatttttagggatagagggcgcgagcatcttcaaaatttcgcccgtgatgttcgccatcatgacgtccccttgaatgtccgtatcgtccaacaggttggaatgagccaccaccgtcttgtcggcggtgccgttcagctcgctgttgtgcgtggcgctggaaacggccacataatcgatgtccgtcagataggccttttttgcgcccagctttacggcggaaatgccgagtattccgctcccgcagcccacgtcgatacataccgaatcgggcgtcacgtattcctgcatcagctccacgcacatggacgtcgtttcgtgctcgcccgtgccgaaagccatattcgaatcgagcagaacgatcttttcgtcagcttcgggcgtatagtctatccattcgggcacgacgacgatacgtcccagccgaatgggccgaaaatgctttttccatacgtcgatccagtcgtccccgtccacttcgcgcttggtatcctccagcgttccgaagggaagcgcgccgccgctcatttcctttgcctccgccacgtcgcgcataatctccccgacggttttctccgcaatgtcctcggcaatatagcactttaccaaaacgtctttcggctgagccgccgtcaaatcgtcgtccatataatcccaatacatcgtatccttgcttttttgcagagcgatgatatcgttgacgtcgcagatcgtgacgccgtagttggtataattccacatgatgtccgcaatgatttcactcgcttccgtcgtcgtatgtacggtcaattcgataaatttcataaatacctctttgtttattatatcattaaccgaagcaattttcaacctttccgcgcaaataattctccgcggcaaacaatttcttttcgaaaagcgccgaaaaaccgtttgccctcctcttagcgttatgctataatagaagcggaagagcggaagcacgaggtatttatcggcatttccgcgctctgctcaagcggcggcgaaaccgtgtgcttacacaaatatttccgcgccccgtccatacatagccgtgtctatgtcatgcgcaggcagtcttcacaagaacagaccgaaaaggagaaaagcatgtccatcgaacgggtaaaagaatatttccgagcctgcgggatagaaagccgcattcaggagttttccgcctcgagcgccaccgtcggcctcgcggcagagcttctcggctgcgagccgtgcagaattgcaaagacgctgtcttttacggtgaacgggcccccgtactcgtcgtgacggcgggagacgcgaaaatcgacaacgccaagtataaggctcagttttcgacaaaggcaaaaatgctgacgcccgaagaaacagccgcacagatcggccacgaggtaggcggtgtgtgtccctttgcggtcaatggtggcgtcgaaatctatctcgacatatccctgaagcgtttcgaaacggtatttcccgcctgcggcagctgtaacagcgcagccgaattcaccattcccgagctggaacgttattcgcatttcctgtcctggatagacgtctgcaagggctgggcgtaaggcaaaggaagcccgtttgcgaaaagtccttttaaatttaataaaaccgcgcgaaaaccgaacggagagacgtttgtcctgcattcggcggacggggaacggaaatccggcataaaggaaaccgcttttgcatttttacaaaagcggttttctttatttttgttcaatagggttttttgccgtaaaagctttccacgttgtccgaaaacttcttcattttatcgtactgtttcaattcgagatcggaatccatcgcttcaatttcccgtttctgatcgcgcgtcagccgcgtgggcacctccaccaaaatacggagaatgaggtttcccgtcgccccccgcgccgaacggataccgcggccgcgcacagtaaacagctgaccgttctgcgtgccttcggggatggtaaaatcaaaggtatcgtcgatcgcgggcaccttcaccgttccgccgagcgcggccgtcttaaaggaaatcggcagatccacctgaagatcaaacccgttccgcacaaagatcttgtgcggctctatcttgaaaacaataatgagatcgcccggctggccgccgccctgcgccgcctggccgtatcccttctttttcatatagctgttgttatccacgcccgcgggaatggtgagggtgacggtggtttccttccgcaccgatcccttgcccttacaatcgggacatttgtcggtaatcacgcggcccgtaccgccgcagtcgggacatacgccctggcggatcgttcgcccgaacatggtattctgcaccgtctgcacgacgcccttgccgccgcagcgggaacaggtgctgtatgccgtgccgccgcgcgcgcccgtgcctttgcaggaagaacatggctcgtttcgcatgtacgaaaaggtctttgtgcagcccttcgccgcgtccatgaaactgagggtcatttcccgctgaatatcgtcgcccacgctcgactgtgcggagcgcgccccgccgccgaatccgccgaatccgccgccgaaaatcgagctgaaaatatcggaaaaatcgccgaagcctccctcgaaaccgcccatgccgcccatgccgggatgctccaattcgtaatcgtaggcggcgcgcttctgcgcgtcggacaaaacctcgttcgcttcgtttacttccttaaatttttccgccgccgcggcgtcgccggggtggagatcggggtgatactgtttggcaagctttctgtatgcggactttatctcgtccgcactcgcctttttatctacgcccaaaatgtcataataattttttttcgcctctgccataatgtgaaacgtccttcttcgatgtgtcttaaaatacgccatacgggtttggctgttcgccaaacccgatttgcgctattcctctttgcgggctgcgcccgacctttctcttactgatggaattcggtgtcgccgccttccgctccgggacccgcgcccgcgtcgggccccgccgccccgccgttcgcctgatagagcttggcgaagatgggctgtacggcgttcatcaaggcgtcgtacgccgccttaattctctcgtcgtcgtccgattcgagttccttcttggccgtatcgaccgccgcctgcaaggccgccttgtcgttttcgtccagcttgtcgcccgcttccttcatcgtctgttcgacggagaaaatcatcccgtccagtttatttttattatcgatcttttccttgcgcttcttatcctcttcggcaaacttttcggcgtctttcacggccttgtcgatctcgtcctcggacagattggtggaagaggtgatcgtgatatccgtggatttgcccgtgcccttatcctgcgcggtgacgtgcacgataccgttggcgtcgatgtcgaaagtgacctcgatctgcgggattcctctcggtgcgggagcgatacccgacagcatgaagttgccgagggtcttgttgtccttgcagaactcgcgctcgccctgaagcacgtgaatatccacgctcgtctgattgtccgccgccgtagagaacacctggctctttttgacgggaatggtggtgtttctgtcgataattctcgtaaacacgccgccgagggtctcgatgccgagagacagcggggtgacgtcgagaagaagcacgtccttgacttcgcccgtcagaacgccgccctgcacggccgcgccgatggcgacgcattcgtcggggttgatgcccttgaagggctccttgcccgtcacctcgcgcaccttttccacaacggcgggcatacgggtggaaccgccgacgagaataaccttgtcgatatctttataggccaatcccgcgtccttcatcgcaaggcgcataggctccaccgtcctgttgagaaggtcggcggtcatcgcctcaaacttctgcttcgtcagcgtgacgtcgaggtgctgagggccttccgcgctcatggagatgaaaggaaggttgatgttggtggaattcatgcccgaaagctcgatcttggccttttccgcggcctccttcagacgctgcatcgccattttgtccttggaaagatcgatggcgtgggactttttgaactcatctacgagatattgtataatcttgccgtcccagtcgtcgccgcccagcttggtgtcgccgttggtggcgagcacttcaaatacgccgtcggaaatttccaggatggaaacgtcgaacgtaccgccgccgaggtcgtagatcatgaccttgccgcccttgtccttatcgaggccgtaagcgagcgcggccgccgtgggctcgttgatgatacgcaaaacgttaagccccgcgattttgcccgcgtccttggtcgcctggcgctggctgtcggagaagtatgcggggcaggtgatgaccgcctccgtaaccttcgtgccgagatatgcctccgcgtccgccttcagcttggacagaatcatagcggaaatctcctggggagaatacgctttgtcgtctatgttcaccttaaaatcggatcccatatgtctcttgatggaaatgacggttttgtcggggttcgccaccgcctgacgcttcgccgcctgccccaccacgcgggagccgtccttctggaaagataccacggaaggggtcgtcctggagccttccgcattggtgataacgacgggctcgccgccttccatcaccgccacacacgaatttgttgtacctaagtcgataccgatcacttttcctgccataatttctatttcactcctttccgttttcccggtctgacccttcgggaaaagactttcccgaaaagcgcggccgcttttatgcgcccgccgtttgtttacatttatatttaacccgccgccgcgccgcttaaacatggaaaacaaaatttttcacgccttttttccataaaaaaagagtaacgcatggaaatgttgctttccctgcgtcgcctcttttattaaaccaatgatggtgtatgaacaaaaccgaaaaccggcgttcttcccgccctttccgaaaaggatcgtccccgcgcttccgtttcccgaagcttttgttttcttctttattatatcaggtcttttgacttatgtcaagtcaacaaacgtaaaatttggtaaaatggtaataattggaagaaaaaaaatttcggctttacaaatgatgatatacagcgaaatcataagacaactgatgattgaacgcgggctgaaccaggagaagctggcgagggcgctcggcgtcaaccagaccacggtgggacaatggctgcacggcaaaaaaaagccttcctacgacaatattctggcgttttatacgcatttcggcgtcacccccaacgaatttttcggggtagaatagtcctgaaagcgaaagcgtcggacgtttgatatgcgctctttttaacccaacgatttcactgtcgcaaaaacggtccttggcatcgtttgccccgcgctctttttaatcaacgggcttcgtgcgtcgggatattccgccccgcataaacgatattgcattttttacccggacgcacaacaaaacccccgtcggatgccgacgggggtttttgacgaactttactgcgtgacgatgactttcgcgtatcgaagcaccttgtcgccccgcttgtagcccttttcgtacacctgtttgacgacgccgtgctcctcgccctcttcgggcgcgacggccatgatcgcctccgcgaaagaggcgtcgaagggttgtcccgtggggtcgatttcttctacgttttcgccctccagcacttttttatagcttttaagcaccatttccacgccctgacgggtcttttcgtccgcgcaggcggcgagggcgcgctccaaattgtcgccgatcgcaaacagcgaagagacgacgtcgctccttccctcggtatattttttcgaagcctcctcgcgggtacggcggcggtagttgtcgtattccgccgtaacggaataccacttgcgcttgaaatcctccgcctccgccttcagcttttcgatttcctctttcgccttttgcagctcgcggcggtgtcccttttcctttccgtccctgccctcggcgtttttttcctctgcgggaggggtcgcgccgctttcggggacggacgtttccgcgctctccgttttcaccgactccgtattttcttcaacgctttccgcgccctgttgtttgttttcctgatcgctcatgacattcaccttgtaaactttattttgccttatatttataaagcaattttcgccttttcaaacgcaaaacgcaaaaaagggaattcagaattcgagatgtacgaaattttcgcgcgaggaacggcggtaaaatatcgcttttcttccgatgaccgcgacgggcaccgcgtcgagcagctccgctacgttttccgcgagatttcccgcgtcctcctccgcattggaaagaatgctcaccttgataagctcgtgcgcttcgagcgcgtccgaaagcgttttcaaaagattatccgaaaggccgcccttgccgatctgcgtcacgggctgtaagttagacgcgagggacttgagcttgctgcgttgtttgctggttatcgtttccgacgtaatgatctgcattttgtttacctcattatttattgatttgtgcgtatgcgctttgcccgaaaagcttctccttgaaaaaattttcgtttccgggttttttcgcggccggcccgaacgtcgcgtagccgtcgggggtcagggcagccgtaaatattaggcgccttcaggccaaaattcccgcatccgcaggtcgaattacgtaccccggctcatagacgatcaccccgtcccgcttcaccgtcacgattttgacgttcagcccttccaaaacgggcgcgagattgcgcatgacgcggaaaaactccttttcgtcgaacaccatgcagtcctcgcacagccccgagggagtaaagacgacgcctacgtttttcacgaaaatctcccacgaaccggggaaggtaatcggcgcgggatattcgtccgcatggctcatataccaatcgagcacctctttcttttccgcgccgaactcctccgtagttactccggggagatacagataggcgtaaatgatccccaagccttcaaacagcgtattgtgcggcgggtcctcgggcaaattttcggggctcatttcggggcataccgtcgcccaggtctgtacgttttccttaaacggcagcgtgtccagctccgcaccgtccgcacgcaggtacaggggcgcggggaaaggcgcctctccctcaaagatgtcctttgtccgttcctccataatcccggcaagctcctccgcgctcacctcccgcttgtcctcggggagctttcccgccaccgcgatgctggcgctgcccgccagcaaaacgtcctcgcccacataatggcacaagtagccgtagatcgcttttttgcggattgccgtctttttcgcgctccagctctccgcgtccttttcgtacacggcgatctccgccgcccccgtctccgcctcctccgaatagaaaatacggggcgggcgcttgaaataatcgggccgcagggcgggcttatatacccctttcgggaaatagggataaaccctccagcccgcttcggccatgggacaggcgggcttattggccgtatcggcaaacatcttcaggacggcgcgcagcccctgctgaggatagccgttggagcccagacaaaggcaatattttccgtccgacacgcccccgtaaacctccagaggcagaaaaaacttttctatctcgcggttgacccgcttttccaagcctttctgatcccccgtctcgatcatggccgcaaggtcgtttacctcttttgccaatcggctccaaagcgcctgtacgcaacagccgaaagggaaaaagtcccctttttcctcgcgggaataacacacccccgccagagaaatttcacggtgatgtcccgttaactcctcggagccgtcgtctgtgtagcgcagacagccggggcagcgtttctccacttgtttagaaaggagggcgtcgtattcctcccgcgtatagagattgaccgtaacgggaaaaatccgttcgggcgcggcaatgacgaggaattccgtctccacgctttcgtaaacaaagtcgggcgccatgcaattttcttccttgaggcgcctgacctcggccattttcagtttcctgacgtcctccgcgtccgcacagccgtcgggcagaaggtaatatttatactcgtaaaaaaatgctttcagtccgatttccatatcttctctttatatcctttgtaaaaatcgtatttttttcgccttgtccgcctctttacggcacaaagtcgaattccacgtcaccgatggataccgtgtccccttccttacagcccatggccgtcagctttttaatgacgccgcgaagcctcaacaccttttggaaatagagcatcgaatcgggattgttcagcacgacgttgcggcagagcatatctaccagcccgccgacgacggtatatacgccgttttcgtcgcggtaaatctcaaattcgagattgtcgttcgccgtatattcaaagtcctcctccacgggaacgggctccacggggggcaggtctttgagcacgtcgaaaatcccctcgatcagctcgcgcgtgccctcgcccgtgaccgcggtaatcggataaattttatacttgcggccgtattttttcttaaacgccttgaggttgtcctccgcgccgaaaacgtcgcatttgttgcacacgatcacctgcggcagagaagcaagcgtttcgccgtattccttaagctcctcgtttatctttttgaaatcctctatcgggtcccgtccctcgcagcccgaaacgtccaccacgtggcaaagcatgcgcgtgcgttcgatatggcgcaaaaaatcgtgtcccagccccgcgccctgcgccgcgccctcgataagtcccggaatatccgccgcgataaaggatttctcatagtagcgcaccacgccgagattgggggaaagggtggtgaaatgatagtttgcaatcttcggacgcgcggcggaaatcttgctgagcagcgtgctctttcccacgttgggaaagcccaccagccccacgtccgcgatcactttcatttcgaggatcacataatgttctttcacccgttcgcccttctgcgcgaaattgggcgcgtgacgccgcgccgtcgtgaaacgcacgttgcctttgccgccgtttccgccgcgcgccacgaggatctcccgcccgtcctcgaacacatcgcagatcaggcgccccgtgtccgcgtcgcgcaccaacgtccccaaaggaaccttgatatagacgttttttccgcccttgccgaagcattggttggttccgccgtgttcgccgttgtccgcaaaatatttccacgtaaagcggaaggagaacaaatcgttcatgtccttgtcgcccacgaaatacacgtcgccgcccctgccgccgtcgccgccgtcgggcccgcatgcgggtttgcctttataggccttgaaggaattcattccgtcgccgccgtcgcccgccttgatgagtatttttaccttatccgtaaattcgccgtttgccatagttttcctcgcgtaatccgccaaaattcagtctttttaacagtataacaaaaaatcgaaaaaaaagcaatgatttgcgggcgcgtatcccacaatcttgcggggaaaccttttccttttcgggaaatatctgaaaagcggcatgcttgtccgttcgggcgttatttttccgccttccgcagtctcctgccgtttgggcgtcattttcccacctttcgcagtctcctgccgttttcccgtcttcctcgcctttgaacccgtttgcctccgtttcgcatataataacgtaagccgaactttgcgcggtgaattttttccgctcttttcggccgaaattttcaaaaggaagaggttttttcacttatgaataaagatttttccggtctttctaagcttcaatgtttcggacaaaacgcctgcggcggaggctgtacgccctgttttccctgtgcgccctgtccccccgcctgtatcgtttccaaaacggtgacgcgcgtcgtcaattccgttccggcgcccgcgccgaccccgctccccacagccgaatacgggtacgtctttaacgacggtctgcaaacggtggcggccgccgcgggggtaagattttcgacaaacggcgttctttccgcaggcgtcacgcataccgcgggcggaaacgccgtcgttttggccgatgcaggcacttatgccgtgtggttcaccgtcatgggcaccgccgccaatcagtttattctctatctcaacgacacgtcggttcccggtaccttttacggcaccgaaacgggcgcggcaggctcggccgtccgcacgcttaccacgggctttgccatcgttacggcccctgccggcagcacactcgcgctcgtcaattccacgggcgcgacggtgacgctcgccacgggagtagggggcggcggccccaacgtcaacgcttccatgatggtcgtcaaattggcgtaaggcgcttccgcttatcgttatgtaccccgtttccctgccttcggcataacttctgaaaggagcgtaacgctcttttgcatatcggcatgcgccccgtttcctgacaaaacggggcgttttttcagatacggactccgccccgctttccgtgcaccgtcaccgactgcagaatccccgtggcaatcacgcgcttttcgcccgccgccgcgctcgccaaagcgtcgtctatgagatcggaaaaaagatttttcgcgtcggacacccgctcgcagaagagataatacgccagcgaaccgggcaccgtattcacttccccgagataaattttcccctccgaaagcaaaaaatccatgcgcacgatgccctttaagttcatgcgcttatacagcgtgcgcgtataggagcgaattttttcccgcgtttcgtcggacacggctgcggctttcttccccgccttgccgccgttgcgacggccgccttccccgaggtacttatccgcgaaggtatagattttatcccccgaagccgcttcctcgggctccgaaacgtaaatctccccgcccagggaatacgccgcgcaatttacgtcccgtttgtttttgagaaacttttcgatgattaccctgtcgtccagctgaaacgccgcttccacggcggccgccgcgctttcctccgtctccgccaccgaaatcccgatcgaagagccgaggtgcgcgggcttgacgacgacgggatatttgaggcgcgactcgatatttttcagcagaaattttccccgcttggcataatccgcctcgttgacgcgtatgtattccaccgtaggcacgttcagcgccttagcgaccagcttcgtcagcgttttgtccataaacatgcccgacgccgtaagttcgggcgaggcgaacggaatgccgttcagctgcatcagcgcggatatccctccgccctctcccagaccgccgtgacagcaattgagcgccgcgtctatttttcccttgttcttgatttttgtctttgcaccgttaaacgcatacatggtgcccccgtcgaaaaaaatctgttcgaaagaggagaactcctttttcttgaaaacgttgagatcggtcatcttcgccgaggtgtacattccgccgtcggtatggatatatacgggcacgggaacgtatttttccctgtccaggagattgagcacaaagacgcccgtcaggacggaaatctcgttttcacaggattttccgccgaacaacaccgccactttaagcataaaaaaacacctccgcaaaaaagaattttttcgctttggtgtcttgggtttttcgaaagtgttttaagcgtttcccgcggcgaagcgttcgctttaggcagaatgttgggaacaaagccgcccgcggaaagcagaaagcgcacgctttaagcggagcgttcggaaacgatacgcagccgccgacgggaagcgaacgcctttaccaagcgtcgggcaaatcattcagaaacaatacgcagtcgcccgcggaaagcgtttcgctcaaacgcgcctgcgccgcgtccagcgtgggaaggacgactattttttcctcttcgccgcccgcttcgagatatcccgccttgacggcgccgaccagcgtctctccgacgaggatcacctcgtcgagcccgaccagcgccgcgcccagctcctcgttgagcttctcgtcgaggatacccgtttccaccagccccggcgtcacgacgatcttgcgcgcgggaaaacgctttaaggcctccaccgcctcccgtgcgccgcgggggttggcgttgtagctgtcgtcgaggatatacacgccgtcgccctcgatcagctgaaggcggtgcggtacgggacggattccctctatccctctggcgatctcctctcccgtaaggcccatttcccgcgcgagcagggcggcaagcgcgacgttttccgcggaatgttttcccaaaaggggaacctcgaccgcgatcgcgtccgtatcgggcaggcaaagcgtaaacgaagtggcatgcggctttaacttcaggtcggaaatcaaagttgcgtaatcggcatagagacatttttccttttcgctcatcgaaaggacgtctaaaggcagggcggcaatcttctctttgagctcgccgccgcagacgatttttttcgcgctgcttttgacgatttcgctcttgcccttaaggatattttcttccgagccgaacgtttcgacgtgctgggcgcagacgcccgtaaacaccgcgtaatcgggtttgacgaggccgcacagctccgcgatatccccgacgtgccgcgcgcccatttccgcgataagcacttgcttgcccgcaaaatcgggccccgtcaccgtcttggcgattccgacgggggtattgaaggattcgggcgtttccacgacggaatatttcgccgataaaatacttttgaggatatttttgacggaagtttttccgtagctccccaccaccgccacgcggacgattttactttcgtccaatatctgccccgcacggcggacaaattttttattgcgcggattttcgtaaagcccgtcgaggagattggccagacagagcagccacggcaaaagcaggggcatcagcgtatagggcagaaaggcgaacagatcgtaaagctcgctctttatcgcggccgcggcgaaatccagaagcgcgacgacgatataggaaacgcaggcgataagcagaagatacaccgcgctgagccgtttgaccctgcccgtatttttgacgggcactttgagcgcgtaattgcggtccgccgcacagaacagcagacaaaacagaaagaagggcacggcggaaacgagctgcgcgaccacggcgcccgcgaaggaaaagcagagggaaacgaccgccgtcgaaagcagacccagccccgaccacagcgcgagccgattgtagtataaattgtcctttcgcttcagccagcgggaaaaccttttgtttttatagccgcactgctgcaaagcgcccaacgatttatacgtccccacgtaaaagaagcaggtgcacgcgatacacgcggcgatcctcgaaattacttcactcatgaaagaaaaattcctccgcaatcagattgaaggcgaggggatgctccgcaaacgcgaaatgcccgccctccatacgttttatccatccgttttcgagacaaacgaggtaggcttccgcttcctcgatcggcgtcgtcttatcctcttcccccaccaccatcaaaacttcgttgcttatttcccgcgcgtcggcgcgcagatcctcgttgactatctttttatagctctctcgcatgacgggcggaagcgaacggtattcggtactgccgaaatgtttttcggcataattcggcgcaaattttttcaccagacgataggcctttaccttcagtttatatccgaaaccgcgcttcaaaataacgcccgcaggccccgtcaaaagcattttgtcaaatacctgcccgtcccctttcgccatcttcaccgccacgcggcagccgaaagaatgggcgacgacgtgcgggcgctctatcttcagcgcgtctaaaagcgctttcgtccactccgcgtaatcggagacggaaaaggcctcattcaggggcgcgctttggccgaaccccaaaaaatcgaacgcggtgacgcggtaaaaccgcgaaaaatactcgatctgcgccgtaaagctttccttggaagaaaggtaaccgtgaaaaaaaacgagatcgcggcccgttcccttttgtataaacgaaacctcggacaaatcgaaagtcaccgtgttttcccgcctcccgcaagattatttgcctacccgatcggcttttgcatgacgacggcgtcctcgccgtcgggataatagcgcggccgcgtataaatgccgcgaaacccttccttgaggtataacagcatggcgggcgcgttggaaacgcgcacctccagaagcatgacgcccgcgccccgttcccgcgcttccttttccagcttcttcaaaagcgtttttcccatgccgcggcggcggtagttctccgcgacggcgacgttatccacttccgcgttttcaaacagcaccgtctcgcaggcgtagcccgcgatttcgccgttttcctccgcgcagaccccgtaaaagagctttgacgaaaaggcctcgacaaacattttgtacgtccaggcgtcttgaaaacattccttttctatctccgaaattttcaggatatcttcgtacttccattcgcggtaaatcatttcaaacgtcctttctgttttcttccgcctgacttttgcggatatacagcgcggagagttccccgaaattttccgcgtccttcgaaagcgcggcgagcgcccgcttcagcccctcgacggggtcggctttcctgacggcggccttcgcggacaggggcaactcctccatggaatagggaacgtagccctccccgatcagccgcagaacctctttctccgagagataggcaggcggcaggattttgttttttctttcgtcgaagccgcaggcgtaatagtttccgtgcagggcgtccaccagggcgagcgcccgttcgccgtctaacgcattatatgccgcgacgtcaaacgaggtgacgggcagagagggttttccctccgcgaggcaaaagcccttcgccgtagcaatcccgatgcgtatccccgtaaacgagcccgcgcccacgaccgcggaaaaaaaatcgcactcgtccaaggagagcttcgcctctttcaaaacgccgtcgatcgcccccatcagccgtacggaatggcgcatggcgcagtcgggcgtatgcgaaaaaaaggtttgtccctcctttgccgccagcaccgtcatatatttcgagcttgtatcgatcgccaaaaagtttttcaatattctatctctcttgtgttttcgtctatttttcggatcttcacccgctttacccgttcgggcagaaggggcgcgatgttctcgctccattccacgaggcatacgccgcccagctcgaaatagtccgccaggccgagattctccgcctgccgcggcgattggatgcggtaacagtcgtaatgaaacagcctgccgtcgtaatcgttcatataggcgtaggtagggctggtcacctcgtcagagatgcccattcccttcgccacgcctttggcgaacaccgttttgcccgcgcccatgtccccgtccaaaagcacgacgtcgcccgcggataaagtttttgcgtattctgccgcaaacgccatggtggcttcgcgcgactcagataaaaatacagccatacgtatattataatacgtacggcgattttttgcaattgtttcggctttcaaattttcattttcttgagaaacgcggacagccgcttatacaacagcagcgtaaagagagaaaccgacaccgttttgatgagattgaaggcgagaatcagcccccagacctcgtaaaatccttttgtcggaatcccgaaggcgggaaacagaataaatcggtttgccaaaagcgccgtgcccgtcgcgataaagcaggccgcagccatcgcaggggccacgacgttcaagcccttacggaatttataaacgacggacggcaggaggataaacgacgaagtgacgatcatatttgccagctcccccacgccgcccgtagagccgagggggatacgcagtatttccttcagcgcgcagacgacgacgccctcgacggggcctaaaagaaaaccgatcagcatgataaatacgttgccgaaatcgagcttcaaaaaggaagcggacggaaaaagggaaaactcgagaaagctggcgacgtaagcgagcgaggtgaacaccgccatcagcgccagccgcttggcggtaaacatctttttcagtttttccgccgcgcgctttttcgtcggcgcggccgcgggcgttcccccggcgggttcgcggtcgcttgctccgacggcggcgggcgcctcccgttcggcagagtcttcgggaatagtggtttgtaatgacatgacgatactgctccttaaaaagaattttttcgtaaaaatattccccgtaaggacttatgtaaagacgcaaaagccgccccgaaaaatgttcggggcggcaaaaaaacgccttctgcggccgcaatatgcggcctttatctttttccgtccggactataccgtcggtatcggaatttcaccgattcgggggcgcggcctttcggccttgcccttcgcagactttactgccggtgaggaatttcgcctcgccccaaagaatattttttacttttctctattgtaaaccttttgccgcgcttttgtcaacctcctgcggcgaaatttttattctttcataaaatatctttttcgtaaatggggaagcgggcgcaaagcgcggcaacctccgcgtttacctcgtcgaagcacccctccttttccgcgattacgcgggagatgaggtcggcgatcttttcgcattccgcttccttcatgccgcgggtggtgattgcgggcgtccccacgcggataccgctggtgacgaagggcgacgccgtttcaaacggaatcgtgtttttattgacggtgatatgcactttgtcgagaagcgcctccaattcctttcccgtcacgcccgtatcgcttaaattgagcaacatgagatggttgtccgtgccgccggaaacgaggcggattccgtttttcataaagcgcgccgccatcgtccgcgcgttgaggatcacctgcctctggtagtctttgaacgcgggcgaaagcgcctctttgaaggccgcggccttggccgcaataatgtgcatcaaaggcccgccctgcgtcccggggaacaccgccttgtcgatttgtttggcgtatttctccttgcacatgatgacgccgccgcgcgggccgcgcagcgttttgtgcgtggtggtcgtcacgaaatcggcatacggcacgggcgagggatgaagccccgcggccaccggccccgcgatatgcgcgatatccgccatcatatacgccccgaccttgtcgcagatctcgcggatacgcttgaaatcgatggtacggggataggcgctggcacccgaaacgatcagcttcggacgggcttccagcgcgattttttccatttcgtcgtagtcgatcagctccgtttcgcgcgaaacgccgtaaggcacgattttgaaatattttcccgagatattgacgggagagccgtgcgtcaggtgcccgccgtgggaaaggttcatgcccatgatcgtatctcccggctcgagcatggcgaaataaaccgcaaaattcgcctgcgcgccgctgtgcggctgcacgttgcaatggtcgcagccgaacagctctttcaatcggtcgcgcgcgaggttttccgccctgtccacaaattcgcagccgccgtaatagcgtttgccgggcaagccctccgcgtatttgttggtgaggtgcgaccccgccgcggccaatacggcgggcgaaacgatgttttcgctggcgatcagctcgatattgccctgctggcgtttcagctccgcgtccatcgcggcgtaaagttcggggtcggcatttttaacggcggtcatatcaatcatacgtacacctctttttattatactatagacaagctatgtctgaacagagcgcgaaaacgtccgcaaatgcttcgcacctgcacttttttcgcttctgttataacatcgtgcgtaaaaccctctaaatactttgtgcttccgcatttccgcttttattataacataactgtcgttatgtttgaataaggcgcggaaatgcccataaatacttcgtgcttccgcatttccgcttttattataacatatccgaagcctcttgtaaacggttggagaacttttcggctaaatttatttcaaagaacgtttatgccgaacagaaacagcgcgaaggccgcagccgtccaggacgctatggcgagcaataccgccgtaagcgcccccgaaatttttccgctgcttcccgctctttcttccatatccttccgcctatacatcatacagcggagaaaacaggcggcgggcacgaggagaagggcgaaaagccccgccaccacggcggtcgccacggcggactcgggacgaagcttctttaccagcgaaagaacggcaaatacggcgatgaacaacgcggcaaaaaggacgttcagctttgccgtcccgatcgttttcagcgccttgcccacgccctcctcgatccgtcgggagacgggatattccgccgcaaccgctccgttatgtagattgacaaagccctcgtattccctgtccccgtacacgcacaccgccttaagcacgggcacgaagatcaccccgtaacgcatgtcgtcgagcgtcgtccgcgccgtggaatcgggggaataatccgccgcctcgcgcttcagccgccgcacgctttccctatagggcacgagatattcctcaaagatgggcgcggggcgttcgccgccgtcggataaaaacgaaccgccgtccttccattcgtccgttttaagcgccgcggaggcctgcgtcagcacacatccgagcgttctcttttcgcggtgctccttgggcgaggcggacttgcttccgcccgtttcccatacgtattccgcttcggccgacaagcgatacacggggatatatccccgctgaagcaaaagcccgtccttctcctccgccttttcaagaaattccgagcggatacccttgaaggaacgaagcgtttcgcgcagtttttccgcgccctcggcttccgaatagttttcctttgccagaaaaaagtcggaatatccgtcaaacgcttttttgtttttcaaatttttctccgccatctttcttctccttttgcaagcgcaaaaagggcgttcggctcaaccctgccccttcggctcttctttttccgacggcaccgcgccgacggttttcaggatcgcccaaacatacggcgcgccgtaaacgttgagctttttcggccccttgatcgcggggtcggagcggatcttttcgagcgcccgttcaaacgtgcttctcgtcaccgaacgatccctgcggtcggtaaacaattcgccgcccctcaccgtgtaggtaaagggcagctttttggacgtataaaacacttttccttgcagggaaacaatcaccgtccagagattttccgcggtgatctccccctcgtatccggcggcttcggccgtccgttcttctttttccatatctcttttctctctgcccgaaggcgtttatttttccgtatcggacggcggggcgcattcggggaagacgacgtaaaaggtagtgccctttcccaccgtgctctccaccccgaaacggaaattatgcttttccagaatagttttgacgatggacagccccagccccgtgcccttgacggggcgtttatgcgcctgcgacgaacgatagtacctgtcccagatcgtcgtaatctcctcgggctttatccccttgcccgtatcgctgacggagaagcgggccgtcccgtcgccctgccgtttgagttccacgcgcaccagcttgtcttcgcccgtataattgaccgcattgccgatcaaattatataacacctcgccgatcttcagcgggtcggcttccgtatagatatccttttcgatatccgcggcgaaacggtaattctgcgtttccgaaagatattcaaacttttccagcacgtcgaacgtgtattccgacaaatcgaaagcctctatcttcaacgcgtttatccccgaacgtatcttcgacaaatcgagcacgtcgttgacgagggaggtcagcctgtccgcctcgtcgataatcacctgggtatgctttgtccgtttttcgggattattgcccgagatttcctgaatcatggaggcatacgccttgatcatcgtcaacggcgtcttgaaatcgtgcgagacgttggcgatcagctccttttgcatctggtccgctttggaaatttcgtcgcgggcaaagttcagcgtttccgcaagctcctgcatttcactgccgtacgatcggccgtggaaatcgacggagaaatctcccgcggcgagcaggcgcgccttttcggtcatttccgaaatgggcttggtcagcgcgcccgaaatggcgctggagacggcaaaggacagaatcaacacgaaaatggccatcagcatcatgcgcacgttcatctgctttacgacgctttcgctcaattccagcgacttacatacatacagatagacgggctcggacgtttcgccgccatacacggcgccatagacaaattcgcccgacgaatcctcgtaaatcacgggcatgcctttggattccgtcagctgattgcgcagacgtttcaccttttccgaaaaatccatatgctcgccgaaaacggggtccgaaggatccagctcctcctcgatgggaaacatcacggagccgtccgcgccgaggatatacacccccacatcgtacaacgcggcctgatagcggacaaagctactgtaattggggccgcggtagtcgttgagctccttttggatcgccgtcccgttcatggccaggctcttggtgatttcatccttataggtctgcttcaaaagcaggttctgcgtcagggcaaacaacagcacgatgatcagcgcaaatacggaaaaggcagcccaaagcaaaaaatagatgcttgtgctcccctgccctttcgcgtaattcttttgtgtcatgcgtcctttcatgctccaccgccgtcccctcgattttaacgcccgccgctttttccaaaatatgcaaacgcgcgccgcgcggaaaacggtttctcctccctgcagcgcttcttttgccagcaacccgcttgtccgcgctgattatacctcgaatttgtagcccagcccgcgcaaggtcacgataaacttccgataatccttgagattgccccgaagcatcttgatgtgggtgtccaccgtgcgatcgtccccgtaaaagtcgaagccccacacgtcgtacaggagcttttcgcgcgtgagcgcgatccccttgttgcggacgagataaaagagcagctcgtattccttgggggtaagctccgccttttcgccatctacatagacgtttcgccccgccatgtcgatctccagcccttcgaatttatacgtctgggcggaagcgtcggccgtgttcgccgcgcggcgcttcgtcaccgcattgatgcgcgccatcacttccttgggcgaaaagggcttcgtgacgtaatcgtccgcgccgatctcgaagccgaacaatttgtcgtattcctcgccgcgcgcggagagcatgatcacgggaacgtccttgaatttgcgaatttctttcaccgcggaaaagccgtccagccgcggcatcatcacgtccatcaacaccacgtcgtaatcgttgtccttgcacatgcgcacggcctccatgccgtccgaggcctcaaacgcttcgttcccctcgaattccacgtactccttcagtacgccgcgaatcatttcttcgtcatctacaattaaaattttcataacaacttcctctgaagtatcggatttttcactgacagttaaaatataccccgccgaagttacctttacaacaaaataccgtgaaagataagtgaaattttcacaattatatcctattttccgatttttgtcaagtaccttgcgccttcctcccttcaaaggcgctttttaagagaaatttttccaaaaaacagcgaacaaatgtttgacatttttttcggagaatgatacactattaaggtaatcccacacaatgttatcgagcgagcccgaaaagggttttgcgtatgaaaaggcggattttttaggcaacagcggctgctattgcaggaaaatccaacgaattcaggcgcaaaattactccggaatctcgatgccggttatttgtgcggcgttgccttaaggcaaacggaaaaggagaagcgcgatgatagacgaggggcggctgaaaattttgacggacggcgcgaaatacgacgtatcctgctcgtcgtccggctcgcggcggaaaaacacaaaggacggaatcggaaacgcttccgtgggagggatctgccattcctttacgcaggacgggcggtgcatttccctgctcaaagtgctgatgacaaacgactgcattttcgactgcaaatattgtcccaaccgcaaaagcgcggacgtgccgcgcgcaatcgtcacgcccgaggaaatgtgcgagctggttatgggcttctaccgccgcaattacatcgagggctttttcctctcctccgccgtctataaaacgcccgactataccatggaactcctctaccgcacgataaaaatgctgcgggaggactacaaattcaacggctatatccatctgaagggaattccccacgccgacaggcttttgaccgaacaagcggccgcctatgccgacagaatgagttataacgtcgagctgcccagcgaacagagcctcaagcttttggcgccgcaaaagacgaaagaaagcgtgtttcagcccatgcggcagctatgcgaggaaaaacgggctttagccctggagcacaagcttcggacgggcagagaggaacggcggggtacggggcgttttctccccgcagggcagacgacgcagatgatcatcggcgcttcgcccgaaacggacgggcagattctgcggctgacggaattcatgtatcaaaaatacgacctcaaacgggtgtattattcctcctacgcgcccgtcgtacgcgatcctcttcttcccgatacgggcgcggggctgctgcgcgaacacaggctgtaccaggcggactggctgctgcgcttttacggcttcacttgcgaggagatcacgcccgcgggagaaaatctccccaccgaatacgaccccaaatgcgcctgggcgcttcggaacatgcagtattttcccgtggaggtcaacaaggcgggcgtggaacagctcctccgcgtcccgggaatcggcgccaagggagcgtataaaattgtcacggcgagaaaatatgccgctctcacctttgaggatttgcggaaaatgaggatcgtgcttaaacgggcacggcactttatcacctgcagcgggaaattttacgggctcgaagggcccgagcgggtgcggacgcagctgattctggcagaacgctcggagggagcaaaacagctgtctctattcgacgccgctttcagcgccccctctcttttgcccgaaacgggaacgcttgcccttctcgcctccccgaaagaaaagcaatttttattaaattcctccgccgaggtcgcgcgttcggccttgacggggcaattataaaagcgcggggcagggttgaggtcaacgagatttcagacaaggggcaaggttgagacgagcgggtttccaagcgaagcgcgaaagggagcaggcaggttttcagacaaagagtgacaaagtgagccgagcgggttttcaagaggatagaagtatgcgtaacatttattttacggacggttcgcccgaaggtttttttacggcggtattcgacgcctacgcggacaaggacgcctttgtatcctcctccaaagctctgcaaacggctttggacgaccgcttcatcgccgtttcccccgtaggggaaaaagcgcagcgggtcgttaaaaagctccgcgccgtggataaaaacagcctctgcgaaatcgactttattttacgcacgcccgcggcagatcgggaacagaccgctttcgactatatccgcctgcttgtgaaacagcgtcggcccgtgcgcggcatgcttgtccggcccgaggtgcggcgggcgatggagctcgtcgatcgggtgggcgccgagcgtcatttattgagcggatttctccgctttcaggagacgcacaacggcgtgttttatgcgccttgttcgcccgataacgacgtagtcgatctgctgatgccccatttcgcggcgcggtttaagacctccgcatttgtcatccatgacatttcgcggggactggcgggcatttacaacggcagcgaatggctggtctcccccgtcgcgcaggcggaaatcacgctttcggaaagcgaggactctttttctcggctctggagaaaatattatcataccgtatatattcccgcgcgcaaaaatacgcggcagatgaaaggatatatgcccgtacgttattggaaatttatgcccgaaaaacaatttgaggaaatcgattttcccgaaacgtagttccggttttcttcatttctcttcgtttggtaaaaagcaggattaataaaaaactttattcaaaagcaaacacgcgagggcgtattccgacatatcggaatacgccctcgcgcgttcatctctaccctgctcccataaaatcaattttccgacgccgtcatttccttcaaaatacatttgaacgtcgcaagatgcatttcctcgtccatgcggatacgctggattaccgccgcgacgcgttcgtttttcaagcggcaaagcattttggtataggtatctatcgcgcattgttccgcttcaatatcgtccaaaatcattttctgcggcaccttcgaataggataccgcgtgcgccgaataataattgataggatacggcggcagataggaatatacgggcgccgcccccagccttaagatcaggctgcccaaaatttccaggtgcttcatttcggtaattgccactttcagcaatatatcggcgtaatctttacagcccgcgtgatcgaacaaaatatgttggtatatgtattgaagcacggcggtcagctcgccttcgttacccgcgtaggcgggcgaaataagcttcagcgccgcgggatcttcccctattccgtccaacgcgggataggcaatatctgaggcgcaagttttgccgcagtcgcacgcactttcgccgcaatgccgcaaagacggatccgcattgctttccgccgcgcatttttccgccttaacggtctcctcgaagatacgggaaatatcccgtatctccatatctttattttcgtccataacaaaccccttctatgtatttaccctgtattatatgcgccgtctccccattttatgtgcgttaatcccctattcgtattcctcatagctgcggcgccccggatatccctgcgaaggcgcgccgccctgaggcggatagggcggatttccgccgccggagggatagaggggcggagggggaggaggagtatttccgccgccacagccgcgcccgtgcttatgcccgcacggtttcggcggcatattgaagttgaccagaattacgtcgtccccgatcttgatgatatttttcatatcgataaactgctcgcttttccaaaatccgaaaccgcggccgcccggcaccacgatcccgagcacccgattttcgggataacagaataccagatcgcatactttacccaatcgcctgccgtcggcggtgttgattacctcttttgtgcgaagttcagaaaagctcgtttccatagacgtttcctccgcattttttgattttttttattttcttttttcgttatactctacaatatatgcaaaaggcgcggactttgccacgccttttgaacatttatcggtttttgtcggaaaaagaaatccctatttcgtcactttcatttttaccacgatcggcttattgagttcggaatcggtcaaagagagcgaatcctccgcctgccccgcaaaattcttcccgtaaatatcgaaaagatttcccgatatgttcagggcggggagccggccgaccagctttccgttttcgcagagaaaagaaatatgcacgggcgtggcaaaattgccgtcgggcgtcgtatcgccgccgctcgccattactatatacaccgcttttccgccttgggtcaactcccggatagtccttcccgaacccgcgagacgcaggccgctcaagcccgtctgcggcaccccgtcgtacgcggcggaggcgctgcccgacacgggcagaccgtatttctgcgcgtcgagcttacaggcgagaacatttttgaatactccgttttcgaacacgatatttttataatcctcgttcacgacgccttcgtcgtcgaaaaagcaggagaaaaagcccgagtcgggcgtcctgtcctcgtagatggtaacgccctcgttaaatactttccgtccgagttttcccgcaaacagccccgtgccgttggcatagctgtccgcacggattccctcgtacaatttatcgaggccgaggtcgtaaagggaagcgagcacatactgctccccctcctcgatatccgcaggtacgtaataggcgcggaccagctcttctatatcggaagccattttttcgacgtcgaacgtcttgcccgtataggaatagcccaaatccataatattcgccgaggctttctctttcatgacaagatccagctgatacactcccgccctatacgacagatccaggccgacgtcgttgacgagggaaatttcatgttccgtcttcaaaatattgttgctgaacaaaaaggcgggacacgtctccttcaggcgggcgagcagttccttcgccttatccacaaacgccttatcccctaaaaggccgtcggagacgtcgatatgctccgccttgccccgcgacgcggccgcggggtagggaatttcgtttttgagattttcctcggcttttttccaggccttcgcctcgtcgtaggcgcccgtcgtgccgaaaatgccgatcctgccgctttcatatacgcggtagccccgcttttccgtggagacaaaacgcacggatttcacttcgctcgccgccgcagcaacggtggtcgtcctcgattttaaggtcagtttttctttgatcatcgctgcgcctccttattgaaccttcattttcgacacggatacgtacggcgcgccaaaccctacgggcaagggatactgctccatttttccgcagccgccagtaacaaagctgagtatttccgcctctttcgacagaccgtcaatcaatcccagcgtccggaaaacgtcccccgaaatcaccgaaatcttcacgggccccgcgatctttccgtccacgatctcatagctgatattcggcgcgatcgtaaacgtgctcatgccgctgccgtgcttgatcgtcttgataaaatagccgtgcttaacgttttttaccagctcgtcaaacgtcttatccccgccctcgatcaccgtcgtcgtcatgcggacgatgggctcgaattccgtccccatcgcgcgggcgttccccgtcacagcttcgccaagctccgcggcggtttccgcgctgtgcagcctgcccgccaaaaagccgtttttgataagatacgtccgcgtcgccctcgtcccttcgtcgtcgtagggaacgtaaccgcatccttcaaacgtacccgattcgataatggacaggccgtcgctgcccacctttttgccgatgctccattcctttttcatcgtctcgtcgcccagcataaaatcagcctcgctcttatgcccgaacgactcgtgcgcgaatactcccgccgcctcgggcgagagaattacgggaaaatcccccgtctccgcgtcttttgcagtcttgaggaaggtaatcccctcctcgatgctctgctttaattccttttcgaggccgcaaacctcctcgaagcgcgtcttacccttttggtaagcgaaggaaaagtttttgccgtcggccgccgcctgacagcttatcgccgcgccgcaggtctgatagtcgtaaaaaagcgccgctcccttactggaatagaaagaataatcgctgtggcggtcgagatacctcatcacggacagcttgatctcgggatacgccgccgccagcgggaaaaggtccgtcaaaagcttctgcttgcgttcgcgcgggatattctccgtcgagcaatctttgaaaagatactttttctccctgttcacctcgaagcgccgcacgagaggatgagcgtctatttcgggattcgcctccgccagctcgtaaagcccgtccagctccttctgtatattttcggggttctccgtggaggcataataccacatcttgccgtcgaatacgcgaataaacgctccgtccgtcaccctctccttgttttccgtcagaacgccgtttttgtaaacgatagtcgaagtatgcctgcgttccgtccttacgtcggcgtaaaatccctgcctgaaccgatacattgtccgcctccctttatgctttgacaggcgcgaaaatcgaaagcgcaagacctccgtcggtatttccgcacgccgttcaaacattgcttactatttcatagtataatatatacccgtcgaaaaatcaatcaaatcgatagcaaaagaaaaaagccgggaaaattctctcggctttgcgcggtttccgtatatcgcttaggaaatatttatcctgatattgttgagagcattcttttcgaggcgggatacctgagcctgagaaatccccacctcctcggaaatttccgtctgcgtctttccctcataatatctcaaaaacagaatacgcttttcccgctcgcccagccgccccatcgcctcgttcaaagcgacgtgctccgtccatacctcgtcgttgttcttctcgtcgcacagctggtccatcagcagcagcgtatctcccgccttattatacacggggtcgtagagggaaacggggtcggaaatggcgtccagcgcatagaccacctcgctgaccgcgacctccatttccgccgcgatcttgtctatcgtcgcctcctcgtcgcgttcctctatggcttcgcgcaccttcaacacgcggtaagccgtgtcgcggatactcctcgacacccgcagggaattgccgtcgcgcaggtatcgcttgatctctccgatgatcatggggacggcataagtcgaaaacttgacgcccacgctcaaatcgaaattgtctatggccttgatcagccccacgcagcccgcctgaaacacgtcgtccgcgttggcgtttttcgcccagaagcgtttcaccaaagacagcaccagccgcatattgcccacgataaatttttcgcgcgcggccttgtcgcccgtctttaatttcttcatgagttcctcgttttccttggcggtcaaacggggcagtcccgacgtatccacgccgcaaatttccactttctgcatcatactcgtctcctccttcttatgtaaaacgcgctttcgacaagtatgtacggccgacgcggagaagcttttaacaagtatgtgtgatttttttcctttttatcgtttgttttccgtttttgtgaaaataatctttcggattataccattttcgaaatttctttcctcagccgctgaataatctttttctccagccgcgaaatatagctctgggaaatgcccagaagatccgccacgtccttttgcgtcatctcctccccgccgttcagcccgaagcgcagaaacataatcttgcgttcccgctccgacagctttttcagcgcgtccttcagcagctccttttccgcgctcgattcgatgtcaccgtaaacgctgtccgcggacgtgccgaggatgtccgaaagcaaaagttcgttgccctcgaaatccgtgttgagcggctcgtcaaacgaaatctcgcttttgaggcgcaccgtgcgccgcagatacataaggatctcgttttcgatacagcgcgacgcatacgtcgcaagcttgatgtttttgtcgggcttaaaggaattgatcgccttgatcagcccgatcgtccccaccgaaacgaggtcgtcggggtccacgcccgtattgtcgaactttcgggcgatatacaccacgagacggagattatgctgaatgagctccgcctttaccttgtccgtctcctcgccgtgctccagcttgcccagcatcgcgctctcctcctcgggcga

SEQ ID NO: 3468 - DNA, 11576 bp, Unknown
  16S sequences of unknown bacteria
ggaattatggcaactcgagcttaactcctgttgcacttagtttgacaattcactcagtatcctgccgcacatgtgcggcaactgttgatatcataccataaaaatttccctttgtccttgttctttcccaaaaaaattgacaccggcccgccatttatgttatattatataatacatcaaaaaagcagggccttttccaaaggcccgggttctccggaacagcggcgcagaatgcaatgcaggcaatgacccatgaggccattgctttttttctgcctgcgccgtgggctcacacttctttattttttctaaggaggcgcgcagccatatgtccgaacactatcagaaacaagcttatcgggtgtctttgtgcaccagcgctgtcaacgccctcttggccgtcttcaagctggccgtgggttttgtcagctcctcttctgcccttctgtccgacggcgtggattccgcctgcgatgtgttcagctcgttcatcgtgatgatcggggtgaaattcgccagcaaatccccggacgaagaccatccctatggccacgaacgctttgaatgcatcagctccatcgtgttggccctgatcatcgccgcttccggcatcggcgtaggctatgccgctttggtgaagatcttctccggcgccatggaagcccccggcctgctggctttggctgtggccgctgtctctattgccgccaaagaatggatgttccgcttcacccgccgggcggcccggcgcatccgctccgattccctcatggccaacgccctcaactaccgctccgatgtcttttcctcctgcggtgttttcatcggcgtggccggtgcccggctgggcttccccgccctggatgccatcgcctctttggtcatctgcgcactcattctccgctcggccattgagattctgctggatgctctgagcaagatgctggacagctccattgacaaagagaccctcacccagctgcaggagctggtgctgaagcaagaaggagtcctggccctggacgatatcaaaacccgtcagttcggctcccggtactttgtggatgtggagatcgcctgcgatggagacctgtctcttcgtgaggctcatgccatcgcctcccgggtccacgacgaaatcgagcaccattttcccgaaaccaagcactgcttggtccatgtaaatccctacggggaggaacactgattttttacaataaaaaggcctgtctctccagtgagagacaggcctttttgattgcttatgatttagtttgtcttttgagaagctgtctgggaagaagccggaactttgacagcctccggtgcgtcgggcacgaagaaggagcccacgcaggccaccacggccacgcccaccaggatccacagcacagtgggcagtccctgggcgtcgcccaccttacccaggataggagaaatcacgccgccaaagctggaggccagacccatggtgataccggaagccagacccacatggttgggcagcagcttctgtcccagagccacagaggggctgaaggccaggttcaggctcatggccagaggaatgagcatgatagtggacaggcccacccaccgggagaagatgatcaccagcaagcaggggatgtacatcaccaagccggagcggataacccggttaaagcccagacggtcggccagacggccgccgatgagagtggacagagcaccggcaaaagcgatgatcgtagtagtggtaccagagcgggcatcggactggagaagcacgctcatccagaacaaggggatgaaggtggtcatgccgatggacaaagtggaacgaaggaaggtgacggcggtgagctttccaaagcctttccagtcgtccttctgcccggccgccatagccgctttggtggcctgggccccctcattggcaaaaccggccagcgtcttggtctggctcagcaggaaagcagccataaggaaagcgggaacggccagaatcgccgtgcccttcaggccaaagtgggagatgccgaacaccgccagcatgggacccacggctccgcccaggttgccgcccacggaaaagttgctgatgccccggcctttgcgctcgccagccacataattggccatgcgtccgccgtcgggatggaacagggccgagccgataccggtgaaagccaccgctgcaaacatggcccaatagctgtccagaaatcccagcatggaaatgccacagcccgacataaagatgcccaggcacatcatccagggccgggagtgtttgtcggccatggagccgaacaccggctggatcaccgaaccgatgctgctgagggcaaaggtcaatccggctgccgaagccaggctgatccctttttgagccaccaaaaagggcaggatggccggcagggcgccgccgctgatgtcggcgcacaaatggcccagcatcataacgatgccgtaggactcgcgtttgagtttcattgcttgttcctctcctcttttctgttgcgctgccgccgcaaacccccgcggcggtttatctgctacactctattgtaccagaatacaccccccggcacaagagccgggccatctttgccatttttgtacaatatatggacaaatccccgaagcacagtgtgcttcggggattgaaaacaattttaaccttttttatgggtgccgatgtaaagggccaggatcatgatataaatgatcatcatcacaacgaacaccgcggccatgccctgccacatcagctggagggtctggctcacaacatgaaaatccacattcatcctaagcgcccctttcttacagcagcatgccgggcaccaggcccagaatcacgccgcccacgataaccgaaccgatctgaccggccacattggcccccaccgcatgcatcagcaggtggttggtggggtcttctttcaggcccatcttctggattacgcgagaggacatggggaaggccgagataccggcggcacccaccatgggattgatcttgttcttggaaaacaggttgatgatcttggcaaacatacaaccggccacagtgtcaaacacaaaggccacaacacccagagccatgatcatcaccgtcttcacatcgatgaagctttcggccttcatgctggcagaaatggtgatgcccagcagcagagtgatcaggttggccagctccttctgcgcagtctgggacaggttctccagcacaccgcactcacggatcagattgccgaacatgaggaagcccaccaggctcaccgaagcgggagccaccagaccggccaccaatgtcacgccgatggggaagagcagccgggtcatacggctgacgctcttgggctcatagggcatgcggatgagccgttccttccgggtggtacacagcttgatggcaaagggctggataatgggcaccagggccatataggaataggccgccaccgcgatggcgccgatgtacttactgcccagcaccaggctgaccagaatggcggtggggccgtcggccgcaccgatgataccggtagccgccgcatccaccaggtcaaagcccagcagagaggccacggtgatggtgaggaacacgccgaactgagccgccgcgccaaaaagcagcagcttggggttggaaagcaccggtccgaagtcgatcatagcgccgatgccgataaaaagcagcagaggcatggcttccgaggcgtgaatgcccacttcaaagagccaatcgatgattccttctacctgaccggccccttccatggtctgggtgagcaccccggacatggggatattgaccaagatggcgccgaagcccatgggcaaaagcagcgccggttccatttccttcttcaccgccagccagatgagcaggccgccgatgacatacatcaccacttgctgccaagtgatggagaggatcccttctgttaaaaaatccatacctcttctccattccttttgttctttccgccctatttataaataggagcgacgctcttgaaattttaccataaatatgcccctatgtcaaaatttatacggtaaagtctgtgtaaaatccctttcatttttcctgagtatccagcacctggccatccaatgtcaccagaatggcccgggccccttgggaccgggcaaattccagcgcctcctccggttccatcaggaacaatgcagtggaaagacagtcggccagtgctccatcgtcgcagatcaccgtggccgacagcatccgctgggcgggatagagggtttccggatcgatgatatggtgataccgctccccatccacagtataaaaccgctcgtaaccgccggaagtgaccacagcctgggatgtgatcgtcaccgtatcaataagctctccggcctgctgaggatcttcaacgccaacgctccagccctctttctccggcggcgctccctgggcctgcacatttcctccggcggaaatgacgaagttttcatacccgctttccatcaaactctctgtgacccgctggaccgcaaaacccttggccaccgcccccacatccagggacatctggctgtcccgcagctctgcggtgcccgcttcctcatccagcaccagatcttcgatacggcagtgttccgctgcctgggacagttcctcctgggaaggcagctgggccttttccggctcctccgccgcctgctcccgcgcctcgtgccagatggacaacacactgcccatggccacattcaccacgcctccggtcctgtcataacactcccgggcaaacagcagcagctccatcacttccggctccacctccaccggcccctgaccggccttttggttcagctggtacaggccggtgactccttcgtagggcacatagatgtcatagagccgggacaggcgcagaagctcttcttccgtctgggaaaaaagcccgtcaaattcctcttgggaggcgcagtaggccgtcaccgttaccaccgtgtcaaaggctccataaaattctccgctgtatcgcttctccccgccgcagccggacagcatccccaggcaaagggccaggcacagcaatacaccaatgattcttcgcagtttcaatttgatatcctccatgggtctagggacggtttttccgggaaaaagggaaaattttcgccggatgattgcgtctgtccccgttttgtggcatgattgtattgtacagttccaaccccacggacgcaaggaggtacccatgaaattttcacttacatctttgccaggccgtctgctggctctggctctttgtttttgccttgtcttttcccttgctcccgcccttcaggccgcggcccagcccttttccgatgtgccggcggacagctttgcctatgaggacatcctcttcctccgggagcaggggatcacccagggcatcggtaacaatgaatacggaacctatctcaccttcaaacgctgcgactttgtgctcatgctggggcggctgatgggctgggatctatcccagactcccaaggcctccgatgtgccccaggatcactatgccgccggagcggtggccgcggccgaagctcacgggctgatcgaaagcgccggctcctattctttccgccccgatgatgccatcacccgagaagaaatggccgtgatgctggtgcgggccctgggcatttcctcccaggccgaaggcagccttgcggccctgtccctggacaatcctttcctggatctgtcccccgaccagaacccggatactttctacggggtgcgcatcgcctatgacctgggcatcatccagggacagacaacagaaacccccaccacctttgatcccaaaggcaccgccacccgggaacagaccgctgcgatgatgatgcggttttaccgtgtgtcccaaaccgatctttcggagctccacggcttttatgccatctcttcctattcccaaaaggacaaaatctcttccctcacttccatgaccaccggctggagccggatggaatatggagaaaccggcccttggctcaacaccacttctgctggcaacaacgactgggccgtgcccgccggaagccaggagatcgtcgatctggccaaggagtcccaggtgtccctgctgctgggagtctatctggatctgagccaaacttatgacgggaacacccaggcttccctgatcctctcagaggaaaaccgggaagctgccgtgcaggccatcgtggattttctccgggaaaatccctcttaccaaggagtgaccatcgactttgaaggctttgtctcggaaagctacaaagcccccttcaccgcttttctcacccttttgcgccaggaattgaatgaaaacggctcatacctgttgtattgtgccctgcctcccatggaaaactaccgtggctatgactggcgggccattggcgacattgtggacaaagtgattctcatggcccacgattacgaccccaacacactgccggactatctccagaccgacattccccaaacacccctggcccccttcaacaaggtctaccaggccctgcttcagatcaccgacgagcagaccggcgtgcgggacaaaagcaaggtgctgctggccatctccttcggcaccacccggtgggagtataccgacaccaccttctccagcaccgccaaaacctccagctatgaggccatccgcaaccggctccagtccggttcctcggaatattactttgatgaaagttctcaaagcccctacctctactattacgatgacagcgacggcacctacaatgtggtctggtacgaaaatgccgacagtgtgcagatgaaatgcactctggcccaggccttcggcatcggtggcgtctccttgtggcggctgggcctggtgcccgatgaagatggacttcatttgaatgtgtgggagtccattgagaacgaattctgatataatttgttgtttccttaaatttatatacaaaaaggagcgattttagtatggacaagaagtatgtagactacatggtggagcagacccagaagctgctggccatccacagccccaccggctacaatcaggaagtacagcagtatctgcgggaagagctgggacgcatcggctatccggagaccaccggtccccgccgcggcggcgtggcttgctgcctgggcggcgaaggcaaccccatcaccctgaccgctcatgccgacaccctgggtgccatggtccgggccatcaaggacaacggcactctgatgatcacccccatcggcggtctgaaccccaacaatgtggaaaccagcaatgtggagatcatcaccaagttcaatggctcctattccggcaccatccaggtggaaaacgcctccacccatgtgaatccccatgtgaacgatccccgcagctttgacgagaacatcgaagtggtcatcgacgaggatgtacactccgtagaagatgtgctggctctgggcatcgagaccggcgactttgtctgcctggacccccgcaccgttgtcaccaaatcgggctacatcaaaagccgcttcctggacgacaaggcctgctgcgccattctgctggcctatgccaagtatgtaaaggacgaaaaggtgcagctgaagcgtcaggtgtgggtgcagttcagcgtctatgaagagatcggcaccggcggcgctaccctcatcccccgggatgcccacgacatcatcgccgtggatatgggctgcgtaggcgagctgcaggccggcaccgagcggaaggtctccctgtgcgccaaggactccaagggcccctacagctatgagctgctgaaagagctggccctggcctgcaaggaaaacggcgtggactatgccgtggacacctattaccgctatggctccgatgtggaaggcagcctggtggccggctacgacgcccggcatatgaccatgggccctggcgtttatgcttcccacggctacgagcgcactcacatctccgctctggagcagaccttccagtgcatccgcttctacctggaaaaataattcttccatacagcgtaaaaaatcccgcacctatcgaaaggcgcgggatttttatttttgcacttttaaaagcttagacttagacgccacaggcttttttcagctcatccaccttgtcacacttctcccaggtgaactccggctcgttgcggccgaagtgaccgtaagcggcggtcttctggaagatgggacggcgcaggttcagatggcggatgatggcggtggggcgcagatcaaagcactgacgcacggcctgctcgatcttttccaccggcacagtctcggtgccgaaggtctccacggccaccgacaccggatgggccacaccaatggcatagctcagctgcagctcgcactttttggcaagacctgcggccacgatgttctttgccacataccgggccatataagcgccggagcggtccaccttggtggggtctttgccggagaaggcgccgccgccgtgacgggcatagccgccgtaggtatccacaatgatcttccggccggtgagtccgctgtcaccagccgggccgccggtgacaaaacggccggtgggattgatatagtacttggtgttctcatccagcagattctgggggatggcttctttgatgacatgctccatgatgtcctggcgcagcttttccatctccacttccgggccatgctgggaggaaaccaccacagcgtccacccgggccggaacaccatcctggtattccactgtcacctgggcttttccatcggggcggagatagggcagaaccttctctttgcgcacctgggtcagctggcggcacagcttatgggccagcataatgggcatgggcatcagctcgggggtctcatcgcaggcaaagccgaacatcatgccctgatccccggcgccgttgtcctcgtcctgctccgcctggcttttggcctccagcgaacggtccacgcccatggcgatatcgctggactgttcgtcaatggaggtgatgacggcacaggtgtcgcagtcaaagccgtacttggcccggtcataaccgatctggcgcaccacttcccgagcgatgtggggaatgtccgcatagcagctggtggtgatctcgcccatcacattgaccatgccggtggtgcaggtggtctcgcaggccacccgggcctggggatctttttccagaatggcgtccagcaccgcatcggaaatctggtcgcagattttgtcgggatgtccctcggtcaccgattccgaggtaaagaatcttttttccatggatatgcttcctttctttgttttcatagcgtccaggtagagccgatgcctgacaggcaaaaaaagcgccccgccaggcggagcgcaatcagtcgaaggtccctcatctctcgatacactaccgccggatttggcaccttgcaaaaatgcaggttgccgggcttcatcgggccgttccctccgccactctcgataaggctatgaagttttttctttctgcattatatcagttttttccccattgtcaatccccccgttgctttttccaaaaatgtgtatcttttccgtaaacatttcttttttcctctcgacattggctttctccttgattataatcaaagaaaacattgaacttcaaactttcaggcccgagcctgaccaaggagagtgaaacgatgaatcccacttcccagaacggaaaaaagccggaaggccccaagcgcctgcggcgttccctgattttttactatgtggggcttttgctggttgtgatcgtgatgaaccttttgttcagccgcgatcccattcagatcgactacagcgattttgtgaaaatgctggacgaaggcaaagtggccgtggtgcagctgacccaggatgaaatcgccatcaagcccagcgacaaaaatgaccccaacatctatgtcaccgccgatgtgggcgatcctcagctgaccgaccggctgctcaacagcggcgtccagttcggcggcgtcattcaaaaagagctgcctgctgcggtatccatggtgctcagctttgtggtgccttttgccctgatggcgctgctgggcacattgatgttccgcatgatcgccaaaaaaatgggtccgggcaacgccatgtcctttggcaagagcaacgccaaagtctatgtggaagcccagaccggcaagacctttgccgatgtggccgggcaggatgaagccaaggaagcccttcaggagctggtggacttcctccacgccccggaaaaatacagcaaaatcggcgcccagctgcccaagggcgcccttctggtcggccctccgggcaccggtaaaaccctgctggccaaggcggtggccggcgaagcaggcgttcccttcttctccatttccggttcggaatttgtggagatgtttgtgggcatgggcgctgcccgggtgcgggacctgttcaaacaggcccaggaaaaagccccctgcattgtctttatcgacgagatcgacaccatcggcaaacgccgggactccaccatgggcggcaacgacgaacgagagcagaccctcaaccagctgctcagtgaaatggacggctttgacggcagccggggcgtgatcatcctggcggccaccaaccggccggaatctctggacccggctctgctgcgtcccggccgcttcgaccggcgcattccggtggagctgcccgatctggaaggacgcattgccattctgaaggtccatgccaaagatgtgcatgtggcccctggcgtggatttcggtgtgatcgcccgagccaccgccggcgcttccggcgcagagctggccaacatcatcaacgaaggtgctttgcgggctgtgcgctgcggcagagaccaagtggaacagcaggactttgaagaagctgtggaaacggtcatcgccggttaccagcggaaaaactccgccatcaacgaaaaggaaaaacagatcgtggcctaccacgaaatcggtcatgccttggtggccgccaagcaaaaggacagtgccccggtgcacaagatcaccattgttccccggacttccggcgctctgggctacaccatgcaggtggatgaacaggagcggaagctgctcagccgggaagaggccctggccaagatcgcaaccctcaccggcggccgggccgccgaggagctgatcttcggcaccggttcctccggcgcttccaacgacatcgagcaggccaccaagctggcccgcaccatgatcacccgctatggtatgagcccccactttgacatgatggctctggaaacggtgaccaaccagtacctgggcggggacacttctctcacctgctctccctccaccgccgccaaggtggacgaagaggtgcttcaggtgatcaaaagctgtcatgccaaggcctcggagattctggcgcagaatgtggaaaaactccatgctctggcggcctatcttctggaaaaggagaccatcaccggagaagagttcatggccattctcaatcagtaaaaaagatgccctcaaggaaaatgaactgccccatcttgtgcggacagtacaaaaaagccccctggcaggaaatattaag

SEQ ID NO: 3469 - DNA, 32759 bp, Unknown
  16S sequences of unknown bacteria
ggtacagttatttgcagtatgatgtactaggccctgtcagagctgcagggatggattgcgaatatctgcgttgacgattatcagaaaagcggggaaataaaaattggagacacgggaaatattacagatcatcatggcaggacttggcagcattggctttgccctgatctttcagctgcgcggtacgaagctgatcacgatcgggctcggcggagcactggcatggtttatttttctgatcggaagaatgcggggaaatgcaatgatcggactgtttctggcggtgacggtggcggcgctgatcgcagagctgcaggcccgcatccgccgcacgccggtgctggtcatggaagtaccattgctcgttccgttgattccgggcggagatttgtaccgcatgaccgtatcgattatgaaaaatggtatccaggcatcgctcggcgcgtttgtctggcttgtgcaggaagtatttatcatcgccgcaggcgtgatctgtgtgcagaccgtggtgactgcagtagtaaagctgcaacggagcagacggcatacggagagcagtatcgatcagagctgagcagatatccgcagtgaagacatggattttaactgcaaaaaggctggtaaacgatttggctgtccggctcaggacagaaatgtcacatccacctctgcgacctcgctgtctgtcccgattcgcatggccggcccccagacgccgacgccggaggtaacgatactggtcatattgccaaggacgagcttgccgcaggaatttttccagccgatccgggtcgtgatattgccggggaagagctggccgtcgtgtgtatgaccggagaggacgagatcggcatccgcggctgcgagctcggaaagctcggatggctggtggtcgatcacgattaccgggcgtgaagcatcgagcggccggatcagctctgcggcagtcttgcggatgatgccgcttttctggcggcaggaggcatcgagccgtccgatcaggtaaaaggaatcattgatgagcacggtctcatcctttaaaagccggatattcgcatcgacgagaaactgatccatgcgtggatcgctcgtcgtagcggcgcttccggaattgaaggtgaaaccggcgagaattacctcatcaatatcatggttgccccagcaggcgtaggagccgtaggtgctggaaaggctgcggaatacggctgcaatctccccgggcttatcaattgcgtcaaaatcattatcgaaaatatcaccggcatagatgatcagatccggctgcatcctgtcgatgatttttttcattttccgggcatgcggcagaccgacgcttccaccgaggtgcagatcggcgataagggcgatgcgcagagcgggtgccgaagcttctggcggacactttgtctggcagtccggcgtatgtgtgaaagaggctgaaagccttttgcagatattcacatcgtaatgctttttcctgatttttcctgcatgaacaatcccgtacaccgagagcaaaataacgccaaagaaaatgattccgccggagatgcggtagctgtctatatcgatcggatcaaagagtgaacgtttccgggagagacgcagcagaatccgcccgagatcaaacagcagcagaaagatcagcatgtacatcagcgtgccgagccagtaattgctgatgatgcggcttacctgcttccatttgccatgggaaaaggcagccatcagcgggcttaaggcaatgagcacatagcaggagagaaatggcgcaatgaaccatggcgttccgagaaaggaatgcagggtgctaaaccagagcagcatccggctgatgagatagagatctagtaaaatataaagcggagagagcagtacggcacccatataagacctccatgtactagaaatcacagaataaatatgttaaagagagccgccataattatttacggcggctctcataggggtcaaaggtaaattccaaatgcttactcagcaacagcctcggtcgtagcttctgcagcttctgtctcagcgtcagcgacaaggttttctgctacatcgtcaagagaagtagcttcgcctgcagcgactgcatcgattgcttcctgcggaacagtgatcgcagcgacatcaccgtaagaggtggtagcattgatggagaagtcattcagtacgagctctgcgctggtgccttcctcgcttgccagtgtggaagcgatcagagaattcagaacagtaaggtcgctgtcgttcatatccattgtcacgctgaccggaaggtaagtagcagcgtctacgtagtaggtgatgttcagcttcagaccatccagatactgcattgccatagcgacatcctgatcagaggtgagatcctcaccggccagctcagaaaccttcttcaggacagtgtccagtgtggaggagtcgatcacggtggagagctcgtagcactcagtgccatttaccgtagctgcttccggagcaagggtaaaggtaaggccccagtctgccatatctgcagcggtcagagatttggagagatccatcagggaggtcatatcaatgttcgaatccttgttgtatgcccaggaaccttcgtcgtctgtggactcctttgtgaaggaataagtctccagtccgccatcctcagcggtaacagagtagctcttcatctccatgtgctgaccctgtccgagtgcggagagatccatgctgccgactagctcggttgcgaccggatccatcgtagcgttcacatcgaaggtaccgctcatcgtgatcccgagagaagaatcagtcgtgccgtcgcttacgttgatcgctgcgtccagattcattcccatgctcatagacgcgccggatgcgtcagcggtcgcgtcgagcattttctggtagaggctgtcagcggtctctgcgctgtcaaaaccacacagcatagaagctgcgccaagtacggtgagtccaagtaataattttttcttcataactcagattcctttcttattaaataaaataatagttgtgtgagatgtctgcatccaatgattggacggggaacaccaccagttcagaatattatagcacccttcattttctgtgtccagagaagaacggaatctgtgcgaaaattaaggaattctgaaggtttacgcgaaaaaaattccttgaataataaggggagtgtgatatattaactccgtaggaaaagacttatcattaacaacataagaaaaggaaactgagatggattatacagaagcggttgcatacatagaggaaacaccaaagtttacaaaaaagaacaaaccggaaaacacgtgggagctgattgagcggatcgggcatccggagcgccggatgaaggtgatacacgtggcaggaacaaacggaaaaggttcggtctgtgcgtttctttcgtcaattctgacacatgccggatatcggacggggctgtttacctccccgcatctggtcaatattacggagcgttttcagatcaacggagaagaggtctcacaggaatgcttcacctgggcttttgaggaggtgaaaagggctgtcgatgcgatgatagcggatggctatgcgcatccagcttattttgaactgctctttgcagcggggcttctgatttttcagagggagcaggtcgagtatctcatattggagaccggacttggcggacggctggatgcgacgaatctggtcgagcatccgatcgcgacagtgctgacgacgatcagtctcgaccatatggaatatctcggagatacggtcgcgaaaatcgcaggggaaaaggccggaatcatcaaggaaggcgtgccggtgatctttgacggacgcaatccggagtcacgcgaagtgatccttgcgacggcgaaagagaagcatgcaccggtgtgggaataccggcaggagatgtgtaaaatactggataagacggacaaaagcattgattttctgctggattgcagttatgatgaagggaatggcagtgtgctttcgattaccgtgccgtatctggcagagtatcagctggtgaacagttcacttgcggtcggggcgattcacatgatcgatccgcagcatgtgatccgtgatgaggtgatcgcagaggggattcgcagtacgagatggcagggacgcatggagaccgttctgccgggtgtcgtgctggacggtgcgcacaatgcagacggcatcaaggagtttatccgcacggttgttggcgtgcaggagcaccggagtgtatcactgctgttttccgcggtagtggaaaaggagtacgagaagatgatcgcagagatctgtgagagtgtacatccgacctccattgtcgtgacacagatcgacggtgcacgtgtcgttccggcggaggtactctccggcgtattccggaagtatacggacgctgagatttttaccgagccggacgtggagaaggcatttattcaggcactggtaaaaaaaggtgacggaatgctgttctgtgcgggttccctgtatctggtaggggacatcaaggcaattctgcagcgcaaggagagcaatgccgaccgccggtagagctgcatacatgaagagaccggattgcgaatgaccgctttgcggaagcggtaccgagatgaaaaagtcaggagatagaatgattaattacgaagaagaactgaagaaatatcatccgagcatggatgtcaatgaggcagaggatgcgatctacagccgtgatttaacggatgtgacggatatcctgcgggagatgatgaaggacgaaaagaaaaataaaaggcaggggatggcatgagatgtatttactgtaacacaccgcttgccgccatcgactactgcccgggctgtggagcagatgtcaccttacagaagcggatcgtgaggatctcgaatcttctgtacaacgagggactggagaaagcactcgtacgcgatatggagggagcgatcacctgcttaaagcgcagcctgaagtttaataaagaaaatatcgatgcgcggaatctgctcggcctgtgctactatgagaccggagaggcagtgtcagcgctgtgtgagtgggtcatcagtaaaaatctgaagggcgaggacaatatcgcagattcctatatcaatgagctgcagtcgaataagaaccggctcgatacgatcaatcagacgatccgcaaatacaatcagtcggtgctgtattgcagggaagacaatgaggacatggcgatcattcagctgaaaaaggtaatcagccagaactcaaagtttgtaaaggcataccagctgcttgcccttttgtatatgaagcggcaggagtatgaacgcgcacggaagcttctgaaaaaggcggcgaacatcgatacgacgaatacgacgactctgcgctatctgcaggagatcgaggatgcgaccggaaagagcacacgggtcgggaaaaagcactggcgctttgagaaggaaaaagaggaagcggtatcaggtacgctgcggtatatgagcggaaccgagatggtcatccagccgacgacgttccgggacagctcgacgattgcgacgtttatcaatatcattctcggcattttgctgggaggtgcgatcgtctggttcctggtcgttccggcgaaccggcaggaggtcaacgatgaggcaaaccgtcaggtgacggatgccaatacaaagctggcatctgaggcggcacgtgcacaggatctgcaggatgagatcgatggctacaagagtcaggtcgacagtgcaaaccaggataaggaagatgccttaaagaaagcacagagctatgacgatctgctggcggcggtcaataaatatgtgagcggggatgtgagcggagcctccacggcggtggctgcattagatgcatcggactttgatggtaacgcaaagacactttatgacagtatggcatcggctgtcggcacaagcctgttcagccagtattacaataccggcgcgacggcataccttgcaggcgactatacgacagcggcagatcagctccagaaggcggttgatgcagatacagagcggaaaagccctgattatgcgcaggcgatgctctgccttggtatttcctattaccagctgggacagcaggataaggccaatgagattctgaacaaatttacagaatactatccgaatcaggcgagtcaggctcagggctatatcacctccgggtcgggtaagacgtccggcagtgataatgcggcggatgtcagcgggcttggagatgcggcgaccggccagacagcgaacaatacgcggacctccacgacgaccggaggccaggacattacggtttatgaccaggatgggacgacaaccggaggttcacttccggcgtctgattcctacgtggcatggacagatccgacgaccgggctgcaatatgaccagtatggcaatctgatatccgggcagtaaagcgacagcgaccgttcatttgctgtatggaaagcagctgacggccgagacagagaattgaaaagtacatagtaagagaagcgcaaggcgtggtacagatgaaaaagaaggagaaatctccgggctgtaccgcgcctttttgctttggtgagcccaggccctgtcagcagagctgcagggatggattgcaaatgtccgctttatgcaatgagcagcggactgagaatatccgctttgacaggaaatgtacagaacagattttgagagtatggggaaaagaaaaggaggactcagtatggatcatatgtttactctgaccggaacgacacttacggtacatctgccttcagaggtagatcatcacagcaccgagctgctgcagcgggagacggatcagctgattcagagccggaatatccggtgtattttatttgatttcggggataccgtgttcatggacagctccgggatcggaatgctgctcggacggtataaaatgatccggtttgtcggaggtacgatggcggcgatcaatgtaaaggaacggatgcgccgtgtgctgctgctatccggtgtgtacagggtgatcgatatttatgaggggctgccgcagcagtcaaagctgctgtgaaaacggaagcactcgccaaatccgatggagacagttcctggctggctttgtcgacgaagtgtgggggtgttttgcaaaaagatggcggtgacggatcatgatggacggaacagaaagagggggagagcgcatgcggaaaaatgaaatgaaactggaatttgacagccgttcctgcaatgagggatttgccagggtggcggtggcggcatttctgacacagctgaatccgaccctggaggaggtcgcggacgtcaagacagcggtgtcggaggcagtaacaaatgtgatcattcatgcttatgaccgggaggaggaaaaggtactggtacactgctggatcgaggatgagaccttatggatcgaggtcattgatcacggacggggcatcgcagatgttgcgcaggcaatggaaccgctctatacgacacggcaggagtgcgaccgtgcggggatgggatttacatttatggatgcgttcatggacacgctggaggtgacgagtgcgcctgaaaaagggacgacagtacggatgagccggcacatcacacggaaaaatgtggatggtccgtttgactatcgggatcataaacttccggttgcaatatgccgatgagatgctgcccggaatttgtgctggaaggaaattattatctgtataattttgcgtgggcagaataaactgcgttattgcataaaaaggttgccagtcgtagggaaattgtgaacagcaataaaatagcagaaggctttctttttactcgattgcggataagtgtgcagaagcctgcataattcaagatgaaaggcaggaaatgacatggagcataccctcatgctgcttcaggacgcacacgaaggggataaggccgcgagggaacagctggtcagggaaaatatggggctggtgtatgcggtagtacagcgctttgcgggaaggcgcagctgtgaaaaggaggacctgatccagatcggaagtatcgggctgatgaaggcgattgaccgcttcgacctcacctacgaggtctgcttttcgacttatgccgtcccgatgatcgtcggagagatccggcgctttctgcgcgacgatgggatgatccgcgtcagccgggccttaaaggaagacgcggtcaaggcataccgggcgcgggaggagctggagcgggagaatggctgtgagccgaccttagaggaggtagcagcacgtgccgggcttacgccggatgaggtcgtgctggcgctcgaagctgccgcagaggtagaatccttaaataaaccggtcggagagggagacggtgcatcgctcgtactcggtgaccggctcatggatcagcgcgacgataccgagaccctcctgaaccggatgctggccgggcagctgctgcatctgctcaaggaggaggagcgtcgcctgatcgagctgcgctactttgagaatttgacccaggtgcagacggccggggcactcggcatgacccaggtgcaggtgtcgcgggcagagaagcggattctgaggaaaatgcgctcagaaattgtataaatttctcatataggacagattatgcttgacagatggcgctttgcgatgttaaataaataacgtgattgataaaaaaatgacatttaaccgggcgcgggtcgattctgtgaagaaagagaaagaagatcaccgcccaattcaaggaggacagcatgagcgctaaaattactatcattggagcaggaagcgtaggatctactattgcatatacactggcgatggagaacagcggagcttctgaaatcgtactgattgacatcaataaggaaaaggtactcggcgaggttatggatatcgcacagggaaccttcttccgtgatccggtatccatcgtggcgggcgattatgaggatgcaaaggattctgacatcgtcatcattacttccggtatcgcacgcagaccgggtcagacaagaatcgagctgacccagaccaacgtaaatattcttaaagacattactccgaagattgtagctgtagcgccgaacgcaaaatatgtgatcgtaagcaatccggtcgacatcatgacctatgtatttacgaagatttccggtattccggagagccacatcatcggttccggtaccattctggatactgcaagactgcgttatggactgtccgagcattataaaattgcacagaaaaatattcatgcttatgtatttggtgagcatggagacagcgcatttatcccgtggtctctgactgatatttccggagcaccgatggagcgctatgcagagatcatgaagggaacgatggacttcgagccgctcgaccgtgaggcaatgaccgagtatgtacacaaggcaggcggagaggtcatcaagagaaagggtgcgacattctatgcagtatccgcttctgtatgccagctgtgctctctgctgcttgcttccagcgattctgtagcgaccgtatctacgatgatgcacggtcagtacggtgtagacgatgtgtgcatcagtacgctgacgctggttggaccggaaggtgtaaagtgcaagctgccggtagcactgactgaggaggagaccgaaaagctgcatcagagtgcaaatacattaaaggatgttatctcacagatcaatctgtaagctgtgttagcacaagtatacgcgtaatcttttagcgaaagccgttcgcttcagacaggactgtctggtcttgtctgatggtgggcggtttttcttattttacaggaaattgtgtcctgcaaagcaaaaatggttcgcgagaatgcttatctgcattcaaaaaaggaatgcatcacaatcgaaaaagaatggataaacaacccccagggagggttgtatggttttttttaatttgctaaaatcataacgattgcgattcgtgtgactccccctgcggcattgctgcaggggttttcaatgaataaagaatgaataaagaataagtgacaaaaaagataaaggagatcgaaaatggatacacgacagctgaaattttttgtcgcgtgcgcgaaggccggttccatcagtgaggcggcgcggaagctgtattcgacgcagtcaacggtcagcaaggcaatcaaaaacatggaggaaacaatgggaatccggctgtttgaccggctgccaagagggatttctctgacggcacagggacagcaggtataccgctatgcctgcaagatcgtcagtgatatggaggtactggaggcatttccacggaaagggcagacacgctggattcgtatttctctgaatccgagctcgtggttcgcagaccggttcgtacagttttataaggaaacgacggagcagaattatcattatcagatctatactgcgggtgtggaaaccgtgctggagcgggtaagagattacctcgatgacgcaggctttgtatatgtatttgaacagcagcaaaaggaattttcaaatatgctggccaagagccggctgacctttgtcacattgcatgaaagcgagctaagggtctatccgggaaagagaaatgcgctggccgctcaggagggcgatacggtgtcgctggaggagctgaaggatcagcggtttattcagaattatcaggatgaatacatttccattgaaaacagcgcagaggaaaatgttctgagctggcgggagctggatgtcgcagtcgttacaaacagtgattatattatggataaaatgctgaaaagcagcgatctagtaaatttaagcggcagctatctctccgaagatcaggatgccaattatgggaagcggctggcgctgccgcataaccggattcggttcggatatgtgatgcgcaaggaagagcagctggatgaaggtgtgtgggagctgatccggtatctggagcgccagcttcgaagaaatccacaggccgatgatttagctatataaaaaaggaaggtgcacaatgaaagagaacacagcagagcagataacgatattggaggatctgaccgattactggacagaacgtgcgcacagctacagcgcgcagaatctggcggagatgaatgactggagaagagacgcatggcgggaactgattttagagcatgcaccgaaaaaggagtgcttgcgtatcctggatgtcggaaccggtcctgggttttttgcaattaatctggcactggcaggacataaggtcacggcaatcgatgtgacggagcatatgatctggcatgcaaggaggaatgccgagagctatggtgcagaggtggattttcaggtacaaagaggagagtttttaccgtttgaagcgggcagctttgacctgatcgtcagccgcaatgtgatctggaatttggaatatccaaaagaggcgcttgcagaatgggcgagggtccttgcaccgggcggacggatggtttactttgatgcaaactggtatctgtatctgtatgatgaagagcttcgtgccagaagggaagcggcgcttgccgactttgctgcccgccacagctcgtaccatacagcaaacaacctgtcgccgaagcgtatcaagggactggagcagacggcccgttcgcttccgctttcccgtaagaaaagaccggaatgggactgtgaggtgctgcaggcgctgaatatggacatcctgcggatcatcgacgacattggaccgggcgtacaggacccgatcgaatgggagcgggatgcgccgattcatacgttcatggtctgtgcacagaagggtaccgcagcggataccgataaggatatattatgaataggatgcggaaatatctcgaccggcatatcgcattgcagtatgtgcttcgaagactgatttctctgattccgattctgcttggtgtgacgattctgacgtatgggctgatgtatatttcgccgcaggatccggtggagatgatgcttcagggacaggggacagctccggatccggaggtcgtagcggccatgcgtcatcagctcgggctggatcggccgtttttggtacagtattttgattggctgtggagatttgtacgtggagacatgggagtttcctacatagacggcgctgcagtatcgggaaagctgctgatggcacttccgaatacgttaaagctgacggtcgcttcggtaatcgtaacgattttgctttccgtaccgcttggaatccttgccgcggtaaaaaaggggagggtgacagacgcggtcatccgttttctgagctttatcgggaacagtcttccgaattttgtcgtatctttgttgcttttatacttttttgccttaaagcttggctggtttccggttttgtcgtcaggttcaccgatcagtctggtgctgccgacgcttgcgcttgcgatcccgatgaccggaaaatacatccgtcaggtgcgggccgcagttctggaacagcttggcagacagtatgtggacggtgccgtttccagaggcttaaagcgccggaaggtattgtttggctatgtcctgcagaatgcgctggtcacgattatcacgctgatgtccatgtcaatcggttccctgcttggaggaacagctgcaattgagatgttgtttgtcatgccgggaatgggctatatggtaacaaacgctgtgaccggcagagattatccggtcattcagggctttgtcgtctggatgagtgtgatttatattttcatcaatctgctgacggatctggcctattattatctggatccgcgcatcggtgcgggaatggaggtgaagtgatgcggacatctgtgcatgcaaaacggaagatgctggtgtatctgatcctctttcttgcattgtgtatcttcagtctgattgcagattcgctggccccacatgatgcggagctggtaaatctgctggaggcaaaaaaggcgcccggaggcgaatatctgatgggaacggactggctggggcgttgcatctggtcacggattctttccggcgcatcaagctcgattttcgcatctcttatgatcgtggcgctctcaatgctggtcggctgtaccatcgggctgatcagcggatatatgggtggtatcgcagacgaaattatgatgcgcattgtggatgtgttccttgcatttccgggaattgtactttcgattgcggttgccgggatgctgggtccgggaatccgaaacggtgtgcttgcgctggcagcgaccggatggacccagtatgcaagactgatccgaagctatgtgctgagccttcgtgaggaaaactatgtgaaggctgcaaggctgaacggtcagagcgagtggtcaattctgctgcatcatatatttccgaatgccatccgtccggtcgtcgtgaccgggactctgcacttaagcggagcgatgctcagcatttccggcctgagctttctcgggctcggctcttcctcggcggaatggggaagcatgctttcagaaggacgcagtctgatgcagcagtgcccgtgggtggtgctgtatccggcattagcgatctttatggtcactatattatttaatcttttcggagacagtgtgcgtgacgccctggatccaaaggaaaccatgaaactgtaaaaacagtaaggagaacgagcatgaagaaaatgagaagaatggcggcgctgcttttgtcatgtgtgttaatagcggcatgtccgggcatcggaagccgggcagaagaggatacaagaggggattttgtgtttggcgattatgtgggggatgtggatcctgcatccaatgcttatgcctgggtgggcatgcgtgtcggtgtgatggaatccctgtttaagttggatgacggcatgaacgtacagaaaaatctggtggatgactattccgtatccgaggacggactggtgtggacgcttaagctgcgcgacggcgtcctgtttcagagcggcaatccgatggatgcagaggctgtaaaggcatctctggagcgcacctgttccatgcagagccgtgcagacggggagctgggcattgcgtccatggaagcgaacggaaatgtgctgacgatcacaacgaagaaaccgaacccgactctgccgaactgtctttgtgatccgtattccggcattgttgatgtaaagagtgtaggggatgacggcgatgcaacgatcggtaccggtccgtttaagcttgtggagtatgtggaaaatgagcggatggagctggatgcctttgatgattattgggcaggaaagccggcgagcaaacatgtgacgatccgttccatcagcgatctggatgcgtccagcctggcactgcagaataaggagctggatgcctgctatggcctttcctatgatgcaagagacctctttgacggaacgcccggatttaagatttcacaggcggcaaccggaagagtttacaaggtatatttcaatctggagcatgcatttaccggggatccgaatttccgtaaagcggtctgcatggcgatcgacaagccaagctatgcgcaggtactggtaaatggcgcgggaacaccggcaaaatccagcttcccggcgaccacagctgttgcggaggcaaccgatgtatcctccgtaccggagtttgatatggatggggcaaaggcgcttctggaagagagcggttatgtggatacggatggtgacggaattctggaaaaggacggagagaaggtatcgcttcagatcattacctacggccgtaccggactgccgcagacgagccaggctctgcagtccgcactgcagcagctcggaatcgaagcaggctttgagcagctggagggcaccgacgaccgtggccatgcaggtacgtatgatctgagtgtgtatgcggagatgacgcttccgaccggggatccgtattcttacctgatgaacaatttcagcacagacggaatacagaacttcggaaaatattccaatgcagaggtcgacgcgcttctggaacagcttgcgtcggagtttgataccgataagagaaatgagctggcagcacagattgacggaaccgttctggcggataattccatctgcaatgtatttcatctgaatatgtatatggcgatgaaggatactgtagaaggtctgaatcagtctccggtggattattatcatattaactggcagacctgtgtgacagaatagaaaaagaaaagaggagtgctgtggaaaaggaagcgttactggaagtccggtctttgagtgtccgttatcccggcaataaaaaagaagtcctgcatcaggtggatctgacgcttgcgcccggtgcgattacgtgtgtgatcggtgagagcggaagcggaaagagcacactgctgcaggcagtcctgcagctgcccggcaaggtggagatcaccggcggagacatatcttttcgcgggcagaggctgcagacgatgccggaggcaaagcggcgcatcattcgcggcagcggtatgggtgttgtatttcaggagccgggtgcgtcactgaatccgatccgtaaaatcggacggcagttttacgatgcactgcatgcacacgacagaagtatcaccagggcagagacgcaaaaaagggcgtctgcgattctgaaaagcatgcagtttgatgatccggagcgtattctggactgctgtccgcttcagctctccggagggatgaaccagcgggtggcgattgctctggcgatggtgctgaatccggcacttttgctggcagatgagccgaccagtgcgctggatgtaacggtgcagctgcagattgcggaggagctgctgcagatccgtaagcagtatgggacgtcgattctgctgatcacccacaatatgggagtcgcggcgaagctggccgatcagatcgcggtcatgtatgaaggcaggattgtggaatatggcacgagggaacaggtgctgtatcatccgactcattcctacacaaaggctttgctgagggctgtaccgaaactggagaatcgtaaggagcaggcgcgtgttgaagagaacggggcgccggttcttgaagtgaagcatgtggataagaccttccgggagccgggaggcaggcgccttaaggcgctggaggatctgtcgttgacggtactggagggagaatgcgtcgggatcgtcggtgaaagcggatgcggcaaatcaacgctggcgcgtattatcacacggctgattgctccggatcatggctttgtgaagttctgcgggatggagctctcatcccaaaagcggcgggagctgaaaaagacataccgggatatgaaaatgatttttcaggagccgcgttcctcctttgatccgcgcctgacgctcggaagaagcatgcgggacgcattaaagccggtgatgccggataaaaaggagcaggagagggaaatcgggcatctgcttgagctggtcggactggatggcagctatgccggaatgtatccgtggcaggtcagcggcggagaatgccagcgggcggcgatcgcacgggcgatcgcgcagaatccgcgtttcctcatctgtgatgaggccacctcggcgctggatgtgtccgtacaggcgcagatcatggagctgctgacccggatccgcaaggaaagaaagctttcgatcctgtttatctcccatgaccttgcgctggtcagcagcttttgtgacagaacctatgtcctgaaccacggaagagtcgtagaagcaggagagacggcacagattattcatgcaccaaaagagccatatacaaagaggctgatcgaatcattgctgacggtatagaagacagaaggagacaaagataaatgctgacacaggaacagatcaatgaggactggagtgtacgctccgacaattataatcgctatgtagaagaggaatttgccacagagcgtccggcaaagtggctggagcggattgagaaatatgcaccggaggggcatccgttaaagattctcgatgccggctgcggaccgggattcttttccgtattgctctctaaggcgggacataaggtgaccgggatagacgggtcggagggcatgctggagcatgcaagagaaaatgcccgtcattttggcgtgacaccggagctgatgcagggagatttcggggcactgccctttgcagacaacacctttgaccttgtcataagccggaatgtgacgcacattatccgggatcaccttaaggtgtacggtgagtggctgcgcgttttaaggccggaaggcgtgcttttgatttttgatgcaaactggcatctgccgtatcagccgggcagcgtccgggaagaggcaatccgaagagaacggctcgggctggaacagtatcaccgtggctatacgcatgacggttcgtatgaatacattgacagcgcgctgaatccggaaaactatgcggtattcggaatggcacagagaccggattttgatgccggtgtgctcgcacagcttccgtgtaaggacgtatcgtttgaacgggatgtcacagaggagctgtggagtgagcgggagaagctgttttatggagcgacgccgctgtatatgcttcgcgcagtaaaacgatagagagaagctgccggtttggcggcttttttcttttctttcaccattccaaaaagagtcaaatatatgaaaatatggaataggtcaatatccccctgcagggcttatattgccggttggtttctgttatagttgggaaagtgactgaccgcagctgcaaaaatccggggtacggaagcagagaaaaggaatgtacctgagatgggcagaaaagagcggcagaagaagggggcacttatgaaaaaggcaatgacatgttttcttgcatttgcagcagcattcggactgaatgtgtgtgcggcagaggcatccacactcgtatacggaagcggagattatacgagaatcaatccggcgatggatgagcacggagagatcaatatcctgatttttaacggactgaccagccatgacggtgacaatcaggtcgtaccgggactggcaaagagctgggactttgatgaggatacctgcacctataccttccacctggaagaaggtgtaaagtggcatgacggagaggactttacggcagaggatgtaaagtttacgattgaggcgattatggatccggaaaatggttcggagaacgcgccgaattatgaggatgtgcagtcaattgatgtgattgacgatcatacgattgcatttcatctggatgcaccgaacgtagcatttcttgactatatgacgatggctgtgctgccggagcatctgctggcaggtgaggatatgcaggaatctgatttcttccgtcatccgatcggtaccggcccatacaagctcgcagagtgggatgagggacaggcgattacgctggagaaaaatgaggaatacttcaagggcgagccgaagattgacgaggttgtatttaagatcgttccggacgacaatgcaaaggcaatgcagatgcagtccggtgagctggatctggcgctgctgacaccgaaggatgcacagatgtttgcagatcaggagggctatacctgctatgatatgaagacatccgattaccgtggaattctgtttaattttgcaaatgaatactggacggaaaataaggacatcattcctgcagtatgctacggtcttgaccgggaagcaatcattcagtctgtgctgcttggacagggtatgacggcatacggaccgcttcagagaaacatttataacaatgaaaacgttgagcattacgattacaatccggaaaaggcaaaagaggttctggaaaacgcaggctgtacgatgggagaagacggcttctactaccggaatggtgagaagatcggctttgtgatcagcgtaggtgcaggcgatcaggtgcgtatcgatattgcgcaggccgctgcccagcagctgaaggaaatcggcatggatgtgagcgttgaggttccggcacaggtagactggggcggacagatggcatacctgatcggatggggcagcccgtttgatgcggatgaccacacctataaggtatttggaaccgataagggcgcgaactattccggctattccaacgagctggtggatcagtatctgaccgaggcgcgtcagtctgacgatccggaggtacgtaaagaggcttatgcgaagttccaggaggagctggcaaaggatccggcgtttgcattcatctgctacattgatgcaaactatgtagcaaagtcgacgattcagggcattgcaccggataccgttatgggacatcacggagtcggcattttttggaatgtagcagactggacgattgaagaatagataataatttcaatacatttgtcatagacacggcccggacggattggatctgtccgggtatgtgtgcttaattgagcgtatatgtgtttctggaaaaatctgtgcggtaactatagggtcggccttatggcagttcctgtcgggtaaagtaccttttgaccctggtatcatcatcataattatagaatgaaaagagagttcggagggcagaatgtcggatttattagaggttaaaaatttatcagtcagctttgatacactgcaaggggagctgaaggcagtacggaatgtcagcttttctttgcgaaagggcgaagtgttggcgcttgtgggggaatccggctgcggaaaaagtgtcctgtgcaagaccattatgaagctgcttccgtcgactgcgcggatccgggagggaagtatccttgtaaacggaacggacatatcaaagtatacagaaaaggaaatgcaaaagctgcgcggaaagctgttcgccatggtgttccaggatccgatgacagcgctgaatccgacgatgacgatcggcgcacagatcgcggaggcaatcctgatacacgaaccgaagagctcgaaggatgccgtatggaaacgtgtgttggagctgatggagcttgtcggaattgaccggccggctgagcgggcgcgtatgtatccgtggaatttttccggcgggatgcggcagcgaagtgtgctggcaatcgcgctggccgcaaatccggcaattctgatcgcggatgagccgacgacagcactggatgtgacaatacaggctcagatccttgatctgctgcgcgacatccagcaaaagctcggtaccgcgacgatccttgtatcacatgaccttggcgtagtggcaagagcagcagaacgggttgccgtgatgtatgcgggaaagatctgtgaaatcggaacggcagaagagatttattatcagccggagcatccgtatacgaaaggactgctgcggtcgcttccggcgctgtcacatggaaaagaaatgctctccacgctcccgggtatgccgccgtcgctcatccatccgccgaagggagatgcctttgcatgcagaaatacgcaggcgttggcgatcgattatgaagagcagccgccaatgttccggatcagtgaaacgcattacgcggcaacgtggctgctggatccgcgggcagcgaaggcccgggaaaaaatggaacagctggaaaaggcgggacatatcgaagaggctgctcagaaaaaatgggtgagtcacaaaaacggtgatacacagctgcaaaaggctggggaaaataagccggaaattctcctggatgtgcagcatctgacacaggtatttccgcttacaaggaagctggcagtaaaggcggtcgatgacgtttcctttcagattcgccgcggagaaattttcggactggtcggagaatccggctccggcaaatctacggttgcccgctgtgcgatgaatatttaccgcccgcaatccggcaagatcctgtaccggggactggataccaaagataaggcaatcgtgcgcaggaaccggaagctgctgcggacgacgaggcagatcattttccaggattcggcttccagtttgaatcagcggatgaaggtggtcgatattgtgacagagccgatgaagctagcgcacagaaagccggagcgcggcagctttcgggcagaggcggagtatcagctgcagtatgtcggactggatgcggcgtgcctggataaatatccgtctgagctctccgggggacagcgtcagcgtgtggcgattgcccgggcggtgacgatggagccggagcttttgattgcggatgagccgatcgcatctctggatgtgtcgattcaggcacagattgtgaatctgttccggcatctgcagcgttcgcatggcttttccattttatttatagcacatgaccttgcgatggtggaatttctctgtgaccgggtaggtgtcatgtatcatggacggctggtggaggttgcgccctgtaaggagctgtatcagaatcccctgcatccatatacgaaggtgctgcttgcggcaattccggtaccggatccggagctggagcgcagcaggagtataccggtattttcagatcaggcatttctgacagacggggagctaaaggaagtactgccgggacattttgtactgcagacaggatgagaagctgaacgcagacaagcattcccccgattcaagtgcgcggagcgactgcgttcatgagcaagtagcgaagctagtacatcatactgcaaataactgtaccacataacttgcctgaatttccatctgcgacatcagaaaaacttgacgtagcccgctacgcctgcgtttttcttctttgcagaatgaaaattcattctgcgttattagtccagttaatttttgtatgctgtactaggccctgtcagcagagctgcagggatggattgcgaatgttcgctttacataacaggaggatccggcagccggaaatcatggtgccggaaaaggaaagctatgaaaaagaataaattatggtatatcacaaagaagcttcttgtctttgtggcaagtgtgctgattttgtctattcttacattttatatatccagactggcaccgggagatccgcttgtctcctactatggagagcgggtagagaagatgagccccgaggagcgggagtgggcagaggataagcttgggttaaacgacccgatttccattcagtatgtgcggtggctgcaggaagcgctgcacggagatttcgggatttcctacaaatataaaatggatgtgctggaggtaatcagaggacggattggaaatacgctgattcttggcggcattggttttatactgatctttacactggcgctgctgcttggggtactgtgtgcatggtttgaggaccgtctgccggatcagatcctgtgtaaagtcgggacggtcacaagctgtattccggaattctggctgtcccttctgctcatcctgatctttgccgtagagctgcgcgtattgccgagcagcggagcgtacagcattggaaagagcaatgatatcggtgaccgtctgcggcatctgattctgccgatggttattgttgtcgtcaatcatttatggtattacgcttatatgatccggaacaagctgttagaagaggtgcgggcagattatgtgctgctggcaaaatcaaagggacttgggaagcggagcattctctttggccattgtctgaggaatattctgccgtcttacttaagcattatggcgatttccgttccgcatgtgcttggcggcacgtatattattgaaaccgtattttcctatccgggtatcggaacactttcctatgagagtgcaaggtataaggattacaacctgctcatggtgctttgtattctatccggtatcattgtaattctctgcaatatgctggcgcaggccataaatgaacagatcgatccgcgcatccgggcaaagcagatgacagaagagtcggaggtggtggagcgatgagaatatatcgacatcatttgtatgagggcggttcgcaggaatatttaaaggagctgaatgtgtctgcgcatgaaaatacagagtcagaaggaatgaatcatttattttccatcgtcggcattcaaaagccggaagaggaggtcctgtcggtaaaaaagaaatggtaccagggacgtccggttctgtcctgggcaattcttcttttgattctgctcggctgtctgttctgcgatatgattatgaccaaggacccgacttacatggatctgatgaattacaatctggcaccaaacagggaattcctttttggtaccgatacgatgggacgggatattttttctatgatctggtatggcggacggatttccctttttatcggattgctgtccacggtcatttctaccgcaatcgcggttgtattcggcggtataagcggtattgcgccgcagtggctggatacgctgctaatgcgtctgacggaaatcctgctcagcgtgcccaatctgctgcttgtcattttgctgcaggcaattctcgggaagccgaacgttgtgacgatttccgttgtaatcggtgtgacgagctggacgagcattgcaaagattgtgcgtacggaggtccggcagatccgcaacagcgagtacgtgatcgcttcccgctgtatgggcggcggattttttcacatcctgtggcgacatctggctccgaactttatatcatcaattatgttcatggtcgtaatgaatgtccgcagtgcgatcgtttctgagtcaaccttaagcttcatgggcatcggtcttcctctggagatcatttcctggggcagcatgctctccttgtcagaaaaggcgctgctgactggctcgtggtggatcattctgattccgggtattttccttgtcgtgacgttattgtgtatgactgcgatcggaaatgatctgcgcaggcaggtgaatcagaagcaaagcaatttataacagaacgaaaaaagatacctgtggccgcaggtatcttttttctattcaaggtgacttcaaatttgttacatgaaattgactgatcgtgcaaatatattgattggaggtaatgcacaagtttcatgtataacacttattcttgcgggatcataccgcagtgatttgtgctgtccttatattaacagattacagcagtaaaacaagcctcccggggggatgtttttcttatgaaaaaacttttctgatgtatgcaaaataagaatgctcaaattcactttataatcctaaaaaaaagatcaacaaggtaaagcaagacttttgatgatgttttgtcggttttgtgatatgatgatgatactagggtcaaaaggtcatgcgtttcatgcttgcatgaaaaagcatgacttattgacccgcaaaacaccgaaaagtagccatttttcgtagaaaaatgagcggatttgaggtgttttaggattgcgagagcatgaaatgcgaagcaatccgtgtatcattggggtcaaaaggtcaaaaaatattttatacaaatcaggcaaggcgcctgcttctattgtgcagggcaataagcggcaggttgcgaatatccgcttgatcatatatagcacaggaggttttattatggataaattaagtctgctgcatccggcggacgtggagccggagtatcggcaactgccggaggagacagtgcacgatctttcatttgagacaatttgccagggattatcgcagatggaggcagagcgaaatctgatccgtcggattttgtcgcagctttctgcgaagccggaggtcatccggtaccgttgtgatgtgtttgaggatattttaaagtatccgacgctgcggggggagctgcatgatctgctggaccgggttgattttttaaagacgtatggaagctttacgaaggagtcagatgcgtccggcatctgggagctggtgcaccggttggatgagatggatgagtacatccagtgcgtacagtcaatttatcagtctctgaatgaaagggagattcattcggccgggctgttggcgctgaaggagtatgtgaaggatctgtatgaggacaacggtttttccgagctgcagaaagatattgcagagctgaaaaccgatgcgtccgacattaagagtgtgacgctcggcataaatctgaacaaccgctttgagccgaatggtatcggaattgtttcaatcaacagcaaatattttacgaaatccggaatcatctcaaatttctgcgattttctgaatcgcggagatgagctgcaaaaggacaccgaatggaagcagaaatacagcttccgtaccggtggaaacggagtgagtacggcgggtctggaaaagacggcggatacgatgttccgtgcaaaccatccggtcgcgggacttgtgacgccgaccgcagacgcgcgtgcggatgatgtgatgcatacgcttgaccgggcggcgacggcgatgctgtccggcacggtgcgtaagctcaagcagattctttccaggcatgtcaacgtgagtacacaggtcatcgccgggctgattccggagctgacatactacatccgctgggcagagtatattgagaagctgcaggcaaagggttacaccttctgcaagccggaggtgcttttgtcagaggagcgggaaatgcaggcgaagggcatttacaacctgaagctgacaaaggaagatccatcggcaatcgtgacaaacgatctcgactttgaccaggagcatcggatctacattctgaccggagcgaaccggggaggaaagacgacgattacgcaggcagtcggaatcgcgtttgtcatggcgcacggtggaatttatgcaccggcggaacactttgcattcagtccggcagactgcattttcacacattttccggcggatgagaataagacaatggatctgggacggcttggcgaggagtcgaagcgcttccgggatatttttctggcggcaggaccaaaaagcctgtttttattaaatgagtccttctcaacgacctcctttgaggaaggattttatatcgcctacgatgcggtgcgcgcactgcgggatctcggtgcacgaaccatctataatacgcacatgcataagctggcacggaagctggacgagctgaatacagagggcagcggggacagccttgtctcaagtctggtcgcagaggcagaggacggcagacgttcgtaccgtgtgagggtcggacagccggtcggcatgtcctatgcgcgggatatcgcacagaagtatggtgtgacgtatgagcagctgatggagagataacaggatttcgcaaaaaggaatttcgggctgttcaaataaagaaaaaatgcttataatgaagcggacagatatgtattgggaaaggagattttaaattatgagaataccggaagaagctgtattgcagcaggtatatggtgagacgactgagagccgtgcacgctttgagtctcttgccggacattttactgagctttttggaaaagaggagatggagtttttctctgctccgggccgtaccgagatcgtcggcaatcacacggatcacaatggcggaaagatcctcgcagcgagcatcagcctggatacgatcggagccgctgctccgaatggcaccgatatcattgagatcgtgagtgaaggctatcagaaaaaggtggtagtagacctgtctgcgctggagcgtgtgccaaagaactgcggtaccgtatctttggtagcaggcatggcagaggctgcacggaagaagggctttgctgtttccggatttcaggcctatgtttccacgaaggtcatcagtgcggcaggcgtcagctcttctgcttcgtttgagatgctgatctgctcgatcatcaattacttctttaacgatggaaagatcagctatgcggactatgcgaagatcggccagtacgcggagaaccatttctgggataaggcctccggcctgatggatcagatggcctgtgcggtcggcggcccgatccgtctggatttttcaaatgatgtaaaatatgaaaaagttgattttgattttgcgcgctttggctatgagatggtgatcgtcaataccggaaagggccatgcggacttaagccgtgagtacagcgagattccggaggagatgaaggcagttgcaaagtgccttggcggaaactggctggctgactgcagtatggagcagcttctggaaaactatgcgaaggtgcaagcagaggtggcaaacgaccgcgcgatcctgcgtgctatccattacttcaatgaaaatgaccgcgtagagcgtgcagtcgcagcagcggagaagaacgacgggaaaacacttcttgcggtacttgacgaatccggacgttcctcctgggagcttctgcagaactgctatgcgatcgcagactataaggagcagaaaatcgcactggcactggcactgaccgagcagttcctcaaaaagatcggcgacggttgctgccgtattcacggcggtggatttgcaggcgtcatcgtagcgctcatcccgcaggcgaagactcaggagtatgtggactacatagcaaaattcgtcggaacagagaatgtctacccgatgcagatcagggcggcgggagccattcatctggaggcgtaaaacgcgaatgtctgatttactagcagaagatctgttttgacaggagagaaaaaaacgaggtaccgcgataaaatgcgtgtacctcgttttttttagataaaatcgaaataatttcgattttgtttcgacagagaaacaagttgaaacaggaatattattatatactatgactaaaaacagtataaaatcaggaaaatacaaggcaatatgcgcagatgtttcgattgtttcgattcgaagatagtgatattatgtggacgtgaaagcgaaacacctgcgaaacacaataaaacgacggaagaggatgacaaaattggcaacaatcaaagatgtagcaaaaatggcgggcgtatcgatttcgacagtctcacttgcgtttaataatccggaacgggtgacagaagcaacgagagataagatttttgatgcggtacgaagtctgaattatgtacctgcaaatgtaaataaaaagaccgtacttagtaaaaaaaagagtcagtcgattgcggtgatctgtccgaagctggttggtccgtatcatctggagatcatacaagggatcagtgagacgatttatatgaatcagaaggatatggtactgtatgccggcgacgatgcaataaatcgctatctattgaatatcgtagagagccatgcctatcagggcgtgattcttgtaaatgggccaatttatgatgagcgatatttgagggcggcagcagcagctgattttccagtcgtgatgtgctgttttcgggaaagctataaagggattggatcaattctaattaatgaaagtgatatcgggcggagggtggcagaacattttttaaaacggaaattccggaaaatcggaatcgtcgggacaccggcggaaagctcagtcatgagaaaagaatgctttttacagacactggcagaaaaagggattcgtgttccggcagaatgggatttacagtgtgaactggcagaggatccagcctataaaacagtagatcgctttttgcatacccatgcagagtatccggaagcaattttttgccagaatgatgacagtgcaattggagtgatagaagcaatcgaggattttggacttcgggtaccggaggacatttccattattggctgtgatgatctgaatcgcagcaagtttcactctccatcactttccacgatagcgacaccgaagatggaggtcgggatgttagctgtcaacctgttgatgcgggagattgcaggaatgtcatccgaagagatcatattaaatggaaagttgattttaagagaatcttgtctgtaatggatttgaaataaatacaggtaacacgtttttgcaaaaacatgacacataatacgtaacacaaaggaaaaatgaaggaggaacaacatgaaaagaagagttatctgtgctgtattaagcgcaacgatggcatcatcccttctgttcgcaggtggaacgaccgcactggcagatgaggacaaaacagagatcaccgtatggtcctgggatgcaacggtagaggcggcaattccggcatttgaagaggcaaatccggatgttaccgtaaaatttgaaaatgtaggttctgcaagtgaccagtaccgcgcaattgacaatgcattgcaggcaggcaccggatttccggatgtcgcacagtttgagtacttttctgtaccatattttgcagtagcaggtaagcttgcagatctgtccgcacttggtgccggggattatgcatcagattatgtggcagcagcctggaatgatgtacatttcaatgataccctgtatgcacttccgctggattacggcccggtagcaatgttctacaatcaggacaccttcgaaaaggcgggtattaccgaagctcctaagacctgggatgagtactatgaggcagcaaagaagatccgtgcacttggcgatgactattatatctccaatgcatccggtgatattttcctgatcctgtctctgatctggcaggcaggaggaacaccgtttacaatggatggcgatacggtaaagatcgatttctcggatgagaatacacagaaggcactggatttctggcagaagatgatcgatgaggatctgattacaaatgatattggtaactggtctgatgactggaaccgtgcattaaatgacgggacactggcaactcaggtcatcggtggatggatgactgcaaaccttccgccacgtgctccggatgcagctggcaatttccgcgtagcagcgatgccgcagtggaacgaaggcgagaactacagtgctgagaacggtggaagcacactggcaatccttgaggcttctgagaaaaaggaggcagcattcaaattcgttgagtatatcacacatggagatggagtacagccgcgtgtagattctaatgcaaccgttccgaacctttctatccttgaaaacgaggaatatctggcagcaaccgacgattactatggtggacagcaggtaaatcaggttatcgcagacgttgcagcgaatgtaagaaccggatggcagttcccgccgttctttgagtggatgagaagtgagtggaatgatgtagctactccgtatttcaccaatggtgaaggtgatcttaagactgtatttgacaactggcagaagagcagcattgattacggcaacgagcagggctttaccgttgagtaaatacagaattttgccacaataagtggttttgattcgatagatgcgctattctttccggacggaaaagggtagcgcattctttatagaactggtcgaaacatattaaagaggaagaaaattatggaaaaacagacagtaaaaaagagcagacattatcgccggaaacagacaggctggatgtttgttgctccctttggaatcctttttatctttgtatttattattccaattatttattcgatttatatcagcctgtttcaaaataagctgatcggcggacaggtatttgttggccttgcaaattataaaaaactcctggtagacggtgatttctgggatggtgtaaaacgagtaatgctttatacaattattcaggtgccggtaatgttgattatttcgcaggcgcttgcacttggattggattctttgcgtctgcgcggaacaaaattcatccggatcgtggcattccttccgtatggtgttcctgcaattgtaagtaccttaatgtggggatttatgcttggcacaaaatacggcttgtttaaaaatataaacgctttctttggaacagactttaatccgttttcgccgaggtggacactggtttccgttgcagtgatggctacctggacgtatgttggttataatatgttgattttctattcttcattaaaaacgatttcttcagatttgtatgaatcggcggagatggatggtgcaagccgctgggcaattgtccgctatattaagcttccggctttgagaggctctctggtcgttacgattattttttccattatcggaagcttccagctgtttaatgagccgacgatcttaagtaagatggttggaaattcaggaatcactaactattacacaccgaatatttatgtctacaatctggcattcaccggctctcagcaggggtatgcggctgcactagcgattgtgatggcgatcattacgattgcgattgcatacgtcgtacagattaaaggattgaaggatacgatgaagcaaagcgaggagggctgagagcatgaagcgttcagaaaaaaagctttataccattgataatccgaaaaagagtaatttactgacattttttgcgtttttgttttgcatttatacattattaccgtatgcttggttgtttatcaatgcaacaaagacgcaaaaggattttgcatctacatttggattgtcgttcggaaatgaatttgcgttatttgataacatcagacaggtatttacttatcatgatggaatctttgtgcggtggattggaaattccattgtgtatacggtgatcagtgcatttgtatctacgttgtttgcagcgcttgctggctatgcacttgcaaagttgaaattcagcggaaagaaactggtactgctgattattctcggctctatttctgttccgggtattgcacttgcaatcccacagtttcttctgttttcaaagcttggaattacgaatacgatgtggtcagtatttatcccatccttcgtatctccatttggtgtttatctgatgtggatcttttccggacaggcagttccgaccgggttgctggaagctgcggaaattgacggctccgggccatggcgcaccttttttaaaatttcactgccgcttttatcaccagcacttgtcactgtattcttgtttgcatttgtatcggtatggaataatttctttcttccgctaatcatgttaaaggatgcgaagctgtacccgctgacgcttggactgtatcagtggaacctggcaaattcttctgccggtggaagcggtgagatgattcaaaatctggtactgaccggagcactgctaacgatccttccgttgattattgcatttttatgcctgcagaagtattggcagtccggtctggcattaggagcagaaaaaggatgatggaggaaaagcgtatggagtatcgctggccgaaaacaatgtccggagaggaggcaaagctcctgttcggaggagactacaatccagaccagtggccggaagctgtctgggaggaagatgtccggttgatgaaaaaggcaaaggtaaacgtcgtgacagtggctgtctttgcatgggcaaatttggagccggaggatggcatttatacctttgagtggcttgaccgtgtgttggataagctctatgaaggtggtatttctgtagatctggcgacggcgacggcgacaccgccgcgctggctgacgagtgcgcatccggaaattttgccgcgcaataaacagggcgaagtgctctggcctggcagccgtcagcagtggagatcgacttcggaagtcttccgccgatatgcgctccgccttgcggaaaagatggcagaacgctataagaatcatccggcgctggtatcctggcatgtatcgaatgaacttggctgccacaaccgttttgactattcagatgacgcggcacttggattccagaagtggctgaaaaaccggtatggtactcttgaggcactcaacgattcctggaatggttctttttggtcgcagagagtaacggactggtcacagatcattccaccacgg

SEQ ID NO: 3470 - DNA, 2103 bp, Unknown
  16S sequences of unknown bacteria
tctgtatacaggtcacccgggcggccccaggtcaaaagctcccgtccctcgtcggagtacatccagtcaatgtaagcaagcgcttcgtccagatgttttgtctggctggaaacgacaaagccgagcaaaacctttgcggaatacgcgaactggttgccgacatcctcgttgaatgcgggcggtaccatataggccatcgtgaactcagggttgctctcacgcatggctttgttgaagaagtcgatgcggctgaggtaatcgatggtgatgaaagaatcgctgttggccattacgtcctgccagcccttggtgtcgatggtcaggaagttgggcagcagcaggccctctttgtaaagcttgttataaaattcaagcatttctttgaattcgggagaagtggggccgaaggtccactcctgggcgtcatagtcatagccaaagtagcggttgtcggtgatatccaaataataggttccccaggacggtgcaatcatgttcatctgggccatggttccggcgaaggagcggaaagccagcgggtaactgtcaggataagcttccttcagcttgacaaggacatcataaaattcgtccttgttggtcggcatttccaggcccaattcttcgaaaatgtcggcacggtacagccagccgcggcgttcggtttcttctaccccctgctgcgggaactgatacaggccgccgtcggcggacagatagttggcggcatattgctggttctcctcgtaccaggccttgaaattcggcattttatcaagatgatccaggatgttaatgaaggctccctgcggcgcatattgctgcacagtggtgttatccgtcagaaacatcaagtcaggcaattcgccggatgccatggtcagattcagcttttcgctgaacccgctggtatcgacagcggtcacttttaaatcgacattggtgtattccttgatcaaatcaacaacataccagtcttcctggaacggccagctcgcgtgagagggtgtcagcatggataacgtgacaggctcggaaaacagagggccgctttcggaattggaaacggaagcagaggcagaagaagaggagccgggcgccgctgcgctggaggacccggaggaacagccaacgagcatccccgcggcgatcgcggcggaacaaagaagcgcaatgcctttatgcaaatgctttttcatcgtatcgatccttccttttcaaaaagtttgttttaattgacgtgatgcatcaccggtgtctttatcgtaaccgcagaatgtgctaaaatcaatttacaatcaaaacgatttttatcatctgcaccgaaaaaaacaaaatccaattatttgatgataacccaattgattgacgatggacaaagcggatgtgtcgtgacaggataataaaaagggacggcccgtcgtgacgggccgtcccggtgcggcttactgcatggaaagcttacggagcctgtattcccttggcgtcataccggtgtattttttgaattgccgcaggaaagtgttgacgttattgatccccaccagcgcgccgatatcgccgatgcgcagcttggggtccgccagaagctccaccgctttctgaatccggaagaactggatgcggtcgctcaggttcgctccggtcttgcttttataataggtagacagatagcttttggaaagatggagcgcttctgcaagctcatccatggaaaattcacgctgatagtttttttccaaaaatgcctgaacgccttcgagaatcggttcctcggcccgtggctgggcggctgcgcacaaagccgcgctgcgcacgaagccggacatcagctcacggtaatcctgtgcagtgtcgcattggggcagctcattgtatacgctgccgctgttcaggttgggcaggcctccctcaaggtgcaggtcggacaaggcgcgcagcgtaacgttcgcgatggcggagcccaacaggatcatatgaatgcggcggatccctgcggaaagattttgcgcgatgatgcgttcggccaacgccgcggcttcgtccgaatgaccgtcgcatatcagggcgcggagctgctgctccatctccgaagggaaaaag

SEQ ID NO: 3471 - DNA, 17792 bp, Unknown
  16S sequences of unknown bacteria
ccctccctgtgcaagggagggtggtgtgagcgtttagcgaacaccgggagggttgtcaatgtgcaaacctgcggtttgcataggcgttcaatgaacgcccctacgatttaactttataattactgtttatgaccggcaaggcacttaatttttttgaaatattattctgcaaccgacgacagtaaatcacaaatagcccgtaggggcgaccattggtcgccttattgcagattatatgaaccgattttccgctataaactataactctcaacaagtttaaaaatcgcaaagaactgttattgtgcaaacctgcggtttgcataggcgttctatgaacgcccctacgatttaactttataattactgtttatgaccggcaaggcacttaatttttttgaaatattattctgtaaccgacagcagtaaattacagatagcccgtaggggcgaccattggtcgccttattgcagattatatgaaccgattttccgctataaactataactctcaacaagtataaaaatcgcaaagaactgttattgtgcaaaactacggtttgcataggcgttcaatgaacacccctacggatttattttataaatatatttatttgtagccgtaattcaatataaacaacccgaatatcaaggctctctttggtaaagagagctgtcagcgatagctgactgagagattgattaagcaaattgtttgaacattcttttcgctgtaaaatatcatttcaaccaaaccgcaaaactcattcccctattaggtgaaatgtcatcgtcttatcaatgacgaaggattgtcaccgaataatcaatttaggcaacaaataatatcgactattaaaaaaccctgtttcgctaaaaatcgaaacagggtttttattaggttctccggctctttaacggctgtaattttattgtgccattttatacatgctgtaaatggaattgtacatctttgttatattgccgttggaatcttctacttttgttattttccagccgtctttttccttttccatatacatattcaaaaccacatctatggtggcgtcggctttacttattttttcccgaaacagtgctataaacatatctctgaactcgtcactgtccggctttttcccggaaagagcaatgtcctttgtaagccgaaccgcagtgtccgccgcaagagtaaggtaatcataggttttaaagctaagctctacaaccgccttgccgtccttttccgcctctctttgagtaagcaaataatcaacggaaagtatcctgtccgctatggccttgatgttcttgtctgttaaggcttctttcgcctgcttatccgttatgccaaagctttccaagccgggcaaattgccgctgtaatatctctcggcctttataaagtcgtacgcctttatcgccgatacaaaatcgtccgctccctcaagggcggtttggcttttggcacatgccgcaaaaatacaggcagccgccaaacaaattaaaattgatgtaatttttttcataatccacctccgctgtattattgttgacggatttcggattttaattcaaactgtctgttattctccataaattattccaagttctttggcaatttgcattgagctttttattgtatcccgataccggggttgcttttcaagatcttttatatttattttttccgctgacaagcaactataaatcagtcatttcaaaaaggctttccgcctcgttgtaatcaaataccgactgtatccggctgttgccccggtgcattacgcaaaagtatctcaaagcgtccggccggtgggtcaattcgtgaggcgtgtttgcaacatcatttacatttttgtcatcatgtgtcagcgccggtaaagtgcgtattaaatttacgcagtttgtaaaaattttcagcctgctttttccctctttgatttgcaaatattctttcacagcgtaccagccggtctccctgtcgtttacggactttgtcaaaggcaaacccattgcggcaaatattccggccacgcttttgccggaatcctgcctgcggttccacatatccggcggtgcataaatagcggttatatcctcgtttatccgcccttttatggcgtttgcggcccggctgatgattaaattagattgatatatttctttgtaaacataggcgttttcttcttcgtccacagctataaaataagccgccagcatatcaaggccgtagtccatggcaatgtaccttttgtactctttgggcagtttaaatgggttacaggtgtgtatgtcacggttccactcgttaaaatactgcccctcaaaaatatcccaactgccgtaaagcaaagccttgcgctctttttccggcaaattttcaagtctttttatatagcttttatcctttgccattaaaaatgagttgtcggtcacaagactggggataaaaattctgctttgctcccctatgacgattttatccatagggggcgatatatcaataaacctttcttttacccatttgtgccccacgccgccggggtttgtactgcttttcatctgctttgggtacccgtttactcctcgcaaacggctttgcaaatatatgtacatatcccttgtaaaatgtgtcaactcgtcaaaacggataacatcaaactcggcagattggtacctaaacacatcgttctcaccgtcacagtagccgtaatctataatactgccgttataaaatataccggtgtgggtcgatgccgtgtacttaaataattttgcagggtacaaggcaagactttgccttattatgcttttgtccagctccgggtaagtacggcgcaaaataagttgttttgaaccgggatactttaaagcatagattaacgcatcaactatttgtgcgtaacttttgccgcctcctgcggcgccgccgaacaatacctcgtcccggtctgcctttataaagaggttttgttttggtgtaatgtcaattttcaatcttcaatcacctttaccgtaaccgtaaaaggttcgtcgccgttacctgtgctgtttttacaaatttcatttatatattttattgcgtttatgtctccttttacggctttattggctaaagaaagacacattgcgttaagccatgtacactttttgccttccggtaaaaagtccatggttgcggccgcctcccggtttattctgcttttcatcaatttctttactttttcttcaaaatcaagctgactgttcatatatcctccttttcaaacattccccggaagtattatacacctaaatgtccgtgaaaaaatcccgcaaatttcccgataaattcccgacaaattcccgttttttcacaaaataaaagcacgccgtaaaaagcgtgctttgtacttattttaaaaatcagccgataccgattgttgtaagcaacaggtagtaagcaatagcgatgattgtaaatacaaccaaaagcggaacagttttcttaaccatatcgcccagtgaaacgtcaaagtgttctgaaacgattgaaaggcagatatgtgtaggtgaaatctgcatagcgatgtatgaagtcatcatcaaaagacaaacaagtggcaaacctgcgttcggaacagattccatagctacaggcaaaacagatgctgtcattgtcattgagccggcaaccaatgtaccgaaaaggaaaatgagaacaaagataaggaatgtcggaatcgggaactttgagaagaaaccaggcaagagcttgattgcgcctgacaattccaagaagtttttaaagatgtaaacagcgagagtgttgaaaacaatctttgattcaaaagcagaaataaagaacggagcaacatcgcttgccttaaatttgcctacaaagaaataaactacgataacccggatagatgcataaagggtatctatgttaaatgcaacgatcaacacgatagttgcaaggataggccaaagttctgcaacctttttaatatcttcctttttgtctgttgtgttagcctcgcctgttttgttcggaactttgcctttaaggaagaacaaaatacccaaaacgataagtacgataaccataggtatcataccgataacaaactggcttgcagaataacctgtgatggccaaggcaagaataatattctggtatgtaggcaagaatgcctctgaaacatggcggaagtaagatgttgtaacagccatttcttcctttgaaaggtattcggaagctgaagcttcaaccatatcgccggcgatgaaagcggcattaggtgaaggcaacaaaccgatgaaaatcggagccgccgcacagtttacccaacggctgttgaaaaggccggaaaggccgtctcttgcggtgttgatggcgtttttcttttccatcattctctgcataaatgtgataacatacataacgccgatcattttaagaacagtaagcgacgttactgtattagcaacggtgatagcacctacgtttgccggaattttgtacaaaatccagcaagcgattgaaccgatgataacagcggttgacattgattttttgtttgcaaccaagccgataacaacggcaaatacaatgaccaatttaattaaatccattgtattaactcctcctgaaaaatttttgatttttaataaatttgaccaataaattatacaccatatttacacaatattcaagttttttctactatttttgtgtatgatatttattaaatttcacatttgagtactttaacagaactgataatatcacatatagtattttcaacaaatatataggcaattttattagcggataataattttatcagtcggttaaattttcaaaagatagtcggcgcaaataatgtcttcttccgcaagccccagagattcaaacattgttatatcctctttactttctctggcttttttctttccgcttacaatatccgccaaatccccaagaatatgactttcatctataagtccgtcttttttggcaatcaggtattcgccgctttcagcctttacagcctctatgctgtcaccgaaaaatcttgattttgccacacactcaccatctgcttcacgttcggcggcagcacaagccccaacggcatttatatgggcgccgggtttaacccaccgacctttgagaacaatctctttgcccggcgttaccgtgcaaatcacatcggcatcttcaacggctttttggcagtcggaaaagggcgtaaatttaacaccgggatatcgccgagaatgttttttaacaaactctgcggctttttcggaatttctgcaccaaatattaacctgttgaattgggcgcaccgcaataaccgcatcaaggttctgctctgcctgaacgcctccgcctattaaacacagcaccttggcgtcctctcttgccatatactttgtggcaaggccgcttacagccccggtgcgtattgcggttattgatgtgccgtcgcatactccctttaaagtgccgtcatcggagttaaacaccgccactattccctggtggcttggcaggtttctctttgaattgtcatgtattacggttatcagctttgcccctgcggttttatccttcggtattacgccgggcataacccccataactccaccgggcaaaggtgctaccgagcgcaaaatatttttgatttcatcctttgcaaaacccataaaaacattttccataagggaaatacaggttttcatatcaagtttttcggctacttcttgccgtgacatatattttatttccattttaatactcctttatcaatctttaagtgcaaaattcacagccgccatggcgtgaagagtggttgtatcaaacacaggtatggggctgtcctcctgctttataagcatctgtatttcggtgcagcccaggataaccccctgcgccccctgccgtgcaagctctttgataacatttacatagtattctctggaaggatccttaattatgtcaaaggtcagctcctcttcaataacacgctgtatttctttcttttcctcctcggtaggcacaagggtgtcaatgccgtatttttcttttaatctgcccatataaaatgggtgtgtgcaagtaaaagaagttcccaaaagggctattttgtcaaaaccggccttttttattgcctctgcggtagggtcggcaatgtgaattaccggtacgcttacacttgcccgaactttttcgtaaaccaggtgcattgtgttggttgccataagaataacatctgccccagccttttcaagactgtgtgcaatttcgataaattcccgtgcaagttcgtcaagctcgccccttacaacatggttgaatttaccctccaaatccgtagaataaatgatagattccacagtggatttattacccaaacgcctgttggactcctcgttgatgattttgtagtagtcaacggttgactgccagcttaaaccgcctataatgccgatttttttcatagttaatcccccttttcatataggtgtaaatgtaatataatatagatatattatcatttagaattacatttttcaaggaggtaattatggccgatatagtagctcttggggaaatacttattgactttatgcaaacggcggtaagcgacgacggctaccctacaataaaagcccagcccggtggtgcccctgcaaattttttggcggcacggacaagatgcggcagctcctgcgccatgatcggcaaggtgggggatgacgcctttgggcatcttttaaaaaatactctgtcacaggcaggaatcaatcgggaaaatgtggttacagacaaaaactttttcaccaccctggcatttgtcaccttaaaagacggcgaccgcagtttttcctttgcaagaaaacccggtgccgacacaggcataagatttgatgaagttgacaaatcgcttattgaaaactgtaaaatttttcatttcggcactttgagttttacacatccgactgccagggaaacaactataaactgccttgaacttgccaagaaaaacggcaaatttataagctttgacccaaacttgcgcccggcgctgtgggaacacgaaaatcttgcaagagaggccatgctcttcggtttaaactatgcggacattgtaaaaataagcgacgaagaggtaaaatttctctttaactgcgacgaaaaacagggtgctgaaaaaatactcaacatttataactgcaagctggtttatgttacaatgggttctaagggctgttatcggcaaaataaaaacggtttctgctacatacatgcccccaaaaatataacccccgttgacaccaccggagccggagatattttcggcggtttccgggcggcaatgcttttaaaatacggcaaaaacccagaggacttaaccgaaaacgaacttaaaaatatttgccgatttgccgttgtgggagcaagcctttccacccttaaaaacggcggaatacaaagcgtgccggaccctgaggaggttcacaattacatagacaaagagtaaaacggagattttattatggaaagaagaaaaatcattttggacgtggacaccggcagcgatgacgcaatagccattgccacggcacttttaagcccggagcttgatgttttgggtatttgcaccgtaggcggcaatgtagaggttaaaaacaccactgacaacaccctgcgagtagttgaatgttgcggcgcacaggacagggtaaaagtttacagaggggctgccctgccccttgcttccacattacagccatgggttattcaggcaagagaactgcccaggattgagggtgtaaaaaaccaagagacagccgttcataccgaccatcttccactgccccctgcaacaacaaagccgggggacgcaagtgccgttgtgtggcttataaacacactgcttgccgccgatgacggtgagataacacttgtgccggtaggccctataacaaacatagcccttgccctgcgtgccgatgagagaattatcccaaaaataaaagaaattgttatgatgggcggcacacacaatgtttacgccacaacccaggcggcggaatttaatgtttggtgcgacccggaggcacttgaaatccttttgcaaagcggtataaaggtgacaatggtttctttggatgccacatctcacgcctgtctcacaagacagcaggcggaaaatatacgcagtatcggcacaaaaccggccaatttgcgggcggatttgattttgcacagaattaaagcctcatatgccgagggagatgccgaaggcaccggtgtaggcgtggcactgcatgacccgctggcagtttgctccattatccatccggaagttttggaggatgttgagtatgtttcctgccatgtggatttaggccacggctatgcctacggcgaaactgttataaaccgcaattacgaaaaccgcccaacccctaaaaattgttattatgccaaaagcgcaaattccgatattttttgcaaatggctttacgacacccttaatcggcagggaaaataacattgtttttacacataattcggtatttagttattgaaaaaaatgccgtttgatgttatacttaaatatgtaaaaatgcgggaacaatcccgctaaaaacgaaaggacaacactaaaatgaaaaaagtagtattcagtgaaaaagctcctgcagctatcggcccatattcacaggctatcagaacaggcaacacaatttatgtttcaggtcagcttcctgttgaccctgcaacaggtgcattcccggaaggtattgaagctcaggctaagcagagccttacaaacatcaagaacattcttgaaagcgaaggctactcaatggcagatgttgttaagacaacagttttgctcaaagacatcaacgattttgcagctatgaacggcgtttacggcacattctttgaaggtgctttcccggcaagaagcgcattccaggttgttgcagtaccaaagggtgctttgcttgaaatcgaagctatcgcttacaaagaataatttatcttaatattattcaaaattaaacgccgtgtaaacggcgtttttttgtgccttgtattgacgatttgccacgcataatttataataaacacagaatttaaaataaggataaataaatgaaagcaagtataataatcccaaaccttaacggcgagggctggatcaaagacagtatagacagctgtataaatcaggattttaaagaagaatacgaaattataataatcgacaacggcagtaaggatcgctcggttgaaattatcgaggagtgtgccacaagatttaaaaattttaaaatcataaaatttcgggaaaacaccggcttttcctatgcggtaaaccgaggcatagaggcaagcgatgcggagtatgcggtgctttttaacaacgacgcctttgcccaaccggactggttgtcacaacttgtgacggttgccgataccgacaaaaagattttttccgtaggcagtttgatggtacagcatttccaccgtgacttggcagacgacgccggggactatgttccccttttcggctggacctgcaaaaggggtgacggcctttcaaaagaaagatacacaaggcaagagagaattttttccgcctgcggaggcgccgctttatacagaaaaagcattttaaatgaaatcggtctttttgacgaaaacttctttgcctacggtgaagatgttgacataggctggcgtgccaacaatttgggttacaaaaacatatttaatccaaaggcggtgtgttaccatatttgttccgccaccacagggggtaaatacaacacatttaaggccataaaatccggtcaaaacaccgcactgcttcactacaaaaatatgccgattttaatgtacattctaaatttgccgttcctaatattgggttacattccaaaatatttggcatatattaaaaacggctacgccggggatttaacaaaaggtcttataagcgcatttaaaatggtgggtaaaatagataaaccgaaattcagattaaaaaatctgccaaactacatttgggtagagtggcagatgataaaaaatgtgtttgtttatatagactaccgcctgcgccgccggttaaagataaagtaaaatgaaaataaaaacagctttttcaatatataaaaagataatttctctgccacgaaaagtcaccggatttaccctgcgccaaaacggtgaaaaataccaaattattgccctctctaatcctggcggggaaaaagtaatcgcaacctttgacaattacccacaggcaaaagaaaaatttgacgagattaaaaaaattacccgaaattgattttcgggtaattttatttttatgtatgattatttcacgccgtagttttgtttaagttcttcaagcaaatcgttatagtcaatatgctttgcattagggaaagcctttaaaattctctgcttaccgaatacacggcttaccgcaacatcggctttaagcatatccttccttgtggaaagctctcttctaagtcctgcaagtttttcatcctctttgattgccttgttgcctatgcgcattgcaaggttctcgctactgtcgtgaatagcttcagccaacttattgattgttttcaaatccttgttcaacttgttgattgtcaaaattgtggcaacaaagtcaaccgcaaaaacagcaaatgaaacgcaaaggaatacaaagcccaacttcgggtttatttttgcgattaaatccgcaatcatcgggtgaataactctcatcatcaaaacgccgccaaatgcccaataaaaactgtaacccaagcagatataaccgcctaaattaaaaggcttgtcggaataatcccaccaacttgtgtggaacaactttttaagtgcccaaccggtgacaagttccaaagcgcttgccaaaatcattgagccgaaaaaacaaaagaaaacattttccgtcacaggggtgagtatatatataactatgaccataccaaagccgtaaataggacaaacaggcccatttaaaaatcccctgtttacaaatttaccggtgcttacgctgcaaaagcacacctcggtacaccaaccgataaaagagtaaacaacaaaataaaacaaataatcgtataacataacaaattctccttaattgcgtatattatatttcccaattatgtacattttatgtaaaaataccttgcaatcccggtcattcaaggctttgattgcaaggcaatatacttaattattacaaaataggttttctccgcaaaggtgttgagaaaataatctgggtatttgtatttcccattttttgaaactgcataatcaacttttcaaggtcgccgatttcgtatgcgtcaatttttacaaggtagctgtatgcccctgtaacatggtaacattcaacaaccataggttcgttatttacaaggtttaagaatgtttcggtatctgccggttgaacagatacatttacaatggcgtgtatggttctgcccatttttttcgggtttataatagccgtgtatccctcgatgataccatccttttcaagtctttttattctctcgcttacggcaggtgccgttaaagaaattgtctgtgtaatttcttttacggtaattctgccgttagtctgcaacaattcaagtattttcttatcagtagcgtccatatatcctccgtaattgtcggcttatgttaatataggccaaacataatcttattaactttacttttgatattatacgcacttacctttaaaaagtaaagtgaaattttcaattttgtgaaaaaatacatatcttatgcaggtcaaaaatttcataatgtgcaaaatataaaagaggaaaagaaaaatatatgtttttcccgtttaatcggatttcttttgataggggacaaacaaataggcaaactttttatccacaaagccctttacttctatgccctccggcaggtattcctccccatccactctgccgttttcccttattgtgtttataaggctcgtccggctgtatggtaaaacaacatctaaggcatacatacgccgtgacagcatatcgtctatttttaacagaagctcatcaaggccttttcccgtttttgcgcttgtaacaatgccgttaaagggtaaaatatccccctcatacttatcgcatttgttgtaaaccgtgataacattgtccatatcacagcctatttcccgcaagacttccccggtaacctgtaactgcatatctcggtcatcgccggaaatatcacaaacctgcaaaataatatccgcatattttgcctgttccaaagtggacttaaaggcctctacaagtttgtggggcaatctgcttacaaaacctaccgtatcaaccaaaattaccgtctggccgcttggtaaaacaagttttctcgccgttgggtcaagggtggcaaaaagcatatctttttcaaaaatttcactgccggtaagggtgttcaaaaggctggatttacccacatttgtataacctgccaaagccactatcggcacatcgtttttcttgcgccgtgtgtttaacaggtcacggcgtttttcaacctgttcaagttttgaacggataagttcaatcctgctttgaatgtaacgcctgtcaagttccaacttggtttcaccggcacctcttcttgcaccgcctccgccggagccgccgccgccttgccttgacattgaaaccccaacgccggaaagccttggcagtctgtatttaagcaaagcaagctctgtttgcagcttgccttcgctggtagtggccctgctccggaaaatttcaagtatcaacatcgttctgtctattacttcaatgcccaaataatcggatatattccttatctggctgcctgtcaattcgcagtcaaaaacgcaaagttccgcccggttttcaatggcaacctgttttgcaagttccagtttgccctccccaaggtaatatttgccctccggatggtctttgttttgtataaccgtgcccacaacctccatattggcggcttcgcacaaagccgacagctcttttatggaatcctccatattgcattggccccagtccactgcggcaagtattgttttagttaacatataaacacacctttcccaaaaatctattaaaagtgcctttcttctgtcttttgatactttattttatcacatatctgtgttaaaatgtcaaaagtaaagtaaggagttgattgttatgtattgtcccagatgtggacgcccggtaagcgataatgccaatttttgcggcggttgcggcttgccaagagcagaaatattgaaatattcacggaacaattcttccgataataaccggcaaaaagccgaagaaaataacaatgtgtcaaccgaagataaatcgaatgaggattcatttgacaaatccgccgaaagccgggaaacacggcacacatcacagaataattatacaggtgattacggcacaagtcaaaacaattattcctccggcgcatattcaaattataatcaaaattacaacaccggtttctccggcaatgattattacgccggcggctatgaaaaagcagaatctaccgacccattgaccgttgctgattacctttggatgatgattatatccggtattccgattgtaggtattgtttatatactttacaccgcttttgcaggccaaaatataaataaaaagaactgggcaaaagctatgttgatacttgcgattttcggtttcgtgttggcatttgtgtttattttcggcgttataagtgccgcaagcattatataatgttttaaacacaatttaatatttcatattttaaaacagcctttcggggctgtttttgttttgtgaagaacagtatttttgcgatttaaaattttataacactgcggttatccaccgcttgtaatcttatatttctataaaaggtaatttattcacgatacagcccatcgcttttccattttaaaggattttcttctatatattttcgctttgtgaataaatcccgttcgttgcgaatgatatgatcataaaaagatttttgccaaatcgagttttgtacttgttttgatgtatatcccttaaattgttgtataattatgcttaccgaaatattatcataaccattgacaataaaaataattaaatgaacatgatttggcattataacataactgtcaataaaagcatttggatattttttactgatattttttatagaattttcaacaacaatgccgattgaggttaattctattttatatgtatcgtatttaatttgtgacaatattgattttttatcctttgtgcatatagttataaagtatgctccgctttggctataatcataatctttcaagcgtataactttacgacagttattttccatattaaatcatccaaatatcaacatttataaataaaatatatcatgtatctttatgtaattcaataatagttatattaagatacatcatagaggcggccattgcccaccgtttttaatttgaaaatgtttaccttcaattaacaagaaaaacaagacattattgtcttgtgtatttattaccttataaccgacagcgataaattacagatagcccgtaggggcgaccattggtcgccttattataaattatttacactgattttcggtcataaaataacagcttaacaagctgtaaaactcattcttttgacaaaaaattgacatcataaccttaccacagtgcaaacctgcggtttgcataggcgttcaatgaacgcccctacgatttaactttataattactatttatggccggcaaagcacttaattttttttgaaatattattctgcaaccgacagcggtaaattacagatagtccgtaggggcgaccattggtcgccttattgcagattatatgaactgattttccgctataaactataactctcaacaagtctaaaaattgcaaagagctgttattatgcaaacctgcggtttgcataggcgttcaatgaacgcccctacgattcaactttataattactatttatggccggcaaggcacttaatttttttgaaatattgttctgtacacgacagcggtaaattacagatagcccgtaggggcgaccattggtcgccttattataaattatttacactgattttcggtcataaaataacagcttaacaagctgtaaaactcattcttttgacaaaaaattgacatcataaccttaccacagtgcaaacctgcggtttgcataggcgttcaatgaacgcccctacgatttaactttataattactgtttatggccgttagtgcactcaaactttttgaaatattattctgtaaccgacagcggtaaattacagatagcccgtaggggcgaccattggtcgccttattgcagattatatgaaccgattttccgctataaactataactcccaacaagtttaaaaattgcaaagaactgttattatgcaaacctgtattttgcataggcgttcaatataaatctgcaccatcaaccacaccaaaaacaaaaacgcacccgattgggtgcgttctttttttggtgattatgtaaattaaatttcttgaattcgatttaacagtaaactgtattagtcgaggtcgtaagaaggctggatgtgaaccttaccacccttaaccataacatttgcgtatacaagagcaacaacaaacattatagcgttagcgataagaacccaagctttctgacctacacagttcatgtaagcctgcataacgagaactgccattgaaagagcaagacagcccttcaaagcaccgtctgatacgtggaacggtgatcttgcccatgcttcagggaagagtttaggcaacttcatgataccgaaagcaagaacaaagttgttaacattaccgatgagaagaacgagcttaccaagcattgagatgttcatacctgaaatgatagctgctatgttaactacaccgaagattgtaagccatacgtaaggaacgcctgctttgttaagcttagccaagcctgcagggaaccaaccgtctgctgtagcctggagcaaaggctttgtaacccaacccaaggaagcattcaatgttgtaccgagagcgaagcaagcaccgcaaatgatgaagaagtagtagcaaggtgtaggcataatctgcttagcgataactgaaaggttgccggcttcgataacctgttcagcaggaatgataccaccgatacatgaagccatgaaagcgtacaaaatagctactgaaacagttgaaacgataactacgaaaggaatatcctttgttgggttgatagcttcagctgagaagttaagaataattgtagcaccgcctgttgcgaatgtaaggtatgaagcagcttcaagcaagcctgaaacaccgttagtgaacaaaggagcgccgaagagctcgttgccgaagtaaccgccccactgtacctttggaacaccgaagattgtgaacataagcaaagcagctacgaggaggtagaacatgaagtcctgaaccttagcgatcttctctgtaccgaagtagttcaaaataaggaatgctacgaagataacaactgaagcaattaactgattctgagcaactgccgggatcaaagaaccgaggtatgatgccaaacctgttgcatacatagccattgaacagttagagaagatgtaagtaacagcgtagaaacctgcgtacttgtcacctacgaagatggcagcctgtgaatagaaaccgccgtaaacacggattgtagaacccatgaagattgttggcaaagcgccaatacatgtaagaaccgcagcaacaacgaaagcgatgttaactgaacgacctgtcataccgagggcaacgattgacataaccataacgcccgaaccgataatctggccaacagccattgacatcaagttcattctgcccaaggtctttttaagatcttttgctgatgaagccataataaattttctcctttttttcatacaaacgcttaatcaccggagcgtttgctaattcctaaaaacaaatatattttaatatttcgttcacaatttgtcaatatttttacggccttatatgtcaaattcagcgttttttatattctaaacgcttattttttgtgcaaaatgtacattcgtatttcattaagattttacctatatattgggttgatttgtttattaaataaaggataacaccgatatatcgtcccttatccctgtgtatgtatatattaactttataatacaaaaaacgcacctttccgactgaatatgcctaatttcacaatttttgcaggtgacattaaacttttatctttaaaacattaagtttttatctttaaatatagtactgtattttaaaatttgaatatataatatcaccccgcaccctgcaacttcagctctctttggtacacttattcagttgtaaatcagcattataaaccgaacagaatagcaaggctctctttggtaaagagagctgtcagcacagctgactgagagattggggaacattttgtttatatacgatattcggttgcaaatcaacatttccaaccgaacgaatagcaaggctctctttggtaaagagagctgtcagcgcagctgactgagagattgataaacattttgcttatatacgatattcagttgtaaatcaacatttccaaccgaacgaatagcaaggctctctttggtaaagagagctg

SEQ ID NO: 3472 - DNA, 13977 bp, Unknown
  16S sequences of unknown bacteria
cacgccgtcatttctgatttaagcctcgttcttccgatactttgtcaatgctctgagaaatgacggcgtgtacgtcatttctggcatttttcaggagcaaatgcttgcaaaaaggtgaaggcccgaagggctgaagtggcgagcacacgaagtgcgcaggcacggaacaccgcgcaagcgaagcgcagggcggtgcgaaacagaaaaatacattcccgccccgattgctggccgtcgaagcccgcgaagcggtgcgtagacaagcaatcgggaaatctcgcccgcaaaccgcaggtttgtgggcgatcagcccgtctggccagtgctgctcgccaggcggtttcctttgcgcttttgcggcgaaaaattcccttgcatccagaggattgtgtggtataataaacgcaaaatatactttcctaatggagggatagaaatgtccattgtacgacttcctgccattccactcattgccaacgatccatatttttcctactggtgcccgggcgatcggctcaccgacgtggacacctgccactggtgcggcgaggcaaagcccatccgcggcctgctcaccattgacggccaaccccatcgcttcctcggtctgggcgacgcgcccgccatgcagaccctccgccaggaagtgacgcccacagcgacggagtgcgtgctatccgcggcgggcgtggaactggcgctgcgctttacgggcgcggccttgcccgacgatctggacgtgctcagtgcgcccatcaccatggtggattttgcgctgcgcgccgtggacggcaaggcgcacgagtgctcgctcacgctatcgttctccgccgcgctgtgcgcgtttggcgaagagccgcgcgatatgcacgcgatctcctattccctgggcggcaagaacgtggccttcctgggccaactcacgcaaaagccgctctcccattcgggcgaccacaccaccatcgattggggctatctgtatttgatgagcgccgcgccgctgcgttgttcgcaggaggggctatccctttgctggaatggaagcgtagcggaagaagcggcaaagatccgcgcgttggtggcttacgacgacatcgcttccatcaactattttggttccctgcgcaaggcctggtgcttccgcgacggcagcaccatcgtggattggctgcgcattttcgacgcgcgctgggcggaaatccagcaaaagtgccgcgcgctggacaaaaaagtgttggacgaggccgaggccattggcggcgtggactacgcgctgatcgccgccgccgcgtggcggcacacgttcgccgcgcacaagctgattgctgacgagatgggccgcatggtgctgctctctaaggaaaacgattccaacggctgcatcggcacggtggacatcagctatccttccgcgcccattttcctcaaatattgcccgcagttggtgaacgcgctgtgccgcggcgtgctcaagtttgccgaaatgcccgtatgggaagaggactacgccccgcacgacattggccgctacccctacgccaccggccaggtgtacgccgcatgcgaccgcagcgtgttccgccagaacgcagcggtgcatccaccgtattacctctatcccgcggggacgaacgcctataacccgcacgaccaaatgcccgtggaggaatgcggcaacatgctgatcatgctctatgccgcgctgcgcgccacgggggacgcctcgctgatccaggcgcaccgcgccacgctggaaaagtgggcaaaatacctgtgcgaatacggcgaagatcccggcgagcagctatgcacggacgattttgccgggcacctggcgcacaatgtgaacctggcggccaaggcgctggtgggtgtggcctgctatgcccgcctggtggcgaccctgggcgaggacgcttccgcctgggagcgcgaaaccgcgcgtttgcgcgatagcttcctcgcgcgcgcgcaaaagcccggcggcggcccgctcaccttcgacggcgtgggctggagcatgaaatacaacctggtgtgggatgagattcttggccttgatttgctgccgcgcgaatactacgcggaggaggtcggcagctatgcggcccgcatgaaccgctacggtctgccgctggattcgcgcaagacctacaccaagagcgattgggagctgtgggtggccaccatggcgcaatcgaaggaggaattctgccgtttcatcgcgcccgtggccgcgtatctgcgcgaaacgccttcgcgcgtgcccttctcggattggtatgatacggtcaccggcaaatacgaacacttcatcgcgcgtgccgtgcagggcggcctatacatgcccatgctgaaacactggaaatgaaaaaatatgcctctatggcgctgtgggcggcgctcgcggcgcttctgttggcctttgccacggaagcgctggggcgcttgtccgctgtgcaggcgctggcgttttgcgcgcagcagcccgcgcgctttgcctacaacgcgtttttgatctttgccacgctctcgcccgccatgctgttccggcgcaggacggcggtttttgtcctgctctgcgggctgtggctggccgtgggcgtgacaaacgccatcgtcattgccttccgctccgtgcccttttccatggtagacgcgctgctcttgcctgaagccgtgaagctgatgggcacctacttcacgcgcggccaggcggcgctattgttcgcgggcgcgttcgtactggtggcgctggtggcggcgctctttgtgcgcgcgaaaaaacaagcgcgcgtgcccgccaaatacagcgtgcccagcgtggcgctgctcgcctttctggcggcgctgagcatattcctcggcggcaaaaccggctggctggacacggaatttgaaaacgtgatcgaaacctacgagcacgatggctttgcctactgtttcctgtatacgttcgcggatctgggcatggaggaaccggaggactattcgccccaggccgcggacgcgctggcggacgcgctggaagcctcgcccgaaccggagagcgcgctgcggcccaacatcattttcctgcagctggaatcgttcatggatcccgaccggctggtgggcgtaaagaccgtccaggaggccgtgcccaccttcactcgcctgaaggaagaagggcccagcggcagcctctatatgcccatggtgggcggcggcaccgccaattgcgaattcgaagtgctcaccggcatgaacacggatttcttcggcgtgggcgaatatccctataacaccatcgtgcgcgaaaccgcctgtgagagcatcgccttcaacctcaaggaatacggttacagttcgcacttcatccacaatttttccggctcgttctatagccgccatgaagtgctcccccagctaggctttgacgattacgattccgtggaatacatgccgaacgtgtcgttaaacgcgctcgactggcccaaagacgacgtgctcgcgggcgaagtgctgctcgcgctggaaaacacgccggggcgcgattttgtgttcgtcaccaccatgcaggggcacggcccgtatcccgaggagccaatttgcgaaacgcccatcgcggtggaggtgaacgacgagcgcctgaacgatgcaagcgtggagtattatgtgaaccagctttgcgagacggacgcctttgtgggcgagttgctcgcggcgcttgaggcgcaagcggagcccaccgtagtgctcgtgtatggcgaccacttgcccgcgctatcgttggaagcggatatgatcgcctcgggcgatttgttcgaatcggaatacgcgctgtgggccaatttcccgctggacgcgcaagaccaggacatggaggcctaccagatcgccgcctacgtgatgggcctgttcgatctggatgcgggctacctcaccaagctcacccagcagagcgcccaggaagcggactatctcgagcagatggagcttttgcaatacgacatgctctatggcgagggcggcgcgttcgagggcgaaaacccctatcagcccacgcaaatgaccatgggcctgcggcccatccgcgcgctgcgcgcctatttctccggtggcgatctggtggtggaaggggaaaatttcacgctttccagccaagtattcgcgggcgaagaggcgctcgccaccgaattcgtttccgccgggcggctggtggtgcgcgattgcgcgctgcaagccggggaaagcgtgcgcgtatgtcaagtttcgcgcgaggcgatcgccctgagccagacggaggacgtgaccatcgcggattcctaacgcgacaaaaaggagttgaggcgcatgacgcgctttgccaccataggttccaattttgtgacggatagctttctcgaagccgcccagggcgtggagggtttccagttggagggcgtgtattcgcgcacgcgggcacgggcggaggaattcgccgccaagtgggacgcgccgcgcacatacacctcgctggacgcgctgtgcgccgacccggcgatcgaggcggtatatgtcgccagcccgaacgcctgccacgaggcgcaaaccatcgcgttgctcaaagcgggcaaacacgtgctgtgcgaaaagcccatcgcgcccgatagcgcggcgctcgcacgcatggcgcgtgctgcgcgcgaagcgggccgcgtgttgatggaggccatgatgcccgcgcacacgcccgcctatcgcgccattcgcgcggccatggcgcaaatcgccccagtgcgccgcgccacactgcgcttttgcaaatattcctcccgctacgataaattcaaggccggcatcgtggaaaacgccttcgacccctcgctcgccaacggcgcgctgatggacatcggcgtgtattgcctgcacgcggcgcaattgctgctgggcgagccgcaaaccgtggcgggcaaaagcgtgttcctcccgggcggcatcgacggcgcgggcagcctggtgctgggctacgacggcgcgctggcggaaatcgtctattccaaaatcacagattccgtttcgcccagcgaaatcgagggcgaaggcggcagcattctcatagacgccgtttcccgtccccgccgggccgaactggttttgcgcggcggcgcgcggcgcgaaattcccctgggcgtggaagccgatgaaatgcgctatgagatcgaagatttcctcgccctgctgcgcggcgcggatggcgcgcgctatctggcggatagcgaagccgtcacccgcacgctggaccgggcgcgcgccggcatgggcgtggaattccggcggcgctgagcgcagaatttgcaaaatattaggagcgtatgtatggttagaattcatcctttgcccgcgggcgaagccgcgtcgggcgatttttccgccgtcatcggcggcgagcgggcgacgccgtggctgtgccgcgtgtccgccatgccctacaacaccgtttggccgggccaccagcgtccgctggagcaaacggaacccgcgtccttcctcagctttgagatgcaagagccggtggaagtgcgcctcaccgccaaccggccctttgccgaagccgtggtgcgcccgctgaataagggcgtgcagccccgcgtatccgggcgggaaatcgccttcaccatcgcgcagcccggcgcgtacaccgtggagttggacggcttccaccgcgcgctgcacctcttcgccaatccgctgacggattttggcgtggacaagtccgcgccgaacgtgcactattttggccccggcgtgcatgaggtgggcgatctggagctcagcagcggcgaaaccctgtttgtggacggcggtgcggtgctgtacggctccgtgcgcgccatccacaaaaaaaacgtgcgcatcgtgggctacggcgtgatcgatggcagccgggaagtgcgcacgaacgacaccaaattgatcgctgcggacggctcgggcgcgcgcgacctgcgcgacgaagctacgttgcgcgcctttttgcgcgaagcgaacgtcctcaaaggctgcgtgcagctatattcgtgcgaagattgcgaaatcgccggcgtcatcgcccgcgatagcgctacattcgcctacatcctggccgattgccagcgcgtgaactgcgaatggctgaaaacaattggcatgtggcgctacaacagcgatggcatcgatttgttcaacagccgctacgtacgcattgccaacggctttttccgcgattttgacgattgcatcgtgctcaagggcatcaagggctgggatcgggaaaacgtgcgccacatttccgtcaccggctgcacggtgtggtgcgattggggcagcgcgctggagttgggcgcggaaacctgcgcggacgaatacagcgatattctcttcgcggattgcgacgtaatccacgcgacccaagtgtgcatgcgcacgcacaattccgaccgcgcgcacgtgcatgacatgctcctcttcgacatccgctgcgaatatagcgcgcacgatttggcctgcgcctatcaggaagatatggccaaaccctatacgccagcgcatggcacgccgcaactaatcgcctcgccggtgtacgacggcccattttccgacgatcacattctgggccaaaccagccgcgtgcgctatgaaaagatccagattctgggcccggaaggcatggaaatgcccgcctgctgctttggcggccaggacggcgcgcacgccaaccgagagatcgtgctggaaaacgtttccttcaatggccgcagactgctgccggagcaaatccgcctggaaaagagccccttcgatgaagtggcgctcaagtagcgcaaacgggaaggagggattcgcgccgtgaacgagcgcatcttgatcgtggacgaagataaaaacatccgcgatttgctcgcctccgcgctgaaggcgagcggttatggcgtgctagaggcgcaatccttcgcgcaggcgcgcatgctggcgctttcgcactgcccggatctgatgctgctggagctgaatctgccggatggagacggcctggatttgatccgctttctgcgcgcgcagatggatttgcccatggtggtggtttccgtgcgcgcacaccagcgcgataaggtggaggcgctggatggcggcgcggacgattatatcaccaagcccttcggcatccccgagttgctggcgcgtgtgcgcgcggcgctgcggcacgcgcggcgcgccgaacccagcgtggaacgtcccagcgcgccgttccgggtgcatgacctggtggtggattatgccaagcgccgcgcgtttgtaagcggcgaagacgcccgcctcacgcccatggaataccgcatcgtagaattgctcagttgccacgcgggtaaagtgctcacccacgatatgctgctggcgtatctctgggggccgaacgcccggggcaacaatcgcctgctgcgcgtgaacatggccaacatccgccgcaagctggaaaaagatcccgcgcacccgcaatatatcttcacagcgccgcgcgtgggctaccgcatggcggagccgggagagtgaggggaattgggctttgtcaacgagcagaatggggctgcgaaagaacgtttgccattctttcgcagccccatttcgcgcaagccattcttccgttcaaaattcgcttggggaatagcgcgccgtcaccacgatcaccgttttctttgcttcatcaattcgaaaaacagcggtgtagttctccacaaaaagctgccggtatccccggctggcataggcgccccgtttccgttccggacaacggtaaggcatcgtttccaaagacaaaatggcgtcctccattcggcccaccagattcagggctgtccctggctccagcagcgtgtgggcaatatagttatagatgccatccaaatcccgcaacgcccgccccatcagtttgacgctgtatttatccaaaatgctttctccttaaagaagccaacgcctctcttgcgtcatggagatgtccgtcccgttcaaactcagcctccgcttctgaaatcgcggtgtcctgcgctacattttccatcatcgcctcgtaggtttcgatactcatcaccaccagatctccatatccgttcttcgtgatgaatatcggctcccgacgcgcgtggcagatgtccgaaatctcgttggtattgcaaaggtctgtaatcggtctaatctgcggcatagcgccacctccttctctttgcacattattatagcataattgtatgcaaaaacgcagcccatcaaaaagtttacaattttttgcggtcgctgcttgcttcatcgcgcaaatatatcgccgtagcgggtgtgacaaattaggggctgcgaaagaacgtttgccattctttcgcagccccatcttgattggcctttattctcccaggaatcagccgatgtcgctcaccacgtccgaatagacggtgacttcatattccgtcatccattcgcccagtttttcctgatagacttcgtttttcttctgagcggttaccacttcaaccagataatcgtgcgcgtcttcttcgctggtggcgccgggcgtcacatccgacatatagcggatcaggtgcacgccgctcgcgctgacgatcggctcggaaacgtcgcccacattggcaagcgccatagcgccgtcggtgaattcgctcacccagttgatcgcgccttcggccacataatagccgtcgctatcttccatgcccggatcctggccgtattcggcgatcagggcctcgaagtcctcgccagcggccaggcgcgcctggatttcatccagcgtatcctgcacggcggcgatgcaatccgcgcgcgcggtttcggccgcggcttccagctcaggcagactggcgttgagctcttccagttccgcctgcgcggcggcaagctgctcttcgggcgacggttcgggcgtagcgctcgggtcgagcgtagccgtgggcgcgggcgtggccgtagcttccgctgcggcgtcctccgccgtttcgtccgtgccgttgatttccgcctccagctcggcgatttccgcctgcgtgttctcgatggaagagagggcgctattcagcgcgctggaagcggtggaatacgcttctttcagttcctcgccgggatcgagcagaatgtgcttcacaatgcgcacgccttccggcgcccacaggctggtttggccatactgggcggtcagcgcgtaataccaggcctcgtcatacatctcggtatcgctggccagttgctcttcatagtaggtgtgcagttcttcgtcggtgggcgtgacatccgccgtggcagcctcgaacacgcgcgtttcatacagcgcgctgagctgctgctcatacgcgtaatcgaaatccacgccttcggcggccagcgcgtccagcgcgatctgccgctgctcttcttcagagagcgcctgctgctcttcagtgaggtaactggcgatataagaatccaccgtgctatccagctgcgactgcgcggtttcctccatggtggcgcgttcttcgtccgtcacttcatcaaggcccagttcctgcgccttgagcgggatgatgcggtcgctgatcgcggcgctgagcgcctcgttgaggatctgcgattcatagccggaagtggtgccgtaattcatctggtacatcgtcgcggcctcggtgtaagcgtcctgcacctcgcccttggtgatgctctgggagttgccatcattatcgttatacacgatggcgacctgcgccgcgtcctcttcgggcgtgagctcgcggttcacccaagcgttatacccggccaaaaagccaatgctcaccacaagcagcgccgccatcacgatgaacaccggcagcaatccgtcttttttctttgccatgttccaactctccttctgtgctaatgcccataccttatcattatacacgattttttgagaagcgcaagggattttgcgtgcattaacgcggctttttcgcaaaaaatcccgtcacatttgccgcgcaggaaaaaagcggaacgcaggatgccagtaaaatcgcattcgaaagggattccaacccaaaaagcgcggcgcgcgatttttgcgcgccgcgccaggttccattgtgtttattccgcagttttgccgttccagcggtcgtaagacgcctggtagacttcgagcacatcggcgatgcccatatcctcgatggtctgcacataggcatcccaatcggcggcgatgtccgccacgccggtgatgaactggctgcgcatggattccacataggtcttgatctccaggtagtgcgcatcgatctccgcctgctcctcatcggtgaacttgaggtacgaagccgggaacacgctctcctcctggtaggggatcaggttgttcacaaagccgatctgccgcgcctgcgcgttgccgggcgtggaggtgacggcgtgggccagcgcggtggcgcggccgcagttggtgtagatcacgtggtcgtactggtaatcggtggtggtgccttcatagccctcgggcaggatgaattcatactgggtgtgatcctcgttcgagaaggcccacatgccgccctcggggccgtagcagcctgcctggccatacaggccggtgccttccaccacttcctcggtggcgtagaggatatcgaacatcttgcacagttcttctacgtattcgctggccgcgttgatcaccaggccgccggtctggcacttggcgcagccgatcaccacgcgctcgtcgtcgtattcgctggtgagcggggcgagcacgccgatttcgcacacgccgctttcaaaatccgcttccgtgagcgagtgggcaatgccatccatgaacacgcccaggccttcctgcgcgagggagaggctggtggtgccatccagcgtgaggaattcctgatgcagcaggccctcggcgtagaggcggttcatgtattccaggaaatgcttgtactggtcgctggtgcggttaaagaccacggcgccactgccatcgtcctcaaaatcggggttgcggctggggccgaaggatgcgtacatgaacggctcgaaatacgacccggaatacacgttggtgatcagcggggccgcgccgccattgttctccttgagcgccacgagcacatcgtagaattcttcggtggtggtgggcaccgccaggccgaatttgtccagcacgtcctcgcggtagtacacgcgcgcggtggtggtggtggcggattcctcgatgtagggaagctgatagatcgcgccgttggtttccgtcacgaccttgcgggcgtccggatattcctcaaaagttttggagaggttgggcatgatgtccaggtactgcgtgtagtccacgaacatttcaccgagcacgccatagtcgttgatgtgtaccgcttccatggtgttgtggaagaaatcgggccattcgcccgccgccaggtacacggcgaaagcgtcgctttccaccgccgtccagtccacgtggatgccggtaacttcttccagcgccgtccaggtgaggcggggttcgcccacgccctccgcgtggatcaccacgccggtgacggtgatgggttcttccactagcggataggtttccgccagggccgcgcccgcgggcagcagtagagccagggccagaagcattgccaggattttgcgcatgttgggttcctcctttgatttttatcgcgataaaattcgaaaaatattgtttttcgaattatcccttcgaattatcctttcagggagccgatcatgacgccctgcgcgaaatacttttgcaggaacggatagaggatgagcaccggcagcgaggaaaccacgatcaccgcatattgcaccagctctttgagcttgaattgctccgcggcgtattcgtcgccgccgctggccatcatatccgcgctggcctgttccaggatgagaatgcggcgcagaatcagctgcaggggcttataggcctcgttgttgatgtacatcatggcattgaagtaagagttccagtgccccaccgcgaaatacagcaccatcacgcccaagagcgcctgcgaaagcggcagcgcgatctggaaaaacacccgcagaggcgagcacccgtcaatgaaggcggcctcgtccaattccttgggcagcgcggcgaaaaacgtgcggcagatgatgcagttgtaggtgctgaaggcccccaggatcaccagcacggcgcgcgtgttatacagtcccaggctgctcaccagcaagaacgtgggcaccagcccgccggaaaaatacatggtaaagaggaaaaacatcataatcgtccggtgaaaaggcagttccctgcgcgagagcgcgtagcccgcgggcaccgtcaccgccaggttgatggccgtgcccaccacggtgtacagcagggtgttgccataaccggtcaaaatggcgtcctcctggaacacgcgccggtagcccatcagcgtgaaccccttaggcagcagaatcacctcgccagcgcccaccgcggaagggtcgctcaccgagcaggacaccacatagatcagcggatagagcaccagcagcaccagtaccgtcaacaggcccatgttcaccgcgccgaacacgcggtccgcgcgcgtatcccgaatgcccgccattggcagcgcctcctttcccctaaaacaggctggtttgcgaaagccggtgcgaaaccgcgttcgcgcacagcaagagcacgatgttgatcacgttgttgaagagccccacggcggcggaaaagctgtagttcgtgttctcgatgccgcgcttgtatacataggtggagatcacttcgctcacgttcacgttgaggtcgttctgcaagaggtagatcttctcatagcccaccgaagccagttgccccacggacatcacgaacaggatgaccaccgtgggctggatggccgggatgttgatgtggcggatgcgcatcaggcggctggcgccatcgatgcgcgcggcctcgtgcagctcgggatccacggcggaaagcgccgaaagatagatcaccgcgctccagcccatgccctgccacacgcccgaccacacatacaggtggcggaaagaggagggctgcgtcataaagtaaatccgctccaggcccagccgcgcgcgcagcgtgtttaccacgccgatggagggcgaaagcatggtgaccagaatgcccaccatcaccaccgtggaaatgaaatgcggcgcgtagagaatcgtttgcacggccttcttcagccgcgcctggcggatctcgttgagcatcagcgccagcaggatgggaatcggaaatcccaccgccagcgaatacagcgagagggtgaaggtgttctcgatcagcatccagaaattgtagctctcaaaaaaattgaggaagtgcttcagccccacccaacggctgcccaggatgcccagcgcgccgcggtaatccttgaaagcgatctgcacgccatagagcggcccataattgaagatggccacataggcgatggccggcagcaacagcagataatacgtccagtactttttcagcgctttcaccatgcgcatccgcatctcccttcgctgttttgctggtttcattctggcacactttgcccgccagcgcaacgccacagttttgcgattttccattttttgcgcaaatttttgcgtttgcaagattgtgaatgccggtttgcttgcgaaacgggcccaaatccggtaaaatatagggggaaatggaagattgaaagcctttgggaaagtgctacaccgctagaagctgcgctccccgcagcctcccttttttcaaaagggaggtggcacggcgtaagccgtgacggagggattggcacccctcagtcagctttgctgacagctccccttacacaggggagcctttggggaagcggcacaaccgtaggaagttgccctgccaaaagcctcctttttcccgaagggaaaagggaggtggcacggcgtaagccgtgacggagggat

SEQ ID NO: 3473 - DNA, 3522 bp, Unknown
  16S sequences of unknown bacteria
ccgaaagtacttgggtttcattaccccggaaggataggtagttgccgcatctaattgaaaaagacactctatacggagtgtcttttttgttgttgcaatttcaataaaaagtattgacatattcatgttaggtgatacaatctaaataaggagatttatcatggaaaaatttctcaaatatatgctattaggaattgctttcattctggtcggcatcgtagcggccgttatttgcataatttccgattcctatattccgatggtattaacgattcttatgccaagtgttggtatcgtactgtgtattattggagttcgaacaaacaataataataaaaaataaattttcattccgcctttttattcgtttatattctgtcgttccagcgtcatcacgacgccgaggttttcccctaaaagggatatgcggtctttgacggtctgcatgatcgtttcttcgctgagtttgttgtcgaaaggaacggcaaggtcaaaaacgagatttgcgtgcgtttcgccgcccaccatgcggaagtcatgcacgcggaaccgtccgtctatgtcccgcacgatgcgctctatctctccgcgataaagattgatcttcggatcgtcgaatacgaggggatcgatatgtacggtcagcaaaatatcggtgtgttctgtaaattcatgctcgatgttgtccgccagatcgtgcgccgccatgataggcatatgagaatccacttctacgtgtacggtcgcatacattttgcattcgccgtaattgtgaacggtcaggtcgtgcagcccgtgcacgccatcgaacgccaggatgcgttcctcgatcttcttgacgacgtccgcgtctggcgcttttcccaaaaggcggctgatcgtatcttttagtatggaaacgcccgcaaacgcaatgaacagcgcgaccagaacgcccatataaccgtcgagatcgattttcgtgtagtgtgagatcaaaagggaaacgagcacagcggtcgtggcgattgcatcggaaatgctgtcggttgccgttgctttcagggtttcggaggagatttttcgccccaaccgccgattgaacacgaacattcccagtttgacgagcacggacacgatcagaatgacgagcgtcagaacggaaaactcgccagtttcgggggagagtatcttttccaccgaagagatcgccaattccacggcgacgactaaaatgatcagcgaaatcaccatcgaagcgacgtattccgcgcgctgatgcccgaaaggatgctctttatccgcgggctttcccgccattttgaagccgatgacggataccgcgttgctgccgcagtcggtcaggttgttcagcccgtccgcaagtacggacagcacgccggacacggcacccgccgcgatctttcccgccgcgagcagcacgttgaacccgatgctcagatatcctgcaaattttccgtaccgctcccgcgttttcgcgtcgggagcggtctgcaaagtctgtaatttattttcttccattgttcaagtgtaccataacgcgccgcgaaaatcaagcggcgcgctctttttttaagttcttaaaaaaattttaaatattttatataaaaccgttgacaaatttttaaaatcgagtataatatgaattagcaattaagaaatgagagtgctaacactcttataaataaattgctaaatcataactattatccccgagaaagggaaaggagaatgttttatgaaatacgcaattacgaaccgcaatcgtttcggcaacaatctgtttgaggattgggacaaattattcttcaatcctttcgaaaccagcgaactgaaaacggatatccgcgaaaaggacggcaattatattcttgacgtggatcttcccggattccgcaaagaagatatcgacgtaagcatggacgacggttatctgactgtccgtgcggagagaaaggaagagaaagaagaaaaggatgaaaaagggcgttatctgagaagggaacgctgctacggtacctgttcgcgcagtttttatgtgggcgacatcgacgaaaagacgatcaaagcctcgtacagcgacgggatccttaccgtaacgatcccccaggagcagccgaaaaaactcgaagagaaaaaacgcatcgaaatcgaataatttcgtcccccacgaaagggccgcggcgcaagccgcggttctttttcgattgctcttgacgcggggtcggcgaaatgatataatacaggcatggaatacgccaatgcactcaagtttatcaacagttacaaccgtatcgaggcgcagttgaaactgatgtaccgcgccaagcccacgcagaatttcacggatcttgtcaaacggtgttcggatcagaacctgacggtgcgccgatacgccgcggaactgaccgattacgggaaactccgcaacgccatcgtgcaccgcaccatgcgcggcgatcagtttatcgccaatccgtgcgacgaggtggtggaatccatcgccgccatcgaaaaacaaatctgtacgccgccgcgcgtgatggacgctttcaaagtcaagcgcatcgtgcacgtgttcgcagacagttctctcgccgaggcgttcgcaaaattttcggagggacggagaaagagcctgcccgtctaccgcgacggaaaactggcggggatcctcaatccttataccttaatgggaaaactgttcgagttatcgcaaaacggggcggacatcgccgcgtatctcaacgatacccgctgcggcgatattctggacgaaaccgaattgggaaactatcggtttatgggaaaggacgccaatatcttcgaagtgtttcaggcgtttgaagccaaaaagcacgtgaacgcagtaataatcaccgaaaacggcgcgttcggcgaaaaagtgctcaatatcattacgcctacggattttccgattttaaacagttatatcgaaaactacgataccaaacttttgtaattcacaaaaaattataaaaattttcaaataacctattgacaaattttgaatgtgtggtataataaaaacacaaaagggagaaatactcttttgcaaacgaatttcatagcacggaagttcccgacagtcagggaagaaaattacggaagcgttaaagcgtagcaagtcgcgaggccggaagcgcaggggtaaaagtcggaaaggagtgtcagatttagaagatccgggaaccgtgcgcggcaaagggtaaaaaaaagaaaatatcctatagatcctgttttaatcggcgtgagccaaaaaagattaaagagagtaagtcaggatcggaaaaaaggataacttttggaataacctgcgccaatgaaattcgtaatacagggctgtgtgtgcaaacatacagccctcaattttccaataaagttccggtctgtacggaaaagtctttccggaattttatgataaaggagatcaggcgcccggctatggccgcgcgcctgttttcctgtctttaattcctataaaatttatagaatatactg

SEQ ID NO: 3474 - DNA, 1902 bp, Unknown
  16S sequences of unknown bacteria
gcgtggccgtccacaccggagtgctgattgccatccgtaccaatgcctccattcctgatgcaatatttttagcagacgcaccaaaccgcattttgcagtcgttcgtgcccagcataagcagcagcatatccagcggagcatgggaccacagacaaggataaaaataatcgcttccctttcttcccggcaaaatcgggtcttcaaagaccgtagtacggccgggaagcccctcttcaattatcagacactccggctttaaccatgcgctcaacagtcctgtccatcgcacatcgggcccgtagcgccttccattgccgccggggatatagccatatgtgttggaatcgccaaagcataaaattcgtttaaccattcttttttctccgtttgatgccgccgttcgcgtgccgcttcctttcgccggatgttccccatctcaaaataaaaaccatcatcatgaagaatgccgatgcgcagaaaaaaggaagtgcgtgtcccacagtataagaaaaaccgctcaccatggaaccggcaacctgcccaatagagcgaaaggcgttaaacaatcccatcaattcccctacaggcaaatttgctttgtttgttgtgagcagcgcctggtgaagcgggagatttaaagagtttatcaatagaaaacacacactgaagggaaaaaacagaattgcacgatctgtactgcatgcactcaacaagctcgccgccatacacagcacccctaccaggagcaatgggcctcttatcgttccccgccgaaccaatcgtcttataacgccagccccgaccaatgcatttaaaatgcccaccccacatttcagcacgccgttgaacagcggcgagaatgaaaagaaggcgctgatactgtaattgaatgcgctttcgaacatccagcctccgcatgcggcgatcaggatgctccaaaaaacagccgtctgccatggctctatatggcgcagacgtaccagagacagaaacggattggcttccctgaccggccagcgcccgccggttttcttttcaggttgccttgtttccggcatagcgagcaacgcatagagccctgccgtcaggtaaagcccaatttgacagacaaatcccagccggatgctcctacgcaccgggtacggagcacggcgatagcgtttgcaaatgcctttgatctccattgaagtgtggattaccgcatcgaattcaaggttcaattccttcgtaaggccttcaaagtacggttagctccaagcgacatattcctcgcctgcacggcctcccagtaaccccagacgatgcgcggcataaagagcataaaaatggacaaccaggaattggacccgtagggatagacttccaaatggttttccatacgtccgccggaaagcagggtcacgccgcctttccgggcaactgtggccacatgctggccgtaatgtccacaggatatcatccttaatcgcaatcagctccggcactgtatttacggtttcttcgatgacgttgagcggtaccggccgcttgcccagcgccgtcatcagcatgattggcagttcctgagccactgctttatagtgtgcaaacagcaaatcgtcattgttgttctgcgcccagtcagcgggcgcagtgattactctatccacgccgcatttcctggcaaaacggacaaactcaaccgtatttgttttggcgtagttctctgaactttctaggcgtgacgccaaagcgcgctttaaattttcggataaaactgggaacgtccacgtagccaatccgcaatatccatatttgtggagattagaagctcctccacttttttcagctggattgcgttaaaatattccactacgggctgtctgtctctttgcgaaactgcctgcgcagatattgagatgt

SEQ ID NO: 3475 - DNA, 7875 bp, Unknown
  16S sequences of unknown bacteria
tgcgcaattgaagcaggggacttgcttgattcggttaaagaggatcagagccgacagcaggaaaatgacaggaggagaagcatgttgaaaattggatcacatgtgagcatgagcgggaaggaaatgctgctcggctcagcaaaggaagcggcctcatatggtgcaaatacatttatgttctataccggagcgccgcagaataccaggcgaaaggagatctcagagctgaacattgatgcagcgtgggactatatggccgaaaacgggatcggggatatcattgtccatgcaccttacatcatcaatctggcgaacacggtgaaaaaggagacctatgagctggcggtggaatttctggcaaaggagatcgagcgcacggcggcatgccgcagccgggtactcgtgctgcatccgggcgcacatgtcggggccggggcggaggccgggatccggcaggcaatccgtggactgaatgaagtattaagcagtgatacgccatgctatgttgccttagagacgatggccggtaagggctcggagatcggacggagctttgaggagctcgcggcgatttatgacggggtggtacacagcgagaagctgcgcgtctgttttgatacctgccatacaaacgatgccggatacgaccttgtgcaggatcttgacggcgtgctggagcagtttgaccgggtgatcggaaaagatcagatcgccgtttttcatatcaatgacagcaagaatccatgcaatgcggcaaaggaccggcatgagaatctcggcaagggcacgatcggctttgaggccctgtaccggatcgtacatcatccggactttaccgacgtgccgaagatactggagacgccgtggatcagagatccggatgattcaaagaaatcttacgctccgtaccgtgaggagatcgcacggctgagagggaaatatattatataaaaaggtgttgagtattttctaaaatctgctatatttgtctatatacaggtattatacaaagccgcagaaagagaaaaaaggagaagacagatgaagacaacattactgattatggcagcgggaattggttcgcgcttcggaggcgggatcaagcagctggagccggtcgggatgcacgatgagatcattatggattactcgatccatgatgcaatcgaggccggatttaataagattgtatttgtgatccgcagggatattgaggcggatttccgagagcggatcggaagcaggctggagccggtgtgtgcaaggctgggtgtagagttggcatatgcctttcaggatctgcatgacattccggcaaatggtgtggtgccggagggaagaggaaagccatgggggaccggtcaggcggttcttgccgcaaaggatctgatccacgagccgtttatcgtgatcaatgcagatgactactatgggaaagaggcatttcggcagctgcatgactggctgcagctgccacacgaggatactgcgatcgctatggcgggctttattttgaagaatacactctctgagcatggcggtgtgacgcgcggcatctgtcaggtggcaaatggacactcacatgtcacggatgtcgtagagacttccaatattattaagacagaggatggggccatggcggatggagtgagactcgatccggagtcctatgtatcgatgaatatgtgggcgtttccggcaaacgaggatgaggatccggctttcctgacggtgctggataacgggtttgtctcgttttttgagacggcagttccggcaaatccgctgaaggcagagtatctcctgccgactctgatcggtgggctgctgcgtgaggataaatgcagcgtcagagtgctggagacacaggaccgctggtttggtgtgacgtacaaagaggataaggcggcggtggcagagagcttccggaagctgatcgcggacggcatctatccggaacggctgtacgatgatctggtgtaaaggtgacagcatatgaacatcataaatatcgagcatatcagcaaggtttatggcgagaaggtgatttttgacgatgcctcctatggcattcaggagggagataagatcggcatcatcgggatcaacggaaccggaaaaacgacacttttaaatatgattgcgggcagagaggagacggatagtggaagcattatccgtcagaatggcctgcacatggcgtacctttcacagaatccggcctatgagaaggaggatacggtactgtcctttgtgacgcgcgggatcgatccgtcggactggacggcgatcagcgaggcaaagagcaatctgatgacactcggccttaccaactacgaggagaagctggagcatctctccggtggacagcgcaagaaggcggcgctcgcaaaggtactgcttggttcttttgatgtgctcattttggacgagccgacgaaccatctggatgggagtatgctcgagtggctggaggattacctgcgcagattccgcgggacagttatcatggtgacgcatgaccggtattttctcgaccgcacgagcaaccgcattctggagatcagtcatgggaaaatttacggatatgaggcgaactattctcaatttctggagctgaaggcgcagcgggaggagatggagcttgcaagtgagcggaagcgccagagcatccttcggatggagctggaatgggcaaagcgcggctgtcgggcacggacgacaaagcagcgggcgcgactggatcgcctggaggcactgaagaacggcaccgcaccggtgactgatgcagtcgtggagatggattcggtcgagacacgaatgggcaaaaagacggtcgagctgcatcatgtgacaaagcagtatggggagcgcacactttttgcggattttaattatatcgtcctgaagaatcagcggcttggcatcatcggagaaaatggatgcggcaagtcgaccctgctgaaaatgatggcggggaaggtacagccggattccggcgtcgttgaggttggtgagacgatccgcatgggctattttgcgcaggaggtgccggatatggacagtgaccggcgggtgatcgattacatccgggatatcgcagaatacgtgccgacacgggatgggaagattaccgcgtcgcagatgctcgaacgctttttattcacgccggatatgcagtatgcgccggtatcccgcctttccggaggcgaaaagaaacggctctatcttctgagcattctgatgcaggcgccgaatttccttgcgctcgatgaggtgacgaatgatatcgatattccgacgatgacgattctggaggattacctgacgtcattttccggtatcattgtggccgtctctcacgaccggtattttctggacaatatcgtggaccggatatttgcatttgaggatggccacctgcagcagtatgagggcggctacacggattatctggaggcgtcgaagcgaagaagagcggctgaggaaggcgtacaggcagtgaatgtgaaggccgtgtcggggagcgtggataccggcaaggcagattcgacgaagacctggaagcagaaccgtcaggtgaagctgaaattcacgtacaaggagcagcgggagtttgagacgatcgatgatgatatcgcggcgctggaggagaaggtcgcggatctcgacgcgcagatactcgcgaatgcgacgaatgccgggaggctcaacgagctgacaaggcaaaaggaagaggccggggcgcagctggaggagaagctggatcgctgggtttatttaaatgatctggccgagcgaatcgagcgcggcgagctggtggagcaatgatctgtgagtacatcaatccttttttatctcagtcaggaggactcctgctgagataaatgctccgcgttcaaagaaaaataaaaaaacagttgacagatcttaaaaactgcggtattatatcttcgttgcttgcgggtgacaaaaattaatagttttaagatatgcgggtgtagttcaatggtagaacatcagccttccaagctgaatacgtgggttcgattcccatcacccgcttttttgctgcagaaaattgcaaattcttttttatgcataaaaagcggccggcttccacatacttgcaagagataagagcggatcaggaggtggaaggatggtgcaatatgcatttcatgtatgtattctggcctgcaccggaatttacttttatcattggctgagaagagctgcagaggcattcggattctggcccgcacatcagagtgtgcggcaggtcctgatgctcctggcggctctttttgtgtttcctgcggtcaatatctggggtatctgggcggttgtgatatttcatctgctcgcgtttgctctgtgcatggatggcgtgcatagcatctggaaatacagccggaaaggaaagggcggggtatccggaaaaaggtttgaatggttatgggcgtccggcctcatgccgacagctgcagtagcggtgcttttgctctatggctggtggaatatgcaccacatcgttcgcacgtcttatacattgtacacggacaagccgatacggaaggagggctaccggattgcctttttctctgatctgcattatgggacgacgatgaatgcagaagctttgcaaagcatatgtttgcaaatcgagcaggaaagaccggatattcttgtactgggcggcgatctcgtcgatgagcacacatcccgtgaggagatgaaggaattgtttgaaatgctttcacaggtcacgacgcagtatggtatttattacatctatggcaatcatgaccggaatgcctatacaaagcacccgaactatacggcaaaggagctggcggcggaaatggaagctgtcgggatcacgatcctgagggagaatgcggtggatattgaaaaagagctgctccttgtcggtcgggacgaccggacgaatccggacgccgccggccgggtaagcggagcagctcttgtaaatggggtaaatcaaaacgaatatctggtattgctggagcatcagccgcgcaatctgaaggagaacagtgcactgggctttgacctgcagttgtccggacatacccatggcggtcagatcgcgccggtcggatggctgtaccgtctgaccggatttggtgagtggaactacggtctgacatccatcgacggccttacggtaattgtcacctccggtatgggcggactgaattatccgatccggacaggaaagcacagtgagtatgtgatcgtggatgttattccgactgcgcagtcgctgtcttggcaagtacatccttcagctcattgatcatctcctcatcttttaggcggaagcgtacttccacgcggcgggaggcatccatattgacttcgccgtcactgtagacgggattgctcatggagtgaccgttggaggtcagcttttccttgaggcttgtgagctcgtctgcggtcaggaagctgtcggcatcctgaaacagatagctggcgacagcaagtgcgcgtgcctgcgagagctccagattgtaaacatagtcgccggatgtatcggtgtatccgtcaatgctcagctctgccagataatcctcatactgtggatccatgagtaccttacagtagaccgggaggatctcgccgagcatggcaataccctcttcggtcagctcgctctcattgtaggcgaagagtacgttcgagtcgagggcgattgcgccgctggcctcatcgatgacgacgtttagattgtgttcgtcaaactggcttttcagatcagcgatcagatcagcctttacaccgatgatctgttcgattttctgctgctgatccgcgagcagaccttcctgctcatcaagggctgcctgctgtgcagccatctgtgtatttttctcatcgagctccttttgctgggaggcgatgagcgcttccttttcctgcaggtcagtccgggaagaagcgacgagcgctttttgctcctccagctccgtctgctgttctgcgagcagggcgcttttttcatccagatccgcctgctgggaggcaagcagtatgctttgctcatcaagggctgcctgctgtgcgttgatctcgctttcccgctcggaaagctctttttgcagctgtgtctgtgtctgctgatgtgcagcctgctccgagagcttttcgcggtaatttttctgagcttccatgaaggagatgcacatgacgaggacgaacaggagcagaagcccggccatcatatccgaataggcgcgccatacattatggccttccgaatggtgtctgcgccgtcttcttctcatgaccgctgcctcctgctttcagatgtgctgctttttttctctttttttctggaaaagaagagcggacgttctgtcagctcagccagctcgtccatcttgcggagcagctggtcatacatatcctgctgtacatcctgcggataattttcggaaacgtggcgtgccatctcgacctggcgctgctgcagctgttcgagctgtccggcaaggcctgcgatctggcgctgcagctccctggaggactgaatcggaccggatgcggcgatttcggaggatacctgccgcatgtcttcgctgttgctcttccagatttcggagaactgctccagactctgatacatgaagcggatgtaatcctgataggctttttgttgatcctgactgatttgtgcggcttccttctgtgcaatggccagctcctgcatagagtcggcgaggtgctgctgagtctctttagaagaaccggtcatggcattgagtgtacgctccattcggtccatcgtccggtccatgaagtccgaatatccggactgagatttgccaagctctgtgacgagcttgtggatctgctcgaattccgactcgagctcgtgccgcatctgccgcgcgacggtcgtgcacacgtttgtcagaagctcctcctggctttgcagcagcgtctccgtcacctgcgagaagctgtccgtcatctttgtgaaggccggtgtgatggactgctcaaagctctgcgccatctgctcgacaaagatgccggtcagatcgtgaacgagtgcctcctgatccttctgctgtgccatgagctttgaaagcgaatcgacctcgtaaggcggctgtacatactgataaaacgcatccagaaacgcatccagcgcaaaggagagcccggaaaattcactgcgcaggttgaaggaaaaggagagcgagagtgcgatgccgtagatcgaggtgataaatgccaccttgataccattgatcaacggcgtgactgacccggtcatctgttcatagccggacgggtcaaattccctaagtcccatgaccagtccgacaaaggtaccgagaataccgaggctggtgaggatatccgagacaccctcgagtacactgcggtgaacgtaattctcaatggcatcctcatttaagaagttctggatgtcgcaggcgctttccgggtgattgcggcgcatgctgcagaactgctgatagcagtcgtccagaaatgcattttcaaaaagtggcgtggtttctgaagcgccctgtcggtcacggatcgctccggtcgcccgccttaaggagcgggtgatctgcatcaggcggcgcatcccggtcagggaagccgcaagtatcatgcagagcatcaaagcgagaaagccgagattgaaaaagatggtggtccggtccacatcccggctgaaccaggtgataaagacgcagactccgatcgacaagacggcccctgccacagaaatgattctccgtgtgtacaaataaatacccccttttataatagaatgatgccagggtcaaaaggtcaaaaagccgttcatgcttgcatgataag

SEQ ID NO: 3476 - DNA, 13808 bp, Unknown
  16S sequences of unknown bacteria
tatgcacggcggcgatacttctcgaccccgtgacggcgttcgcggtcggcggcatcggctcgctcatcggcgacttcttcttctatccgtcggcgatggtggtctcgctcgtggttcacggtcttcaggcggcggtcatctcgctcgtcgtcaacgggacggacgagatccgcggtctcccggtgaagccgagacggttcggcaaggcggttatcggcgtcgcgctcggaacgctcataatgactgtaggctacacgattggcgccgcggtagtctattccacgcccgagtacgcggtgatcaatatcccgtatgaactgctccagtccggaatcggctccgcggcaagccttctcatctgctatcgcttcggactcataaaggtctatgaccgattcttcggcaaacccgtcgcggcaaactgacgaagataattgaaaaggaaaagaaagaaaatgacagacacacaggcaaagaatcactacacagtaaagtggataaccgttaccgccctcttcatggcgctcaacgtcgtgatgagctccttcggtctcccggttccgggcggacatctctatctcaacgacgtaatcatctgcacggcggcgatacttctcgacccggtcggagcgttcgcggtcggcggcataggggcttttctcggggatttcttcttctatccgactccgatgtttgtttcactcgtggttcacggacttcaggcggtcgtcatctcgctctgcacacgcaagctcttcaggggtaagaacgacggcaagggcaagcctgtgctcgcgtcaaccgtcggcgtgacactcggcgtgattatcatggtcgtcggatactcgctcggacgagcgttcatctattctactccggcttacgcgatagccaagctcccgttccagattcttcaggcggctgtcggcgccgtcgcgggcgttatcatcgtctacaagtgcgggcttgggaagctcttcgataagctcatgaacaagtgaatatttctcctccgcgggtcactcgcgggggatttttttaatttctgtgcttgtttacaaatccggcatagcatccgccgcgcgcttgccgtataatattttcaagcagacttttgacaggaaggaataacatatgaatcaatacgaagagcagatcagaaacctgtaccttggtatcctgaacaattaccccgaatttgccgaagaagatgacgcacacctcgaatatgacttcgcggcgccggaatttgaggaactgcgctccgcgtataaccttgataatatcgcgggaaacggcacagcctctgagcgcgccgaaaggcttctgcactacttcgcgccgagactgaagcacgaatccttttacgacaaccacgtggagtgcagcgcgatgaagctgctcacgtacagctttgaaaacgacgagcacgggataaactgcctgaacaaggcgaaaatcctcgccgagtgctgtctggctctgggcattttcgcgcggagggtgttcatccacccgttctcaccgtttgattttgattcccacgtcgtctgcgagatatttgatgagcagcggggaaaatggataatgctcgatccgacgaccgacggttacttcgtgaatgaggacaatgtgccgctctcaatgtatgagatacgaacaaactacctgaactccgaatttctcactctcgtctccgcggatgacaaagacgccgacctccggaaagcggcggagaaaaacgaaagcataaacctttatttcctgaaaaactgcttccgcatatccttcgagacatacaacggcttcggtgaaagaaaaggttcagtctgccttgttccggagcactacccggtgtgcaggaacgaagagctgaaccacagattcagagtcgaaaatatgccggaagaatacaggtatcttctcgacgcgcaggaaaaatacctcgaaaagacaaatcacacggaggaaccgaccgcgtacagtgtcaggtctgtatacgccgcgccggaacggaagtcctgacaatacggttgaccgtcagttcagcccgaacgcctcgggaaggagctccgacagcgtgaaccgcttcatgtttctattcgtatcctgacagaagaccaccatatcgccgaactccgacagcgcctgacgacagatcccacacggcgtgacgatccgctcagcgctcacgcagatagcgcggaatctgcgctccccggccgctatcgccgagccaagcgcgacccgttcggcacaggtccccgcgccgaacgacgcgttctcaaaattgcagcctgtatatatcttcccgctctccgcgagcagcgcggcgccgaccctgaagccggaatacggcgcgtaagccgcctcacgcgccgaaagacttgatgacgcgagagactcaacgagagaggtttcaataagtgtgttcatttcattattttccatgattttgttcctttcttcaccgcggacgtcaggctcttctgacccttatataattatataacaaaaaggagcggattgttacaggaaaatcaaaaaaatcgtccgattctcagaaaatcgtcatattatacattgccgctcgcaatatctgtgcaatatgacaatttctcgtttttttttgcttttctctattgacattatttcgtctatctggtataatattcacagacgggtctgccgtttggttattctgtgccgtcaggggggatgttccggtgtactttggatgagttattcgagacgttcatgcgtaataattacagacgcttctacgccttttgcgtttcgcgccgcgcgggacacggtgacgccgatgatatcgtgagcgaggcattcatgcggctttataaaaaatggccggagatattcagatacacagacgagtacctcataaaatggatgtataaggcgataactctcataatcaatgagtacaggcgaaatgaccagacgcacgacaccgtgaacctggatgactacgccgacattctcacggtcggaaacgacgccgacaaagcgttcaggtacagtgacctcatagagtcgctcgaaaaagacatgactccatcggacaaggaactcttccggctcgtgttcctcgtcgggttgcagcggcaggagctgtgcgagcgattcggtataaacgaccaggcgctgcggacaaggatatcaaagctcaaggaacggatgaaacgaaccattctgaaaaaaatttatccggcctgtaacaacaaccgcttttttaacatatagtatatgacggcaatataatgtttcactgaaaaagcatctgtcagcaaggaggctgtaatgtttgaacgagaatgaagattacagaaaaaagatgatcgatttcctcggcggcatcatcgaaatggagtccgggaaaagcgacggcgaagctaataccgacctgatggaggagtgcggagatatgctttgcgatcttgtcgggaacgacgccgctatatccgacgacgagattgaaaaaagaataaaaattgtcacgggcagaaatgacacacggagccacacgaggaaaaggaccgccgcgcgccgtgccggttcggttattttagcggcggctctgctctgcgtcagcgtcggggcggtgtgcctgatagacccgaagctgcgggaaggcttcacgaccgctataggcatgggatacggcaaacccgtggacgttgacaactacacgttcgaggtgatcggaaccgcccgtatatacagtaacgctgaggaactgctgaaagcgatcggttttgacatcatgtatccgcacgaattcccggaaagcacgggcttcaaggagataaacacggttgaggaaaccactttcccgataattttcgcgttcgatgacccgctattttcggtctctgtacatgagcgcggaacaacaagcaatgaagaatttcagaatgaccatgacatcgtcgtcactatcggcggcaatacgttctacataaaggaaacagccgatcaatgggtcgcgctgacaatggacgatctgtacacataccagatctggagcgcaaatgaagaagatctttatactatgatgaaaggattaaaatacgcaaatgagtaaactgaagaaatttgtcaggagtgccgctctgtcgatagctctgaccgcggctatgtccacctgcgcgatggcgctcacatcggatcagacttacaacagagacatagaagtcagagtcgaagacgccgacggactgtccgaaagcgagatctcaagagtgaagaacggcgtcatcgccgtctatctgtccggggaagtcgcatccgacggcatcagcacgagtaacctgacctgcaccctgttcggtcacgacaaacagacgcgcaacgcgagccttattgaacaccaggtcaacaagaaagctccgagatgcaagcaggtctattataaggttataacctgctcaaggtgcgactatatggacacggagaccatatcctcgagctatatctactgctgcgccgaggactgatttgcagattgcagtctgagccgtatgacggtttaccgccattttacggcaccaaaaaactcccgatgacatttttgtgtctgtcatcgggagtttttatttatgtgtcgtttcctgccggtacaattgcttacgtatccgggtcagctcacgggtcacctggccgcttcgatgaggcggttcagctgcgccgaaagctcagcgcgggtgacggtatcagcgggtctcaggcagccgtttccgtcgccgcggagaatgtcggctccgcacgcccagcagagcgcggggatcgcgtactcagaagccgtgtcaatgtcgtcaaagctgaggatgttcgtgtcctcgccgacagagacgtccatcttcttgtactgcgcgtagcgatagaggaacgcggcggtctgctctctggtgacaacgtcgtcgatgccgaagcgtccgtcgtcatagccgttcgcgatgccggtctcatttgcccacgcgattgcccccgcgaacgcgttgtcctcagcgacgtcggtgaagagcccggcgctctcagcctcgggtctgccctcggcgcgccagagcgcctcgataaggacggcgcgggtcacgtttgcctcgggctcgaacgcgtcctcggtcacaccgtcgatgagaccgttgtcccagacatagcgtacgtcatcgaagaaccactcgtcggaggtcacatcggtgtacggaaattctacgatcttctcccagccggcgtaaacggtgatgtttctgtccatcgtgaccttgccgcagggcttcgtgcactctgcgtcgagataccagccggtgaagacatagccttccctttcgctcgtgtacgacgaaaggtcaatcgtgctccactgcatagaccttacggtggagaccgcggtgccgccgttcgtgtcaaaggtcagggaattgaacatgatgatcggcagcggatccggctcctcgggctcgggttcaggttccttttcgccgagggtgcctttgacggttacggtgatggtgcggaatgtctcgccgtcgccaagaggtccggggtcaagcaggtagctgttatcatcgtcaatgaagttttctgcgtagaaaaccctgagttcaagcgtaacgtttttgtcgtaatccggacgggtgacagtgccgtcattcgctataacagatgtatcagaagatttccacgagctgtcgatgaaataccacccgtaatcattgtcttcgagaaggcgcggaagtacaagatcatcagtaacagcgtcctttgaaggattagtgccgagaatacctttcattacatcatcagcggtctgctcgagacgctcctgacgtgtgaaaatgtgctcagggactatgaatgttacttctatggtatcatcgtatgtttttccgttcattgaaagctcaaatgaaacttcatatgcggcaccttcagcctcttccgaatagttttcggaatctaccgcatagtaattgataacgccattttcattgatgacagaataatcagtgtcttcagaagcatcatcataataccaagagtcaaggcagacatcagcaacagaaattgtcacgttcttgaatttgtctccgcttttatcaaggatagcacgcacccaatcaatgacgttcacatcctgatagtccgaatcaatcgaccacggaatgaattcatcaccgggctcataaagatttccggagaactctgtcagtgtgatatcctctccggcaaaattgaaaattgcggaataagcatcagaaagaatggtgtctgtcatatccttcagactgactttgataacatagttgttatttttaagacttgtgtcagtcgcgttgaatgttttgtttacagtctcatatccatcagccgaaatgatataccggtactgaccgaacggaatagtataaacaccattcacatccggctgaataggatcaccatatttaccggacccaccgtttttgtaaagctcaactttcgcgtcttcgggagttacagaaaaacgcaccggatagtatatagtttcaagtgcaacatctatagtcatacccgcaccattgacggtgaaagttccggacttaccctctttttgagaataactgaagttgtagttgtattctccatccggaagcgcataaacgttgctttcccagccgttttcgcccggaacagattcatactcattattctggttatcggtaaccttcgcactcatcgcatagaattcaactgtctttccctccgtcgtcgtgacattgaacgtgacattatgcttcacgttctcatccgccagcacccccgtcggcatcaccgcgaaaagcagcattaccgtgcagagcatgagtatgccgagccggaagccgttacgcttcgttctttttcccatttttcctttttcctcctgtaatataaaaaagagagcatatcgtcccgggaatcatattcccgggagcgacatcctctcatacccagaagtgccactgcgatccgccgtcaccgacgaacgcaaaacgaaaacacgtatggtatctgacttgagacgcacacagaaagcccccataaaagacggtgtcacagcgtctcacacagtaagggcagttgcgtcggatttgaaccgacttccattacatctactcagtttacaacctttcaaaccgtgttcccgattgctcatattcgtaaaatattataacacatacgtccggaattgtcaatacctttccggataaaccccaaaaaagtttattatgccaataaaactatcacggtttactgggtctcacatccaagaatctccttcgcccgtctgacagactccgccgtcggcggaaccacatccttcagggtgtaaggaatccccaatgtttcccacttgaaaactccaagcgtatgatacgggagcacttctacttttttaacgttagacagcgtatccaggaacgcgcgtataccgcggagattctcctcgtcgtccgtcacgccgggaacaagcacatgacgtatccacatcggcttgcctgtctcgtcaagatatctcgcgaaatcgagaatattctcgttcgtgtgcccggtgagccacttgtgcttctccgggtcgatatgctttatgtccagcatgacaaggtccgtatactccatgagcgccgataccttcgacatgaacggctcctcccgcgtgaacggctgccccgcggtatcaagcaccgtgccggcgccgttctccttcgcgagacgatagagctcggtcagaaagtcgatctgtaagagcggctccccgccgctgaccgttatgccgccgtcatttttccaataaggtctgtagcggagcgcctgcttcacgagctcggacggcgtcatctctctgacgccgttcacgctctccttgccgcccactatcttccaggtgtcaggattgtggcagtatctgcaacgcatatgacacccctgaaggaagatcacgaaccggacgccgggaccgtccacagagccgaagctgtctatcgaatggatatatcctgttgtttccataaacggtcagtccttctcgttaaaatcaaagagtgtggtggcaggttctggagatgacgtcgagctgctgctctctcgtcaggtcgatgaacttgaccgcatagccggaaacacggatagtgaagtttgcgtactcgggcttttccggatgctccatagcgtcctgaagcttttcaagaccgaacacattgacgttgaggtgatgagcgccctgatcaaagtaaccgtcaaggacattgaccagattgttctttctctcgtcctcgttgtggccgagcgcgtcgggagccatagtctcggtgttggagataccgtcgagagcatactcatacggcagctttgcgaccgagttcagcgaagcgagcagaccgctctgctccgcgccgtaagacggtgtagcgccgggcgcgaacggagtgaacgcagggcgtccgtccggaagagcgcctgttgcctttccgtagacaacgttggaggtgatggtaaggatagaggtggtagcctcggaatttctgtaggtgtgatgcttcttgatcttgcccatgaaggtcttgaggagccataccgcgatcttgtccgcgcggtcgtcgtcgtttccgtagcgcgggaagtcgccctcgactatgaagtcggacgccatgccgttctcgtcacggacaaccttaaccttcgcgtacttcatcgcggagatcgagtcaaccacatgcgagaagccagcgataccggtagcgaacgtacggcgcacgtcggtgtcgatcagagccatctcagcagcctcatagaagtacttgtcgtgcatataatggatgaggttcagaatgttgacataaagaccggcgagccaatccatcatgatatcatacttgtgcatgacctcattgtaatcaagatactcggaggttacaggcgcgagctccggcccgacctgagtcggcttgccgtccttcgtcatgtacttctcgtctctgccgccgttgatcgcgtagagcaggcacttcgcgaggtttgcgcgcgcgccgaagaactgcatctccttaccggtctgagttgcggacacgcagcagcagatgctgtagtcgtcgccccataccggacgcataacgtcgtcattttcatattgaacagatgaggtgtcgaccgaaatcttcgccgcgtacttcttgaaggtctcaggcagacgcgaagaatagagcacggtcaggttcggctccggagacgggcccatgttctcaagggtgtggaggaatctgaagtcggtcttcgtgaccatagaacgaccgtcctgtccgagacccgcaacctcaagggtagcccagaccgggtcgcccgagaaaagctgattgtaggacgggattctcgcatacttgaccatacggaacttcatggtcaggtggtcgataagctcctgtgcctcagactcggtgatggtgccctcctcaaggtcacgctcaaggtagatatcgatgaacgtggagatgcgtccgacgctcattgcggcgccgttctgggtcttgatagcggcgaggtagccgaaatagagccactggatagcttccttcgcgttcattgccggaccggagatatcgaagccgtagatcgcggccatatccttcattccctggagcgcacggatctgctccgcgatctcctcacgctgacggatgatatcgtctgtcatcgtgccgtcgccgcagagagacatatccttcttcttttcggcgataaggaagtcaataccgtaaagcggaacacggcggtagtcgccgacgattcttccgcggccgtatgtatccggaagaccggtcacaatgtggcagtgacgcgcgaccttcatctcgggggtgtaagcgtcgaaaactgcctggttatgtgtcttgcggtactcattgaagatctggtcgtacttctcgttgaccttatagccgtaggtctcagccgcctcctgagccattctgataccgccgtacggcatgaacgcgcgcttcagcggcttgtctgtctgaagtccgacgatcgtctcgaggtccttcatgcgttcgtctatatatcccgggccatacgcggtcaggcttgagacaacctcagtctcgcactcaaggactccgcctctcgcgcgctcctccttctggagctcctgaagacgaccccagagcttgtctgtagcctctgtaggagcggcgaggaagctctcgtctccgtcgtaatttgtataattgttctggatgaattcacggacattcacctcgtcggtccatctgtttccggtaaatcctctccatgctttcttgaaaatttctgttttcccattcggaaaattctgttcagacatttgctttctccttgtctactttgctgttctctcataacagccgggggcgtgcgtaatggaaaaaataaaagaccgcccctctgtgctgcaatcgcccagacggtcggccatattcgatcatacttcctgtggtttgcccactgatccgtcagttatatgatcggcatgatttattcagatattacaacattggtcagctccggaacacggcgccgcgacacgccggaaagcgtccggtatcgcatccccatgttccggcaatattataccatatccgacgacccgatttcaatacctgtcaatatactaatctgaaacaatttcgtgaacaaaacattccgcgatcctccggacagagacctgactgtccccgcgccggatcagagccacttgtcgagctccgattcgacctccggtatcttcttcacctgcggtgagcggatgatattatcgcgcattatcaccgtatcggggtgtctcagcgtcttcagatcctcgagcgggttcttgtccgtgacgatcatctccgccttcttgcccttttcaatcgatccggtctccttgtcaatcccggcgagagccgcgttcagcaaggtcgcggaatagatggcgaacgactcgctgactccgcagtacttcacgtagtagcacagttctctccacatatcgtactgcgtgacatacgggcacgccgtatcagtgccgagtccgaccggaatgtcgttcttcaggcactcctttgcaagagagatgattccgtcaaacacgatcttaccgttctcctgctgctcataagtcgcgtgagagacagacctgtcaaacattgcaaacggaagagcgggagatatcgttgatacctgaaaggcattatgttctttgaataactcaataatctcatctgtcggcttcgcgccgtgctctatcgagtcgacgccgttttccagggcgaccttcactccctcagggctctcaacatgagccgccaccttgaaaccgagctcatgcgcgcggtcgcaggcggctttcacgagctccggcggcattctcaggacgccgggctcaccgaccttctccgcgtcaagcacgccgccggtgatcatcagctttatgatgtccggcttttccttcgcgatgatgtcgacataattcgccgcctcttccggagtcgacgcctcgtaggcaagcgaccctgccatatgcccgccgtgcaccgaaatcgccatattcgacgcgaggatacgcggaccgagcaatttgccggaattgatcttgtctctcacatatgtatcaaaatccgaaatcccaccaaccgtgcggatggtggtgacgccgctcagaagttgagttttcgcgtatcccgcgacaagctttctgccgatgctccttgtgaatgagctcgatgtgatcagacgcaccagcctgaccggatcggactgcttcttcttcggctttcccgacccggcaagatgaacgtgcagatttataagtcccggaaggatgtatttcccgccgaggtcattcttctcataaccgcccggaatctcgttatccggaactatatccatgatgatgccttcttctgtaagaacagctttcccccgctgaggaaccatatcctttgtcccgtccagaataataccgttcgtaaacgctcttttcatactttcgttcttcctttcgatactccgcgcagattccggactgtatgtatcaacagtatatcgcatccgcagacggaagtcaacagaattatcgtgaatttatcgacaaaaacttatgaaatcccgagtattcagcattgagtacgatacataagctcaccattccggcaaacaataaggaagccgccgcgtttccgcggcagcttccttttattctgacttctggttacttggatgccttgatgtcgttctcgtacttctcgatcatcttcttgaacgtgtgacccgcacgactctgacttcgttccgcgaggttactcagccatctttcggtgctttttccggtgaatatgcggattttcaggttcgctgtatcatcatctgttattgtgaccatgattttgtcgatatactgcgcgacgaactcgttcgtgataagtccgtccgccgcgtcgcggaccgccgcgtcaagtctcgttctgacctctgacatatgcctgcggtactcgtccttggtaaagaccagcttttcaagctcggcaatttcagcgttcgcctcgtcgatctcgcggtcacagctgtcggtcatcgatttgaagttcgccgctgtgaccgttccaaacgtgacaagctcgaggagcttgtttttcttttgcccggcaagcgcgatagtttttttgagctcttcgatcttaatcgcggtttcgtcgtcgttctccatcgagcggaacatctcggtgtagctccggagcatcgcctcggtgtcgactctcgtcgcgctgaacacatcgagcagtatcggctttatctccgactcgtagatcgggaatgacgggcaggaatccgcgccgttgtttatcttcccggcacagacccatttcgagttgacattgccatgcttgtccttcgactcgcggcggtagtagggctttccacaatgtgtgcaaaacagcttcccggtcaggagattcgcgtgattgcagataccctgacggttcttgacatcctcactccggcgcgcaagaacttcgttcgcgcgttcccagatttcctccgaaaccagagcggggacaatctcgcctgtctcgtccttgtacatcacccagtcttccttcggcagaaatttctgcttcttggtgaacatatcgacgacgcgcaccttgttgccgacgtaataacccttatatttcgggtttgagattatgccggacatcgtggtgtgcgaaatccggttgccgttgtagttgcggtagccctcgtcatagaagcgcttttcaagctgcttcatgctgtactgtccggtcgaataaagccggaagaggtcgcgcaccatcggagcctgagtctcgtcgattatcagccgtttgtcgtccttcctatagccgaatatgcggctgttgccgagaactacgctcgactttatcgcctgctgatgaccgaacttcacgcggcttgagagcttgcgaagctcatcctgagcgattgaggacattatcgtaagacgaagctcggcgtcctcgtcgagggtgtttatgttgtcgttctgaaaaaacacaccgacgcccatgctaagaagctgtcttgtgtattgaagcgagtcaagcgtgttgcgggcgaatcgtgagatttcctttgttattatgagatcgaacattccggttttcgcgtcagagatcatctcgttgaaatgctttcgtttcttggtcgagattcccgaaagtccctcgtcgatgtagcctgggacaaaaatccacttttcgtttttcttt

SEQ ID NO: 3477 - DNA, 32759 bp, Unknown
  16S sequences of unknown bacteria
gtaatttattctgtaagaattcgctccctattaaacgttaactaaatgacattggttcagagccaagcaaaatttcataaaacaggcggaaaatgcttgcatttttaagcctgtttttgaaattttatttggcggatacgccacaccgacgaaatgcgtagcattttggaggttggctctgaacagttacataaaatgaactttgaatttgccacgttttccgccatactgttcttcgcagccccgcagggaaccttgcctgactcggttaaaaaggctgccggattactccgacagcctttatcttacctgattcttccagtttttacaacacttttgagagaaaatcctgcagtctcaggttctgcggatgctcaaaaatctgttccggtgtgccctcttcaagcagctttccgtctgccatgaacagaacgcggtttccgacctcccgcgcaaatcccatctcatgagtcacgcagaccatcgtcatgccttcttttgcaagttctttcataacgtcgagtacttcaccgaccatttccgggtccaatgccgaggtcggttcatcaaacagcataacctccggctccattgcgagcgcacgcacgatcgctacacgctgtttctgtccgcctgagagctgaatcggatacgcgtctgcacggtctgcaagtccaacacgatccagtaatgcacgtgccttcttctctgcctcctcacggctcatgccgcgcaccttcatcggagccagcaccatgttttccagaatcgtcatatgcggaaaaagattaaaatgctggaataccatgcccattttctggcgaagcgcatcaatatcgagcttcacagtttttccctgtgcatttttatactttttctttgtgatatccacaccttcaaatatgatcgaacctccggtcggttcttccagaagattgaggctgcgcagaaatgttgattttccggagccggacggtccgatgaccaccatgacgtcacctttgttgattgtcgttgtcactccgtccagggccttgattgtgcccattttataatgttttttcagatctgtcacctgaatcagactatctcttgtcgccacggctcattctcctttcaaagtatgcgatcagcttcgaggtcgggaagcacaggcagaaatagattgccgttgccaccagaagcggctcaataataacaaacgtcgcacccttgactgcgtttacggcagacatgatatcctgcacaccgatcgtataggtaatcgcagattccttgatgatcactacgaactcatttgcgatcgccggaagaatatttttgagtgcctgcggcagaataatataacgcagattctgtgcctgggaaagaccgagtgatctcgcagcctctgtctgtccgccgtcgatcgactgaataccggaacggatgatctcacacagataagcgccggagttcataccgagtgcaacgacaccaggaaaaaaacggtcaaatttaatgaagccgaacatccggaatgacggaagctggatcatgctgaatacgccataataaatgataaaaatctgaacaatgactggcgtggaacgcagaatctccacatatgccgttgccagaaagctgagcggattgaaacggctgatgactgccagcacgccgccctctctctgatgtccgtccctgtcaaggccaaggaaacgaagaggccggaaattggacagcctcatcagcgccagtaaaagtgcaatgcaaaaaccaatcgcaaccgtaaataaagacagcagcactgtgaccagcatgccctgctggaacagttccgcatacggcgcaatcaatgaaaaattactcaatttgataaaaccgtccattctaattcctttctctttctctgtctcttttctttcccaatccgtttttgtatacccggcgaagaaagcttgcccatgcagcaatttgcatccggacaaaatcccggttctgaaaatcgtatgtcacaaaaagctgccgcattctgtctgtttcgcatcgtgcagcagcttttccgcagtttttatctgtttttcggcaatttttcataccttgccggaacatttcttccttactctgttacagcctctgtctcatctgctgcaacttctccattttcatccagaagtccttcgtacttctcgccggaagccagtgcatttgcttctgcaatatactcctccagagaaccatctgcctttgcagctgcaattgcttcattgactgctgcaagcagctctgcattacccttggatacgccgatggaagatcctactacatcgtacggtacatctgctacgatttccagatccggatagttcttctgataactctttgctacatctgtctcaatatatgccgcatccagcttgcctgcaagcagctcagaaatgatatctgttaccttcggaagcgatacaatatctgcatccggagaattcttctgtgcaagatccagctgaatggaaccagtctgtgcgcctacagatacggacggatcattgacagcatccgtagaattgtacgtatctgcattgtcctttacggtaacgagtgactgtccgccttcataataaatatcagagaaatccatagcagcctcacgtaccggatccggtgacagacctgccatgccaagatctaccgatttcgtctgcagctcggtcagtacgccatcaaaatctacggtgacaacctcaagctccagtcccatgtaatcagcaatgtactgagcaagcgccatatcaaaacctgccagtgacggtgtaccatcctcgtcaattgcataaaattcatacggagcgaaatccgggctcgttgctacagtcagcttgccgtctgtgaccgtctctaccgcggacaggtcaacgcttccctcggatgttccttctgtgctttcttctgcgaatgcagtcattgaaaatgccatgcatccaaccagtgcaagtgcaaataatctctttttcatgatcttttcctccctgcatatctatgcatatttataaaatttgaatgaacttgttttattatagcctatttttttaattatgcaagcagaaaaaaacactttccctgattttatccctgttttcttcccaaaaagaaagctgcgcagatgactccgccggaaaccagtgcattccggacgtcattcccccagaaataataccggctgtctgcaatacagtaaattacataaactgctgttccaagtaaaaataaaatcaggaaccgaaacgcttctgcacgtccccgtttcttttttccgctcattccggcccagtcactccgcccggtcagaagcattaaaattccaagcacgtcaagcaaaccaagacacaccagcccgaaatcttttgattttccaaaaacagttaccggaagtgtactcacagaaaggaaaacgatccccacccctgcaagaatcagccacagcacaaagaaaatatccgtccattttctggttttacccgccatttcctactcctcttccccatgtgcattctgtactgacagttccacttctgttttttccagcgtttcattttttgtcgtcgctgattcagagttcgtcgtcttttttaatatttctctttgtaccggcagcccattatgttcttcccacatcacgagaagcgtgccttcctgtacggaaatactgctctcctcaccgataaattcattgctgacaccaagcgccttatcatttttcagcgcagcgtcatccagtgtatatttcagtcccttttcccagattcccgtcgatacatctgtcatgctgaacacagaaatcatgccgtctgcctcttttgcaaacgaaatccgttcaccggtgattgctgtcacaatattattttctccgatcagataagccttcattcctgcacgcgacaatccagtcagcagctgaaagtttgccatcgtatgatccagtctttttccgccaagccctccatataaataaaagagccggtatcctttttcctgagcataaaaggctgcaagcgccatgtctgtatcatctttgatcggtgagtggcgcaggatatggtcgtgttccggcacatactccagagaatcaaaatcaccgagcagcacgtccggctggattccaagctgtttcagatacgcatagccgccatccgccgcgattacaagatcgtcctcctgcggcagcgaatccagtttttcaaagcttccggcgccaacgatgtaacacgctttctccgaaattttctgttgttctcttccctctcccactgttcttttccctgtctccttctgcatcacatacgcttccttttctttatttttctatctttagccttcgtttcttctgttattatcagctttttgaattaactgtcctgcaaaacaaatattcccagccaacttcattactgtaaacaaatttccccgaagattattttcgttttcattattttcgttttcatccattcttttctcatcgtaatgcatatatcaaaacggatatcttttcttttacctttctgcccaaaaaggccgccgcataacgcggcagcctctctgtcttatttctgcctatctgtatgattaaaccggataagctttattcttttcatccgctacggtcggatctacctttttctgctgtgcttctctgtatttgaagaagtcagtagctacctgcgggaacagtgcataggacagtacgtcctcatcctgctcagaccactgagccatctcaccacgcagagtatccagctcatccgggatcaaatcagccggacggcaggtgataacttctgcatcgccgatgcacttcttctgtacttctttgttgaacggtttaaccgttgcgccatacttgccgcacagaacgtcttttgtctgctgcggaaccattttataacgctcgccattgataacgttcataacagcctgtgtacctacgatctgagaagacggggtaaccagcgggcactcaccgaggtctttacgtacacgcggaacctcttccagtacctgatagtacttatcctctgcatgcagatccttcagctgtgaggtcaggttggaaagcattccgcccggtacctggtacagcagcgtcttaatgtttacaccaaggttcttcggattaagcagaccgctcttgagtgcctcatcacgcatcggacggaagtaatcagcaatctcatccagaagcttggaatcaaagcctgtgtcatacggtgtacccttgaaggtctcaaccataacctctgtagccggctgagaagtaccaagtgcaaacggagacattgcgcagtcgatcacgtctacgccagcctctactgccttcaagtaagtcatggaagcgacaccggatgtataatgagtatgcagctgaatcgggatctttacgttctctttcagtgcttttaccagctcagttgccttgtacggaagaagcagaccagccatatccttgatacagatggagtttgctcccatttcctcgatacgctttgcaaggcttacccaatactccatagtataagcatcacccagtgtataggacattgctacctgagcatgacctttttccttattagcagcagatactgctgtctgaaggttgcgcatatcattcatacagtcaaagatacggatgatatcgataccgtttgcgatagatttctgtacaaaatactctactacgtcatctgcgtacggacgatatcccaggatgttctgtccacggaacagcatctgcagcttcgtattcttgaagcctgctcttaatttacgaagtctctcccacggatcctcatgcaggaaacgaagagatgcatcgaaagttgcaccaccccagcactctacggaatgatagccaactttatccagcttgtcaacgatcggaagcatctgctctgtcgtcatacgtgttgcaatcagagactgatgcgcatcacgaaggatggtctcagtaatcttaattggtttttttgcctgttcagccattttgttcctcctgtatagaatggcgccgccaaacggcgccataaactgttcactgtcaaagcagacctttttttagtccgcccacataatcgaatcgctgcaaagcagtgatttcatcatactccgaaaattgccatgaaagtaccggctgctactgcagtaccgataacacctgcaacgttcggtcccatcgcatgcatcagaaggaagttcgtcggatcagcctctgcaccgaccttctgagatacacgggctgccatcggaacggcagatacacctgcggaaccgatcagtggattgatcttgccgccggaaagcttgcacatcagttttccaagcagtacgccgcctgcagtaccaaatgcaaacgcaaccaggccaagaacaacaatcttgattgtgttcatgttcaggaatgcagctgcagatgtcgttgcacctacggaagtaccaagcaggataacaacgatgtacatcattgcattggaagctgtctctgtcagctgttttaccacaccactctcacggaagaggttaccaagcatcagcataccaaccagaggagcggtggacggaagaagcaggcagacaacgatcgtaatgatgatcgggaacaggatcttctccagctttgataccggacgaagctgctccatcttgatctcacgctcttccttcgtggtgagaagtttcatgataggcggctggatgatcggcaccagtgacatgtaggaatatgccgctacggcgatcggtcccatcagtgccgtctgcccgagcttacctgcaaggaagatggaagtcgggccgtctgcaccaccgatgatggaaattgctgctgctgccttgccattgaatccaagtgcaattgcaaggaagtatgcaacgtagataccaagctgtgctgctgcgccgagcaggaagctgatcgggtttgcgatcagcgggccaaagtcagtcatcgcaccaacacccatgaagatcagggacggaaggatggaccactcgtccatgatgtagaaataatgaagcagtccgcctgcatgctcaataccagctgcatcggtgtacggctcagccatgatatccggatagatattgacgagcagcataccaaatgcgatcggtacaagaagaagcggctcaaaaccatgtttgatcgccagatacaggaacacacatgcaaccagaatcataacgtagtttccgatctcaaggttgtgaaatgcagtctgtccccataagttcgccaacgtatttgttacgtaagacattcttttacctcccagtttgtactttcgtctgccggattcaaatcacgccggcacgacgcacaaaatcattagttcagagtagccagaacgtcgccgttctctactgcagcgcctgctgcaacatcgatgcttgctactgtgccgtcctgcggagctacaaccgggatctccatcttcatagcctcaagaattacgatgctgtcgcccttctttacagcctgtccaacgcttgcctctaccttgaataccttgcccggtacggaagcagttacctttacggagcctgcgccgcctgctgccggagctgctgccttcggagctgccttcggtgctgctttcggagctgcctttggtgctgctgccggagctgctgctcctgttccttcttctacagttacgtcatatgcagtaccatttactgtgattgtatagcttttcattttgatgtcctcctgtctttaggctctctgccagtttcttctgtttgcttttttgatagaacgaacaacaaatccgtcaccggacgttgtctcggatgcagcaatcgctgcggtgattacggctaccagttcaaggtcgtccatcaggtcttcctcttcttccacagccggtgctgctacaggtgccggtgctgccggtgtgaccggtgctttttctgcttctttcttctcaatcagatcaggaatgatgtgaagtcttccgatcaggaagctcaggaaaagaagtgcgaggaatacgataccgatacccatcacggtattcagtcccgcacgctcgatcagcttgcccatggaatactggatatcccatgaaagtgaagtgctttgatccttcatattatactcataagtaacaacgacatcggtgtcacctgtcttctcatactttgcatgacaggtaacaatataagcagagccatcctcagccatactgctctccagtcttgtcacctctacgaagttgccgacttcttcttttacggaactccagttggctgcgatcagttttgtggaagcattatcgctctccagcatctgatccagctgctcatccgtatagttattaaactgtgccagcatctgcgccatcgactgcttctgctgctcttcctgagaaagtgcttctgtctcagactctgattctgcctcagctgctgctgattctgcttccgctgcctctgatgccagctccgtcagctcttcctccgcagctgctactgcagcttccgtctgtgcttcagttgctttttccgtcgccgcttcggtctgtgctgcctctgttacctgctcggtcgctgccgttgtctccgtctctgccgcatatacgcccgtggagagtgcggatacggtcaggcccagagcaagcaatactgcgcttaatctacgtttcatgtgattcacctcgcttagactgttccgtgctttttggccgggcgatcgtctctctttgtgaataacatctcaaatgcaccaatgacatactttctggtgtcctctgctgcgataatgttatctacatatcctctctttgctgctgccgctgcgcttgactgaagtgctgcgtactcagctgctttctcgttgataacctttacatcctgaccagcatacatgatcttggctgccagctgagcatccatcatgccgatctgtgcattctcccatgcgaatgtcatgtctgcaccgattgccttgctgttcattgccacgtatgcgcttccgaatgccttgcctgtgatgacatttaccttcggaaccgttgcatttgcaaatgcataggtcagttttgcagctgcctttgcgatcatacgctcagaacatttgcatgccttgaagcctgtcacatttgtcagggaaagtaccggaatctcaaatgcgtcgcagaagtttacaaaatctgcagccttctgagcgccctttccgctgagcacggtgccaagagtctctgtcacttcgccatcctcaccataaacttcactgcggtttgcaacaacacctacggtcgtgccgttcagacgaacgaaaccggttaccatatcctttgcataagcagcttttacttctacgaagttgttgtcatctgcgatattggaaagaagaaccgccggatcacctgctgcattctcaagatccttgcatgcacggttcagatcgtcggagcactcctcataagacatatcatcctcgttgtttgccggaagcattgcaaccagctcacggatacctgcgaggatctcatcctgcgtaccgatgaaatctacaagaccagcctcttcgctctggaattttgcagatgcagtatcgcatttgtccttattgtttccgtcaagtgcgttcggagagtttacaaaaagctctgctttcttgccttccataaaggtaaagtcagtcagtgccggtacaagcgcaagtccgcctccgcatcttccgaagatggcagtaatctgcggaatgacaccggatgccatagtctgcttcagatagatctcgccaaatgcgttcagcgcatcggtagcttcctgaagtctgagacctgcacaatccaataatccgatcaccggagcgcccattttcatagccatgtcataaagacctgcgatcttctttgcatgcatttctccaatggtaccgcccagaacggatgcatcctggctgtaaacatataccagatgtccgtcgatcacgccgtatccggtcacaacgccgtcacccggtgtttctgtctgctgcatgttgaaatcagtatttctggcagttacatatccgccgatttcaacaaaactgttctcatcaagtaaagaagcaattcttgtacttgccaagttttgtgctgtattactcattctctcagccctccatgttatattaaaatgtttatccaatttctgcctagtctatagtaccctttttgtttcaaaattgcaagcaaaaatacaagcatttttgacaatttcataaccggcagcaaaaaactcccccgccatgctgcgggagagttttcgttttcagtcaaatgatttttataaaccgctttacttcactgctcctgtgataccttctgtaaagctcttctggaagaagaagaatacgattgcggtcggcagcgtacagatcagtacaccgagcatcagcataccgtagtctaccgtatagccgctgagcaggttcgataccagcatcggcatcgtgatcgtttcgttcgtctgaaggatgatcttcggccacatgtaattgttccatgcattcataaaagtaatgataagcgccgcggaatatgtggacttcatcgtcggcacaaacatccggaagaaaattccgatctcactgagtccgtccgtccgggcggcctcgataatatccttcgggaaggaacgcgatgcctggcggaacatcatgatcataaacggggtcgagatcgacggaagcatgaaggccgccattgtattgaccattttcagttgagaaaacatacggaacatcggaatcatgatcgccgcaaacggaaccatcatcgcagtaagcaaaatcgtaaagacgatgtcctttgccttgtcatgataaatctcaaatccgtatccggcaagggagcagaccagaagacagaggatcgtgagcacggaagagttgcggaacgaattccacaatgcacgcgccagattctgatttgaaatcagcgctttgaaattctccatcagataagtacccgggatcagctcctgattgagccgtgccagttcaatgacgagcgctttttgcagcccgctcaccgattcgcgatacagttcaccgtgttcctgcatttctttaaaaatctgacggatcagaataaaaagggtcggctgctcctcctttgacgtacagcacggtgttttgttgatccggtaaagcagccgctgcgccagacggtggttatccggatacagttcctgtaccgtcttgtccatatccagaaaaaggtactgccatttgttcagattggcctgtgccgcgttcgtcgtatgcggataatttttagggatcacggtcagcgtcccgtcgcgatacggcacactttttccctccagaatgatctcacccgcaccatagcagcaccagccaatctccatcagattgtgaaaatgcagatccacgatcggttttaaatttttatcatacccatacgggcggatccagtcctctccatacagcgccagcagcggctcgccgtgcgggatgtcatagtagcgaaattcaaggttctctttttttcgtgccatcgatattcctttcttctgtctgattttcggtctgtttctcagctgattctgctttctcaggctttttataacttgtatatcccacttttatttttcgttcctctttgcctgccatacgttttcatctgtatggatcgcccggctttttcatgtttcatgtttcattttctcgtatttctgctttcgcttttcagtatcattataaaatattctccattatcttacaagcattcttctctccttcgccttctgtatggtttcctctcaaatttgcattcttcaagcctgtttttattgacagctcattccatacccgcatacgtttcccaaccgctgcacaaaaaagcagcaaactatttctattcctcaatttttacagaagcagtttttcaaatgcagcatccaccccataccagaagtctttccctctcacgccctccgctgttcgcaccggcgcagccagcacgaccatatctcccacccggtaccggacgatccctactgacgcgccctcttccaccggtgcccgcagcactttcggcacttgcatttcacgtatcactttttcatctcttcgaagcagcagacggcagcccctgtgttcctctataagttccacctgattttttatcccgttttctaccgctgccggcacaatgcgtgtttttccgctttccagcacggaaagatgatactgttccagcccgtaatccatcagtgtcctcgtatctgcccacttccatgatctgtgcccaggccatccacacgcgagcagggaaacgatcagcagacgatcatccttttgcagcgcacccacatagcagtaacccgcttttgcggtaaatccggtctttccggtcagtgccccgtccatcatccaaagaaaggcattatgattggcacaactgtaactgtgtttcccacttatatccgtaaacgtatactgcgccgtacccgtaatctccagaaaagcctctgcctgcggcgactgcgtaatgcagtagcgcagcacaagcgccagatctgccgccgttgtatggtgcaccccttctgcattctccccgtcgagcccgttggggctgatgtaatacgtatcttcacaaccgatctcccgggccttcgcattcattttctctgcaaaatcttctacgctcccggccacattttccgcgatacagaccgccgtatcgttgtgcgattccagcatcagagaatacagcagatccttcagataaaatgtttcacccgtctgcatgccaagctttacctgcggctggtgcgctgcctgctccgacgctgtacaggccatattctcttttgtctcctccagtgccacaatacacgtcatgatcttcgttgtgctcgccatcggaagcggttccttcgtttcttttccataaagaatacgcccactgctgccgtccatcaatacggcgctgcgggcgtatagtttcagttcctcttctgcttttgtcagacataaatttcccggcagcaaatataccgccagcagtacggcaaaaacaatacttgtctgttttttctttctgcctaaattttcttttcgctttcgttgctgatcttgtttactctcctgcctgttcattctctctatggctggtattttcttccatctcgtctgcactgtccgcatacccaggcacctccaaagcatcttgtcctctttctttttatatgctctcgttctgcctgtgagaacttcctatttgtttttgcaaaacagcggctctcgctatacctccacatccagcttctgctgcacttcttcttccgcctctgccttgaagtcctccagctgtaccggattgatgatcggaagatcctccagggactgcaagccaaaatggcgcagaaattcttctgtcgtgccaaacagcagcgggcgtcccggcgcatccagtcttcccagttccttcacaagatcatattcaaccagcctgttcaccgcgtgatcacatttgacaccacggatcttctcaatctccagcttcgtgatcggctgcttgtaggcaatgatcgagagcgtctccatcactacgtctgacagtgtgatcttcttcggctgctttgcaacgcggatcagatattcatacagactgctcttcgtacacagctgaaacgcaccgtccagctccacgatctggatccctcggttttttgcgcggtaatgatccatcattccctctatgatttttctggtagtcgccgtatcctgatcgatcgcctttgcgatcttttccagttccacggaatcccccatcgcaaacaaaatcgcctcaatggcggcttctgcctcttttattcccacagttattctcccgtcctgttttcttctgtcatctgttgtctgattcgggtcagagcggatattcgccacttcactgcctgctcataaccgggcagctgccgcacaatcagtcataatctccctgagcatccgacactggttccattccttcttttcctgtccattcaatgcggatgtccgcaaatgtctcttcctgctctacctcaacctttccctctttcatcagttccagaagcgtcagaaatgtcacgatcttgtaaagctttccacgcctgcgcgtcagaatctctcggaacatgcagtgttttttttcagaaatatagtgctccacttcctgcatcgtaccgcttaagtcaatctcttcttttttgagattgccaaatttgctgcggatcggatccatacggttttcctgccgtttcataatgtcccgaaagatcgcatgcagctttgcaagcgtcatatcccccaacaggtcatcaatattcaccggctcgcggtacgcctttacctcatccggaatggtcggtggcttgtaaagaacgaactccgcttcctcctgccggtccctaagctcaaacgacatatatttgtacattttgtattccagaagcttctcaactaactcctcgcgcggatcgatctcctctccctcttccgtcacctccggtggaagcagcatcctggacttgatgtcgaggagcgtcgctgccatcacaagaaattcgctcattacatcgaggctctccgtcttcatctgacggatatattccatatactggtccgtaatttctacgatcggaatgtcataaatattgatcttgtttttttctatcagatgaagcagcaggtccagcggtccttcaaacgcttccagttttaccggtattcccatgacagctcccgtctacataaaatcaatcacaacaagctccggcggattgttgatccgaaggttgatcgtgtggctgccaaggccggcacttgtgatcagtttttttccgttttccgtatacattccatgtgtatatttcggaaacagccggatctgcggactgatcacgcccccgacaaacggaagcctcacaatgcctccgtgcagatgccctgataaagtcagatccgccccccatgctgcgtatgtcggaaaataaaccggattgtgtgccagcaaaatattaaatgaattcccatccggcgctccaagtacttctgtgatctgcatctccagcagttccgcttttcgtcccctgcgataatactcgatcggaagctcataaccccataccgtgatcggcatgcggttgatttccaggcgctcacacgaattttccagaagatgcacgccaaagctcttgatcgcgtcagaatatttctgatactgctccccatagcggtctggaaacgctttcagccgctgttcatgattgccgttcacacagtagaccggatattttttggtcagctcatccatcagcgacatcgccgcatccatctgcggctccgtgctgcctaccagcatatctcctgctgcaaacactgcctccggattctgatttcgaatttccagaagcagggcactgttgtcttcgccatagctcatattatgaagatcgctcagaaaagccacggaaaacgggcggtccgttcctctcgtccgcacacctgtccgcagtttataccgcgtcattttaaatcctgacatatggttctgtcctttcctgttacgatatagccattctcatattgtaacatattttatcggctgtggcaaattgtttgtaaccgcatcatatgatcccttgtaaaacggacattcgcaatccgcttcgctacttgcaggatcataaggaatctcccgcaagcgggtccccccttatgatatttcatgaacgcagataagcatcccatctcccgcttagtgctccgcgcacttgaagcaggggatgcttatctgcgttcaaaccatccacgcgccccacgccgcattcacccagtcaagatatcccgccttctcgacctcctctgccgtcacgatcggcattcttccaatttcccgctctccgattttgtatacaaggcttcccacttcctctccctcttccagcggcgccattatctccccggaaaactgcgcttcccttgtaatctgcgaaaaatcttcgcctgtcgtactcagataggaaaattcatccgggtaccgcacactcacttccgtctggatggaacccttcaccggtaccggggaaagctttggcatttctccgtcatagtagattgagcatctggaaaatccataattcagcagttttcccgcctccgcaaatctggtctttgagtcaggcgcagtcatcacaacactgatgatccggatcccatcccgccgtgccgtcgcactgagacaatattttgcataactggtgctccccgtcttcagtccatcacagccgtcgtagctgcgcagcagtttattcgtgttggtaagcgtaaagggactgcttccctttgccgtcacatgcatgatgtcttccatccagatgtccgaatattccacacagttcggatattttcgcagcagttcccgcgacataagtgccacatcccgtgcggaggtatagtgctcctttgactccgtcagcccgcagcagtccacaaaatgtgtctgctccatgccaagctcctccgctcttttgttcatcatctcaacaaacgtttcctcgctcccgacaatgtgctccgccatcgcgactgccgcatcgtttccggaggcaatgatgatacatttcagcagtgtttctaccgtctgcttttctcccacttccagaaaaacctgtgaaccgcccatggattttgcgtgcgcacttgtcgtcacctcttcatccagtttcagctttcccgcatccagcgcctcaaaaatcagcaggatcgtcatcaccttcgtcacacttgccggatgaagctgttcatccgccttcttttcatacaggacctcaccggtagacacttccatcacacaggcatgcggcgtctggatttccggctccgccgcttttgccgcaggtgacaccacagatacgactgccatcagcaccgtcagaaaccatgtccgccttctttttttcgtgaccttttctatcgctcttttcatgattaccgtccagaatggcttttactttatccatattcatccgaccggctctttattctgacctgtataaaaaaaattcccggtctggcataaacctgaccgggaattttattgcacattaattgtatttacgcttgcgagctgcttcagactttttcttacgtcttacgctcggcttctcgtaatgctctcttttacgaatttcctgctggatacctgcctttgcgcagtttcttttgaaacgacgtaaagcactgtccagagtctcgttttcttttacgataacatttgacattgtctcacacctaacctccctccagttgtagattgtgcagaatacaactgtctgggtattttattgcactaacaagtattataccagattttttactttcgtcaacacattttcataaaaattttcaagaaaagtttttacgaaagctgcccagccagtacttctttcgctttttccagtgcggcatcgatgcctgccgggttctttcctccggcctgtgccatattcggacgtccaccgccgccgcccccgacaagtgctgcaattcccttgatcaggtttccggcatgtgcgcccttcctcattgcgccatccgttacagctgccatcaggctgacctttccgtcattgacggatgcgatcagtacgacaccctcaccgatcttctcgcggagctggtcacccagatcacgcagtccgttcatatcaacgccttctaccttcgccggaaggaacttcacgccgccgatctcgcagacctgattcatgacatcgccaagtgcatcttttgcaagcttgctcttcagggactcgttctcgctcatcactgccttcagctcgctctgcagtgctgtgatcttttccagcactccggatggaacggtcttcagcagcttcgctgcctctgccagttctttctctgatgtcttataatatgcgaacacaccatcgcctgtcagtgcctcaattcgtcttacgcccgctgcaacacctgcctcggaaacgatcttgaaggtcgcgatctcagaagtatttgcaacgtgagtaccgccgcagagctccctggaaaagtcacccatgcataccacgcgcacttcgtcgccatatttctctccgaacagtgccatcgcgccggtcttcttcgcatcctcgatgctcatgatctttgtctcaaccggaagtgctgctgcgatctcttcattgacgattgcttcaaccttctcgatctcttccggtgtcattgcctgaaaatgagcaaagtcaaaacgcagacgatccggtgtcacaagggaacccttctgctctacatgagagccaagcacggtcttaagtgctttctgaagcagatgcgtcgcgctgtggttcttgcagatatttttgcggtaaacttcatctaccttaagtgtcactctgtcgccgactttcatcatgccttctgccagatatccgacgtggccgatctttccgccgagcagatggatcgtatcttctactacaaagcgtcctgcctcgcatacaatctcacccttgtcaccattctgaccgcccatcgttgcgtaaaacggagtcctgtttacgataacggtaccgcgcacaccctcggtcagtgcctcagtcagctcggtctcggttgtcagtacggtaatctcagagtcacaggtcaggctgtcgtagccgacaaattcagaagtcaccgctgccgggatctgatcatatacagtcgcatctgcgcccatgtagttcgttaccgctcttgcaccgcgggctctcttacgctgctcttccatgcatgatttgaagccttcctcatcgatctcgtatcccttctcttcgaggatctcttttgtcaggtcaagcgggaatccgtacgtatcatagagcatgaatgcattctcaccgctgagcaccttttcatttctttccgccagatctgcttccattcctgcaagaatgctcaggccctgatcaatcgtcttgttgaatttctcctcttcctgtgccagaaccttcacgatgaaatcgcgtttttcttccagctccggataaccgtctttggatccctcgataacggtctcactcagtttggaaagaaatgctccgtcaataccaagcagtcttccgtgacgtgcggcacggcggatcagacggcgaagtacgtatcctcttccctcgtttgtcggcatgatgccatcggaaatcataaatgttgcggaacggatgtggtctacgatcagacggatcgagacgtccttattctcgtcggccttataaacagtctttgcaaactcacataccttgtcgcgcagtgcctgcatcgtatccacgtcgaaaatggaatccacttcctgtacaatgactgccagacgctccagacccattccggtatcgatatttttctgtttcagcagctcgtaatgaccctctccgtcattctcaaactgggtaaatacgttgttccatacttccatgtaacggtcgcagtcgcagccaacggtacagcccggcttgccgcagccgtatttttcaccacggtcatagtaaatctcagaacacggtccgcacggtcctgcaccatgctcccagaaattgtcctcttttccaaaacggaaaatacggttctctgcgatgccgatctcatcgtgccagatattccacgcctcatcgtcctccagatatacggacggatacaggcggttcggatccagtccgactacctcagtaaggaactcccaggaccagtggatcgcttcgcgcttgaagtaatcaccaaatgagaagttgcccagcatttcaaagaacgtgccgtggcgtgccgtctttccgacattctcaatatcaccggtacggatacatttctggcacgtcgcaacgcggcgcttcggcgggatctctgctcccgtaaagtacggcttcagcggcgccatgcctgcgttgatcagcagaaggctgttgtcattgtgcggtaccagtgaaaaactgttcattaccagatgatccttgctcttgaaaaagtcaaggaacatttttctcaactcattaactccgtatttttccacaataattcctccagattcagttactcttttgttcggacgctgtctttgcatcctttctgtcacgcagcttctttccacagaaaattgctgccacagagactcctgccaagataatcagttcaatcaattcttttgaaaattcgataaaaaatgctgccatcccgtcatcccttccttttctttgtatgattttgtcctcaaagattctgcaaagaggaatcttcattcctccatgcggctttccatttcctgttttcaggcggttttgtatcatcctttcccgtctgactctttcctgcatgataatggcagactatgccagtctgttcaccatcatagcacagccgacctggcatttcaagccgtttgtgaattatttcagcctattatttcatccttccctgatgatatcttttaaaagattgtctccgtctgccgccgtcgtcgccagctgatcgcaccgttcattttccggatggccggcgtgtcctttcacccagatatagcggatggtgtgcggctgcgcggctgcaagcagccgtttccacagatcggtatttttcaccggctcactttttcctcttttccagccttttttgatccatccatcgatccagtgctgattaaacgcattgatcagatactgagaatccgaatacagctccacctcacacgggcggttgagcgcctcgagcccgacgatcgccgccatcagttccatacggttgttcgtcgttttttcatacccctgcgaataggtccgttcatgcagcgtgccttttccgtccacatactgcaaaattgtcccgtatccgcccggtccgtccggatttccgcgcgccgagccatccgtaaagatttttaccagcatactttattcctttccttctgcttcttttttctgcaaaatgcctgcctgatcctcatctaaaaactgctgcagccgccctgcaattcctttttgccgcttcttttcctgtccgcttgtgctcacgccgaccacgaggttgtcctgcatggcaagtcccggaaaataaaaatcgcagcgatccctgtcctgacagacgttgaccggaatgccaaggcatttgcacgctgcataaatatcctgatttattttatgatcgttcgtcgccgcaatgacgagcgatgcatcatacagatcctccctctcatacgtctttcggagaatcgtaagctttcctgcttcttccatctcttttaattccttattgacctccggagcgatcacatacagatgatctgtaaattcgatcatggaacgaatccgccgctttgcgatcgtacctgctcccgcaattactacttttttgtccgtaagatccacaaacatcggaaaatacggttttccgttctttttcatactactgcctcacttattctgcttctttcccgttttctattgtatcatatgctttctaaatttaaaacataaaattgtatcgacatttttttatacttatactataatattaataattatcgtaactgttcagcgtcaaccaccaaaatgctctgaacagttcaaaatcttacaacagaggtgtaaaaaaatgtcaatgaatttcgtcaaaaaacttccgattccggctgaggtcaagaaaatgtatccgctttccgacaaggtggtacagatcaaaaaagagcgcgatgctcagatccgtgatgtctttaccggagcttctgataaatttcttttgatcatcggcccgtgttctgcagacaacgaggtgtctgttctcgattacatccaccgtctcgcttccattcaggacaagatcggcgaccgtatcatcctgatccctcgtatttatacaaacaaaccacgtacgaccggagagggctacaagggactcgtgcatcagccggatccggagaagaagccagacgtgtttgccggtatcgtggcaatgcgcaagctccatgcaaccgcaatcgaagagaccggtcttacctctgcggatgagatgctttatccggaaaattaccgctacgtcgacgacctgctctcctacgtggcaatcggtgcgcgttctgtcgaggatcagcaccaccgcatgacggtcagcggcatggacgtaccggccggcatgaaaaacccgacgagcggcgatctctccgttatgttcaactccatcaaggcagcacagagcaggcacaacttcatctaccgcggatgggaggtctacacagacggcaacgatctcgcacacgtcgtactgcgcggtgcgaccaacaagcacggccagtccatcccaaattaccactatgaggatctgatgctgatgaacaagctgtatcaggagcgtgacctgaaaaacccggccgcgatcatcgatacaaaccattccaactccggcaagcagtacatcgagcagatccgtatcgcaaaggaagtcctgcacagcatgagctactgcccggatctcaaaaaactcgtcaagggcttcatgatcgagagctacattgaggacggtgcgcagaagatcggcaccggaaatcacgtctatggcaagtcgattaccgacccgtgtcttggatgggagaagtcagagcagctgatttacgatatttatgatgcattaaaataagcgtttttaaaagctccctgcatggcagacagcagtttcactgtccgccgtgcggggagctttttcggttaaacttatttcatctcttttattttgttcctgctcaacctgcaaataaccttacagccaaaggagagcgtctcattttgcttcgtatctctctgttcacactctttcttcgcactcatacctggtgcaaaaaatctcaccgcctcggatgtgcctctttatatacgcggcgcacctgctcgaaattgagatcccgatagatctgcgtcgtcgcgatatcggaatgacccagcatttgctgaacactctttaagtccgcgccgttctgcaccagatgtgcagcaaaggaatggcgcagcgtatgcggtgtgatatccgctgtgatcccggctctcgacgcgtactgcttgatcagtttccagaagccctgacggctcatcccggaaccggagcagttcacaaaaaggaactcactgccatcttcccgcaccagatacatgcggccatgctgaagataatgatccagtgctgccttggcattgtcgccaaacggaatcacgcgctccttttccccatcgcggcacaccacatagttcaggatcagattgacatcggaaagctttacggtaatcaactcagacacacgcataccggtcgcatacagaagctccagcatcgccttgtcccgaagttccttcggacttgacccggacggctgctccagaaggcgtaccgtctcttccatgctcagtacctccggaagctttttttcgatatgcggcgctttgatggattctgccggatcttctttgatctgggcgcttttgcaggcataatgaaaaaaagctttcattgaagccacatttcttgaaactgtcgcagtcgacaatccctgcttttccagatagagtacatacgaattcaggcttgtggaagtcacactctccacatccgcaatcccttgctcctcaaaataattctccatctttttcagatcacgctgatacgaactgaccgtactctgtgatgcgttttttgtctcttttaaatagtcgataaacagaggcagttcaaatcccatacccatttccccagctttccaaaaatcccctacacgcgcttcgatctcttcagacagctgtatggcacattttgtcttttgttatcccgtctgtcttttgcgctgtcgaatttcataagtaaatgtattatacgcaatttatgatgtaaaatcaacggtaaaaatgacgcaaaattgtcaaaaaatccagcattttcaagggtttacaagatttcgttctgtttcttccatatggcaccagatatagttgccgcactgatttctgctgtctgttttcctgtaattttatatcaagttcataactgttcagagccaagcaaaatttcataaaacaggcggaaaatgcttgcatttttaagcctgtttttgaaattttatttggcggatacgccacaccgacgaaatgcgtagcattttggaggttggctctgaacagttactaaagttcttccaatcaaagcggatattcgaaacccgctccgttgcttattcagcttcctgaatacagccgctcctttacgctcctgtcaggattttcagaaaaatttttacactccaaagcccgagaaatgtttccgccgcgcagccggatatacagtacagtaccatagcgatccaatcaatcttcgctcttcttgaaggatacgggaatacccctgcgctgaaatcttcccgcggcagagtgtgtgagaggaaaagctgcagttcctttttccactgcagcccgtaaaaaatccactgcggcagcgtgcagcaaaaaaagagaccgatcccctgcacaccctgcctcaatgcaaaaagtgaaagcagcatgccgccggagcacccaagccaccctgtaaagaacagatgcagccacagtcccagcggagtatagctgctcatccacagaaaaaggagggtgcgcagccgactgctgagcaggtatccaaaaatgggcaagagcagaacctccatctcctgcatctttttcattccgtacaggctgaaaaatccggcatatgttccctcccgcatccgaaacacttccggaagtgccacgcctgcaaggattccgaaaagcagggcggctgccagacacagataaattccctgacgtgttttgattttcataccaggccaacgcagctttttttacagtgtatgaagaggcagcctgtttatgcagacaatttatgatatcatcatcgctccgccagataccgcttcagcccctcataaatttcctcttctgacggcggacatcctttgatgcagtatgcaaatccggacgtgcaaattccgacgccaagcttaccgctcttgccgcggtatccctgtccgatacagattttttcctgaagcgcttcaagaagtccctcttccttcagacgatcgagcactggaagcaggctcccgtagcaggcactgcacgactcaacctcctcaaccgcgtcacgcactgtcactactttttgcgcatacggaatctcctcgtcccagatctcatcgccggatagaaaacgtaactgcacactttcgtcacacgcttctcccgaaagtttcccagtaccgcttgatttctctgtttccgttctttcctctgtcagatccatattggctgtatggcattgctcgcacaccgccacctgtatatttgtcagatccgcgctgcccgcgccgagcgcttccgccatcccgatatatggcacctcactgcagtcatagtgcagcaggttacagacgtatgcatcgagaagcaccggatcggctgctgccataatgcagttgcgcaccaccggattgccgccgtcctcaaaatcgagatcgccgcagatatggtctgcgacaataaaatcctgatgaatgccaagcgccagatgtgcgatcggccggtgcagccccattgcatgaaaatggcgtttctctgcattcggaagcagccccttcatgtttttcagtgcgcaggtgattttcgtctggcagtgcccttttaccaccggcacgttaatcagaaaatcaaacgttttcacacagtttgtaagacgcagtttcaaaccaccgcagtcctcttcaaaggagccttccttctgcgcatcaatcagacgaacgccgtacttttctgccagctcataatatccgcagacctccatcacctccgctgtacagtctccaacccatgagccctccgcaatcgtaagattccggcagccgtgctcctgcagatactcgatgattccagaaaccacctccggatgcgtcgttgccccgagaaacgccggtgtcggcgcgacgaggttcggcttgattccgatccggcagtttttatctggaagccttccgatcaaatctgccgcctcaagcagctgcttcgtcatttctttataatcttctccgtatattttaataatctggtttttttccaaagataaatcctccctgttatcgatttgccatagatatgtcagactatcaagatgaattgtaaaacgcccccgaacacaactttcattgcatccggaggcgtctttttatttctcgtttggactcatttgccaaaaatggcttttttatttgttataatttacgatcttaccgaagtccggcttcagagccgctccgccgatcagaccaccgtcgatgtccggcttggaaaggagctcagctgcgttgcctgcattcatggatccgccgtactggatgcgaactgcctctgcagttgcctcatcgtacatctcagcgatggtgtgacgaatcattgcgcaaacttcctgtgcctggtcagccgttgcagtcttgccggttccgattgcccagattggctcatatgcgattaccatggtctttacctgatcagcagttacgccttccagatctgctttgatctgaagattgatccagtctttgtatgcatttctctcacggagctccagagactcgccgcagcaaagaatcggagtcaggccggaagcaaatgccttgagcactttcttgttcagaagcgcatcatcctctttgaagtagtcacgacgctcggaatgtccgatgatgacatacttaacgcctgcatccagaagcatcggagcagagatctctcctgtgtatgctcccttgtcctcaatgtagaagttctcagcgccaactgctacgtcggaacccttaacagcttctacaaccggtacgatatcgattgccggtacgcaatatacaacatctacatccggatttactacgagatctttcagagtatttactaattctactgcctggctcggagtcatgttcattttccagttgccagcgataattttctttcttgccattttcgtatcctctttttctcagattacaaatcctttatggatctcatctggtatctgctgcctgttctgcggcaggcgaatcggacttgccccaatccgcctctgctcataacaaagcaccctcagttaattttctttcagatactgacggagctgctgcacgtactcttccatgcggattcggtcaaccgtaacctgcgtgttggaaaaaagcgcgtattttgcagaattgagataagactcaagctcgtccagcacctcatttactttctttattttatttgagaaagcttcctctttatttatcatctgcagctacaacgcctggaagatccttgccctcaaggaactcgagggaagctccgccgccagtggagatgtggctcatcttgtcaccaaagccaagctggttgactgctgctgcggaatcgccgccgccgatgatcgtggtagcatctgtctctgcaagagcctttgccactgcaattgttccctttgcaaggatcgggttctcgaacacgcccatcggtccgttccatacaacggtctttgcagtctttacagcgtctgcgtacagagctgctgtctctgctccgatatcaaggcccatcatatcagccgggattgcgtcagccttcactacggaaacctcaatctgagcatcaatcggtgacgggaatgcctttgcgatcgtggtatctaccggaagcagaagcttcttgccaagcttttctgctttctcgatcatctctttgcaataatcaagctttgtatcgtcaacgagggaagtacctacttccagtccctttgctttcaggaaggtgtaagccataccgccgccgatgatcagggtatcgcacttctcaagcagattggagataacattcagcttgtctgccacctttgcaccgccaaggattgctacgaacggtcttaccggattgtttactgcattgccaaggaaatcgatctccttctgcatcaggtatccaactacgttctcgccgccttttgcagtgatgaattttgttacacctgcaacggatgcatgtgctctgtgagaagaaccgaatgcatcgcatacgtagatatctgccaggtcagccagctctttgctgaactcttcgccgttctttgtctcctctgcgccacggaaacgggtattctgaagaagcacaacgtcgccgtctttcattgcttctactgcctttgtagcagcttcgccggttacgtgataatcagaaacaaaggttacttccttgccaagcttctcggaaagacgcttcgcaaccggagcaagggactcgccctcgttcgggccattctttacttttccaaggtgagagcacagaattaccttgccgccgtcagcgatcagcttcttgatcgtcggaagtgctgcaacgatacgtgtctcatctgtgatcacgccatctttgagcggaacgttaaaatcgcatcttacaaggacgcgttttccttttgcattaatgtcatcaactgttttcttgttgagcattggtatttcctccttatgctgtcaattagccaaaaagaagaggtccggtccaatcagaccggacctcttttcaggtcttacttaaaaactgattatgcaagctctgcgaagtacttgattgtacgaaccatctggcttacgtaagagttctcgttgtcataccatgaaacaacctgtacctgggaagtaccgttgccaaggtttactaccatagtctgagtagcatcgaacagagaaccaaatctcataccaacgatatcagaagatacgatctcgtctgtgttgtatccgaaggactcggtagtctgagccttcatagctgcgttgataccatcaacagtagcctcgcccttaacaactgcgttcaggattgtggttgatcctgtcggggtcggtacacgctgtgcagcaccgatcagtttgccgttcagttccggaataacaagaccgattgccttagctgctcctgtggagttcggaacgatatttacagcacctgcacgggatcttctgaggtcaccctttctctgcggtccgtcaaggatcatctgatcgcctgtgtaagcatggattgtgcacatgataccagactcgatcggcatatagtcattcagagcttttgccatcggagccaggcagtttgttgtacaggaagctgcagaaataactgtatcatcctttgtcagagtcttgtggtttacattgtaaacgatggtcggaagatcatttcctgccggagcggagataacaaccttctttgcgcctgctgcgatatgagcagaagctttctctttggatgtgtagaagccggtgcactccagaactacatctactccaagctctccccacggaagatccttagcatctttctcagcgtagatcttgatggtcttgccatcaactgtgatgctgtcctcgccagcgcttacagtctcagccagagcgtatttaccctgtgatgaatcatattttaataagtgagccagcatcttcgggcttgtcagatcgttgattgcaactacttcataaccctcagcgccaaacatctgtctgaatgccagacgaccgatacgtccaaaaccattgattgcaacttttactgccatgattacaattcctcctaaatgtaatttgatagtatgttgggtaccgtgtagtgtaccattgcataccgccgatacctactgctgaacacggctttctgtccgatgcatcagctgtccctaaaccgtccgtttccggtcggcagcctgcaatgatacattacccgtaagaatcttcgatgtattgtaaaaatacattgttaaatttctcccaacctatatgtattctacccaatttgttccaaaaattcaagccccaatctgtgttatcttcaaatttttgtggactttttgcatctcatccgataatatgtttatcaaatgtgcattttgctggtatctttttactgaatcaggacggctgccgcacggattgcggatctccgcctgccctgcccccaaaagaaaggaataattttatgccgatctgccatgattttcatctgcactcctctttttccgccgattccgacgccgctcccgcttcgatgattgagcgtgcggtcgcccttggacttaacggcatgtgcttcactgaacatcttgatctggactgcccgccggaagggcccgatttcgccctcgatctggatgcctattttccggaaattgaccggctgaagcaaaggtaccgcggccagatccgcatcggaaccgggctcgaattcggaatgcagcggcctcatgcagcgtattttcagggtcttgtccgcagccatccatttgacttcgtaatcggttccgtgcactttatcgacggaaaggatccttactatccttcattttttgagaaaaaaagtgaggaagaagcctatgcggactactttcgggaggtccgggctcttctcgatctgtatccggattttgataccctcggacacctcgactacatcgtacgctatggcccgaaccagaaccgtttctattcctacgcgcgctacgcggatgtgatcgatcctgttcttcgccacctcatctcgcatggaaaatgccttgaagtcaacagtgccggattaaaatatggcctcggcgaaacaaacccggccagggacgtgctcaggcgataccgcgagcttggcggtgagctgctcacggtcggttcggatgctcacgcaccggaacatcttgcttatgattttccggtcgtgcttaacatgctccttgatcttgattttcactactacactgttttttccgaaagaaacgcagaaatgctccggctgtaaaaccggagcatttttatctcatttcatgctctctgtcggtgcaatctgattatacgccagaaacgcatcactgatatgatacgtcgccgaattggtgtcctgcgcccatccggctgtcacgagaatatagatccggccgtcaatctttgccgcgcttgccagacagtggcctgcctcatcagtatagcctgtctttccaccgatgatctcgccgccgtttactgcctcatctgtcgtatttttgaacattgtgctccagaacgtaaaaccatccggatgctgctccgtcgccggtgccgtataaaaatgggtcgtgaagacttcatagaacgtcttgtttttcacagctgcctgcaggatctttccgatttcatgcggtgtcgaatactgatcatcgttatgcagtcctgtcacatttgtaaaatgagtccctgtcagccccagtttttcagcgtttgcattcattttctccacaaacgcctcctgagatccggctgattccagtgcaagctgtacgcagcattctgctcctgacgggagcagcgccccgtaaagcagttctcttgctgtcacctgctcccccggttcaaatccggcacgcgacgcatcctgctcatacagtgcatcgtatatgtcataggacatctggatttttacgtccaggtcatcgatcgtttcgattgccgtgagcaccgtcataatcttcaccatcgatgccggatagatcctgtcatctccgtttttagatgccagcaccgtaccggtctcatcatctaacaggattgcataggggctgtcaagtttcgtaagatccacctggatctgatccagcaacttctgcgttttccctgtctgtttttccttccacaatgaaaaaatccacgccccggccagacagacggcagccgtcatcagtataacaagcagccagatgagcagacggctgtcccgtctgcgtcttctgcctgctgcctgtcttttcggtattcctttttttcgttccggctgcttgtccgcgtaccggcttccgccctgcggcctgtcaaatccggaaatcacttctgagtgcatcgcactcttttttttgaatgtctttttcatctgactcccgtcaccggataatggttcctcctccggctacatactctccgtcataaaaaacgactgcctgtcccggtgtcactgcccgtaccggctcttcaaataccacttccgcaagatcctcaccgatccggcgcacacgtgctttcgtaccactgtggttgtagcggatcttggcaacaaccgggaaatcatccacaaaatccggcacactcataaagttcagacggtcacagatcagacggtctgtaaagacctccgatccgtccccgacaacgacttcattcgtctccggccggatctccagcacgaatacaggatgtcccatcgacaggttcagtcctttacgctgccctaccgtgtagtgcgtaatgcctctgtggcgtccgactaccctgccgtccgccgtcacaaaatttccttccggcactttttttccgctgttttcttcgataaagcgcgcataatcctgatccggcacgaaacagatctccatactgtccggcttgtgcgccacgtacagtccaaggctgtccgcgatctcgcggatttgcgtcttctcataatttcccaccggcatcaaagttctggaaagctgctcctgtgtcagattgtacagcgcgtacgtctgatccttgtgcgccgtcactgactgccggatcgcatacctgccgtttggcagcagatcaatccgcgcataatgaccggtt

SEQ ID NO: 3478 - DNA, 32759 bp, Unknown
  16S sequences of unknown bacteria
agggagctatgcgacaccggacaccccgtgctcgaggacagcccctgagggcagtctgcccacggaacgtggtcagactgttccggcccttaggccggaattggacgacccgaataaattcgggtcgtccaaccgttcggctaccgcagaccgaagcttgggccgagagggagcgcgtgcccagtgggcacaactgccgtaggcagttagcgactggcaggcctgagcaaatacaagagccgggcacggcagtgcccggaacgccgatatttgcgaataacgcgcagcggggcgggccgcctctggagtcgccgtgccgcaggctttctttggtactttctttcgcttcgaaagaaagtactgccccttcggggcggcagcccgaccatccgcgccgtagtcggcgcgtcatgctccaaccgaggcaaggggtatgcgcctacaggcgcaccaaagggctttccgttcgccctttggaaaccttcgggcaccgaagttggagagaaacccataggacagtaagtctcagtccgcgccgtagtcggcgcctcccccggcgagggttcttatacggcaaagccagcgcccgccgtcacaagcatgggacttcctcagagtaaaccatcagcacgacccgcactgccgtgcgctccgcttgttgcttgcctgaactccgggtcgctaaccaccttcagcagctgtgttcgtcgaatccttactttcctcctgcacccctccgttcactttgtaaaataggacaaatagtcctaaaacaagaaccatcagaatatttctcttgttttctccttccctttaaagccaaaaagcgcattgctcctttctccccatcaaaaaagagactgccttccgcagtctctttttacatttgctttttacttcgaatagtccatccagaataccggacgaaccgtgttggtgggccagtctacgtcctgcatgccgtaggccgtcagacggccgtccacccgaacgccccacatgtccatcttccgggcgcccgtggtgcgcagccaccagcggcacgcgccggtcgtttcgccgatggtgcagccctgtgccttcgcatgttccgtggcgtaggccatccggctggactgctccgggaagtagtgcaggatctcttcgtggctgagcagatacagcttgtcttccgtgtccgcgccggcccccttcatgccgtgaggattctcgttggtgacggtggtggtcaggatcttctcctgctcctcggcggtaaaggccgcgttcaggaactcgccgttcatccactcccgcagggtggaagcaccccagtacatgggcacccgctccgggtagaccacctttgtttccagacaatatttgctcagcaggaacgccttctgattttcttcgtccacatccagaacgatccattcgatgggctcctgaccgttggtcaggtcttcgtcctgctcgtagtgaccgaaggtgatctcactgccgacctcgggcagtgtttccgccgacgcggcgcatacgcccagcaggagcgccgcacacaggatcagggataacacacgaatcaagtgcttcataaaagaaaatcctcctttgttttttaggtctgtcagtcgttggggatcgcggtgacaaagtacaggatgtcgccgacggcccgcatgaccttggagtcggcgttcatcttgatgttgtgcatgatcatgctggaggactgtccgccgtccagattgtaggcggtgacggcccccagttccgccatgagctgggccatctgatccatggtcaggccggtggagttctcctgcatgtagccgtcggaaacggcgacgacgtatttcaggcggtcgatctggccgatggcgacccgctgggcataggtcactttccggtcggggaaggtctgcgcttcgccgttcagcaccagcgcggggccaaaggcaaaggattgcagcacgggccgttccagcttggcgaagttttccttcgtcatgggcgacacaatgtggaaatcgccctgatcgtcgatgaccagcccatcgtagctttcgtcctcccgctcccgcagaagcacaccgttgcggtagatgatccccgcgtcatgataggtgaaccagtcggcgttgatggcaaaaacggcgttcaccttctgggcgataacgctggcccgcatggtggccttctgcggatagggcttggccagctcgctgcagatctggttggcgttggcaatctgaatgaacgccgccactacgtcggtgtcatggacgcgaatgcggtgaagcttcacatcaatggaatcgtcatggtaggacagattgtcctcgctgaaggcgctgctgtccggcttgtaattgttcttcgcgtcttcggaagcttcataggaaatatcggaaaaggtaacaggttccaagtggggcagttcggcgctttccgccagtgaaaagccgggcagcgcacaaagcgccagcagcagacagacggcttgaactacgggtcgtccattcttcccggcgcgcttcccccgttccgaacccagcgaacgcatccatagcacacagcccatgagaccaacgcaagcagcgaccatgcagccatagcagccttccacgtccaaaaagcgcaggaagggaatgcggccttcagtggcaaattccagcagaatgcagaagacgaccagcagcagataaaagacccagcaaagggctttttgcagcgccttgcccttttgggaaagccgctgatagccaaacagcaccgctccaacggtcagagcgctgaacagttcctcgcagcggacaaagccccagcgaaggaactcgtcccggcgcaggctttccagcacgatctgcgcggcggcgaaaagccccagaagcagcagaatgccgtctccgtcccgccggtctttgcggcacagcagcgccgcaaacagcaccagagccaccagcgcttccgccatgaacagcgcccatgcccacaattcgtaggagggatcgtacatcataaagggaaagcggcacagaaaggtttcttcgtagacgtattcgccgtacccctgcccggcaaagccttcgctgagccggaaggcggcgatcatcagggccatagagggagcgtatgcgtccatcaggcgaagggcgcgctttccgccgcagcaccacagcgccagaaggcagccaaccagtccgccgtacagcatgtgcccgttctgccacagggcgaaaagctccgtaaaggcgggcgggtcataggccagattgaccagccggtagaaaaagtgggcgcagaatacgctcaaaagaggcgtcaggacggaagccagcaccagcgtgagggcgtcgaagccccgcttttttccctgccagaagcccagaccccaaaacagaaccagcccggccagcagaaagctccctcggagcggcgcggctcccgtaccgatgtacaacaccatgaaaactccacctttttctgttttcgctttgccgcatctatgcaaaagaacacgaaaaagcaccgtctcattataccgcgagacggtgcctgcttcaaggctaaaaagaaaggttattcgtccacctgtgccagtaacgtcaggctgcgcacgtgccactggccgttttccttcaccagtgtggcggcatagcgcccgccctgccatttgggcggatattcgaagccgtcgccatacagggctcgggccgcgtccgccgacgagctttttacccgtccgtcgatgcgggggatggtctcggtaaattccgcccgggcggtggtgtcccagggccagcaccacatccacgtcattttcagccggtggtcgatgccacgcaccgtgtaataggtgtaggggcttttcccttccagcgcgatctgcaggttctgatcccgctgcaggtagctggactggaaaaacttggtcagctcggaagcgtcctcgtccatcatgatgacctgcgcccgcttggccatgccgtccttcaggacaatataaatgttggtagcgttcatggcgtaataaaacgtgacggtaaacaggctcagcagcgtcagcagcagaaacagtctgcccgccagataccagatgaaccggcgcaatctttccatgacggcgcctcctttccgaagatcatcgcttaccgaaggggtcagggcttcagcttaccctcggtccagtgcttgcggcacaggctgacgtagctttcgttgccgcccagcatgacctgcgcgccgtctttgacgactttgccgtccagaatgcgggcgttgcaggtggccttcttgccgcaccagcagatggtcttgacctcctcgatggtgtccgcccaggccagcagccactggctgccttcgaacaggttgccctgaaagtccgtgcgcagaccgtaagcgatcaccggcacatgccggtcatccacgatctccaccagtttctccacctgcgccttggtcaaaaactgggcctcatccacgatgatgcagtcgtattcctctacggggtaggtgtcgatgtcctccatgtagccgcaggcgcaggaaaggccgcagcggctggccaccatggtctcgccgtcccggctgtccagcttaggcttgagcatgagcaccttctggccccgctccagatagttgtagcgcaccatgatggcgttggccgttttgctggagcccatggccccgtagcggaaataaagctttgccattgaaatggcctccgttcgtaagtgataatcagtcgctttcgctggtatcggggatgcccagccgggaagccagatcagaagcccgctgggccgcgtcccggaacccggtcagcgtggaaaaaagatcgtaggccccctgcaggtctccggccatttccatcgcgtccgcctgactgtactgctcgtcccggaaaatctgctcgcattccaccgcctgacgggcgctgctgagataatctcccaaaatggtgaacaggtaaatagcttcttcgtaggaatgttcctcccgaagctcgatggcccggttgtagatttgcccctgcaggttcagcagccggtcggaagcgtcggtcacgttcccggcggcggaatagtcgtaaagagccttttcgtagtccttgcggttttccgcgtccacgccttcgttgtagtactggtgcagggccgcgtcctcaaagtcgcccagcttgccgaaagcctcggccgcacccgcagcgtctcccgccgcttccagcgcacaggcatggcagtaggcgtaccgctgtccgcccatcagaagcgtttgacactgctcaaagtacggttcggcgttcagatagtcgccctgctcccacagcaccagccccctggaataggcggcgtattgggcggactgctgatagtctcccagcttttcgaaggcctgcgccgcttcttcatattcgccggaggcaaaaatatccaacgcccggcggtaggactcggaatggttggccgtgcagccggtcagcaggataaacacgaaccccaacagcagaaatcgtttccatcgcttcatggccgcagctcccttcttcggcaatcgccctgttcattgtaatctaacgagcggaaaaacgcaaatcctgccgaagaatggcataaagctccacgtcggcgtagcggcccttgttgtagacccgctggcgcagccgcccttcatggatcattcccgctttttccatcacccggccgctggcggggttgtcactttcatgctgggcttcgatacggttcagattcagagtgtcaaagccgaattgcagcacggcctgcagcgcttcggtcatgatgccccggttccaataggcccggctcagactgtagcccacctcggcggagcggttctcctgctgcacccacataaagccgatggtgccgatggctttacgattttcgttccatacgatcacaaaggtggagggctgaccggcccggtactgccggatgagaaaccgaagataggaacgggtctggtgaatggaggtgtgcgcgtcccaaagcacgtgccgcgccacctcgggatctttggagtattcgtaaagatccgccgcgtcgctcatgcggaccgggcggagggtcagccgtttcgtgcgcagcgtgggcagactggaaaaaagattcagatggttttgcatgaaatcgttccgactccgcgtttatttataggaaggatggagcttctgccacgccatgagcagccccagcgcggtcttcgcgtcctgaaactcgccgctcatgacccgctgcaccgcttccttcagggggatgcgggtcacgcggagaaattcgtcctcgtcgggatgatcttcgtgctggctcaggccggtggccagatacaggccgatcttctcggtacagaagcccggcgtggtgacgatatggctcaatttttccatatgctcggctttcaggccggtctcctcccgcagctcgcgcatggcgcagtgcaggggatcctcgtctgcggtgtccagcttaccggcgggaatttcccaggtcagcatatcgttgaccacccggtgctgtcgcaccagatagacgtactcctcgtcgtctacaggaacgatggctgccgctcccttgtggtggacgatctcccgcagggcggtgcggccgttgggcaggcgcacctgcatgtggctcacgtcgatcagggctccccggaatacggtttcatcgctgatcggcgtttcgatcagctgacggtcgtcggacaacatgaatgttcgcctccttgaaatgaccttgttcttaattcgccaacgggacggcggaacccttgcagaacggaaaaaagatcggcgcgaaagttgtaacataatggacgggaatccggggtctgaatttcttgacaggccatatcattccccttaaaatgaacatggagatccttacccgccctgtggacggagagaatcttcggtcagaacaaacggcaaggaggaactgcaatatgttcgggacgcaatcatacggaagaagaggactggccctattgaccagtctgctgctgatccttttgcagctggcggccccgctgggggcgctggccacggaaacggcggacgtgcctgcggtttatgtgagctacacggatgccaacggcctgaccggcagcgccatggggcagctggcggtgggggaggacggggtcacttattattgggcccagaccatggacagccccacgtggcccctgcagatcaccgtgggagtggcggacggaagtccctacttctataacgtgacctatctctggtggaacgctgacaagaccgcacctgtttcccagcaggacgtgacggcggcggacgccacgcaggccgtggcgctggtggagttctaccgcaacgaggaaaagaccgactacgccggcagctgctatgtgtatctgtccacccagcagctccctcaggctgcgccggtgaacggaacggttcatatctattatattacgcaggactggcagcagctgctggacgatacccgctacgacgtggcccccggcgtgtatcagtttacgccggaccgtcagggcgagatttccggctatgagatgatcgattccacgccccagacggtgacggtgaacaatgacggcaccgtttccggagacgtgatcttctacatgcggcccgtcagcgcccccggcggcgacagcggcgatactggcaacaccggcgacgctggcaacactggagacgccgggaataccggcgatgctggaaatactggcgatacgggcagcacaggtgatgcagggaacacaggggactccggcaataccggcgacactggaaacccagagccggaaacgcccacgcaggagcccacaaaaaaaggccccgaagcctatgacaattatacgcccctgaacgacgtgcccggctatacggtcgcggaaaaaggaacgatcaatttccgtgctacgccgaaaagcggcaaggataccgttaacgttatctgcacgctgaaccagaagacgcctgtcaccgtgcatgctcagttggactcagagggcaagcactggtactatgtcagttatttcggcgaggataacaaagagcaggtcggctacattgtgagcgactttgtgcagctgggcagcattgcgcaggtgtatgtatcctatgtggatgaaaacggtacggaattcagcggcgcttatgtgaccgtctccaccgaagaacccatggtggccccggaggccaagtatgtgcccgaaggctacgagcccgtggaggccgacccggtgcaggtgacgttcgtggacggccagccccagccctccgtcattaccttccgctatcagaagccggaagcccgggcggaaatcaaggttcattatgtagccaacgggcaggaatttgccacggataccgttaccgtcaccgaaagcgacaattttatcgcgcccaaggaagaactggtgcctgcgaactatcagcccgtctcggtggagccggtgacgatcacgttcaccaacggtcagcccagcatgacggaagtgactttcacctatgaaaagggtgaagccaccgccacggtgaacgtgcactacgtggcgggcaacgtggagttcgccactgacaccgtggaaatcacggagagcaataacacggtcagcccgaagccggaactggtcccggcaggctatagcgttgtggacgtgaatcccgtgactattccctttgaaaacggcgcggccacgcaaaccgacgtgaccttcacctatcagcggcctgaagcggttgctacggtgaacgtgcactacgtggcgggcaacgtggagttcgccagcgacaccgtggaaatcacggagagcaacaatacggtcagcccgaagccggaactgatcccggcaggttatagcgttgtggatgcgaaccccgtgaccattccctttgaaaacggcgcggccacgcaaaccgacgtgaccttcacctatcagcggcctgaagcggttgctacggtgaacgtgcactacgtggcgggggatgtggagttcgccagcgacaccgtggaaattacggagagcaataacacggtcagcccgaagccggaactgatcccggcaggttatagcgttgtggacgcgaaccccgtgaccattccttttgaaaacggcgcggccacgcaaaccgacgtgaccttcacctatcagcggcctgaagcggttgctacggtgaacgtgcactacgtggcgggggatgtggagttcgccagcgacaccgtggaaattacggagagcaataacacggtcagcccgaagccggaactgatcccggcaggttatagcgttgtggacgcgaaccccgtgaccattccttttgaaaacggcgcggccacgcaaaccgacgtgaccttcacctatcagcggcctgaagcggttgctacggtgaacgtgcactacgtggcgggcaacgtggagttcgccagcgacaccgtggaaatcacggagagcaacaatacggtcagcccgaagccggaactgatcccggcaggttatagcgttgtggatgcgaaccccgtgaccattccctttgaaaacggcgcggccacgcaaaccgacgtgaccttcacctatcagcggcctgaagcggttgctacggtgaacgtgcactacgtggcgggcgacgtggagtttgccactgacaccgtggaaatcacggaaagcaacaacacggtcagcccgaagccggagctggtcccggcggactacaccgttgtggatgcgaaccccgtgaatattccctttgagaatggcgcggccacgcaaaccgacgtgaccttcacctacgccgcgcccgtcattcccaccgaggggaccgtgaccttccgctttgtggacggtcagggcaatcccctgcgggacgctgtgcagaccacggtgcccaacggcgtttataccgacctgagcgtgtatcaggccgccattgacggctatgactgcatcggtgtcagcaccaatcagctgaccgtggaaaacggcgtggcaagccccgccgaggtgtttttcacctaccagcgcaagccggtaaacggcaaggtgcgcgtggtctacatggccgatggcgtggagttcagcaacgaagaacgccagctgaccgtgctgggcgaaaataccgtcagcccggacgccagtctggtgccctccgactacaccgcgctggatgtggctcccgtgaccgtcaccctgtacgaagacggctccgtggagccccagactgtgacctttacctatgaaaagccccagacccccacggcggccaatgtgacgttccgctttgtggacgaaaagggcaacgagattcagcagagtctggtggtctcgctggaaaacggaacctacggcgaagccgatctggccgaataccgggccgagatcaagggctatacctatcagggcgtgagcgccggtcaggtcatcagtcaggacggaaaggccagccccgacaccgttaccttcagctataaacagaagaccaccgccacgctggaagtgcgctatgtggacgctatcggccagcaggtgatgggctctcccgagtacatcgagctgcccaagggaaccaccaccgtggccctgaacacccgctacgtgccctccggctatcagccctccaccaactatcccacgtcctacaccgtgaccgtaggggacgatctggtggcggagcccatcaccttccatctggtcagcaccagcgtgaaggctacggtggagattcattatctggtgaccggctcctccgatgcgacgatgatcgccagcgtgaagaaggaactgactcccggcaaaaccgtgctggagcccgacgcttccgtagtgcccagcgggtatgagatcgtgaccgacgtgcctcagtccgctgagatcacggtggatgatctgggcatcgcgacccccaatctggtgaatttctactgcaagaagacccagagtgaaatctacaccggctatgcggtcaccaccgtgcagaccggcctgcggggcgcgtacaacctgaaggacagctccgtgaagaagctgctggcccccaatacgctgatctacatcaacggtcaggctacggtagaaaataccctgttcgacagctgccgcgtgatgctggggtccgacgatgtgggtatcgtgaaggactccgacgtgcgtcacatcactgccgccgaggcccaagccctgatcgaccagtggaaccgggagcatcccaccacgccggatcagcccaccacctccgtggagggctactacatcaccacggcggacggcgtgcccctgcgctacggccctaacgcctatacggccaccatcgcccagctgccgttggacagcgtggtctacgtccagcagcagcagacggtgaacggcgtaagctggtatgtagtcttctacaacggcaacgcgggctacatccgcgccgaccagatgctccgcaagatgactgaagcggaaatcaacaagtatatggccggtcagaaaacgactgcgcctacctcgcccagcaagacggccgcgccctacgatccttacggaaagtccagctacggctacgtgaccagcaattccgtcaacttccgcgagacgcccaacggcaaaaagatgaagacgctgagcaagtatgccttcgcctatatcatcggctccaaggaggtcaacggcgttacctggttctatgtcaaccagaacggcaccatgggctgggttcacggggattactttcatcagctgaacctgaccgagctgaccagcttcctgaacagcaatgaataccggcaggggctggccaacaactccggcagctccaccagcggcaacaaggacaatacctcgggcaacacctccgtgaagcccagcggcggcaattccggctccgccacggcagggaacatctcctccgtggaggactggaacgtgggcacctggaagaataccggcgtgtcgaccacgaccagctacgcgcccttcaatccctatgcgaccgccacccccgcgccctcggccagcgtatcgccgtccgccagcgcggagccgacggagaccttcgtcatcggcaccatgatccccattacctatgacgacgaaagcaaggaaacccagaccggctcggtgccgtggggcctgatcggcgtgggtgtggtactgatcggcggcgcgggcggcgcctatgcctacgcggtcaatcagaacaagaagcgccgtgcggctgcggcccgtgcagcggccagccgtcgtgcagccggaaccggcacgcagacgggcgcagcccagaacggcagcagtcagcaggcgcagaatccctacgcacgtcgggctgtggcagctccgccggtaacaggcgcgggtacccagcagcggcagcagtcccagaatccgacgggaacgacgaatccctacgcctgtcccagcacgtcctacggaacccagaataatggttcttcctatggagcgaacggatcgaatccgagcgcagtaaacggaacgggcagcacggcgaatccttacggcggcacttccgcctatggcagcaccaatccgtacagcccgtccaacaatccctacagcaacggcagcattgtgggcagcgagacaaagtcctcctacggaacggagacccagcgctcgtcctttgccccagcttctcagcagcccgaggaacgtccggccgccacggccggaacgcccgcgcagcggacgaacccctacgcccggcccattgaaaccgtctccggcgagacggcgcagtccggccagccgcaggcttcctccgcaggcagcgaggaaccccgccgccggtctacccggatgcagcgctaccacgccgcggaagaggaagaccagaacaagtaaaggatcctgatcccaaaaggacgccgtgaaaacggcgtccttttggattagagaataggggaaaagcgccaaagttttattttaaggggactcatgttgatttcggcagcgatggacttttgggtgattacgtttgaaagttttgaaggcccctctgcaagctgcggggaaagccaattttgcagtaaaaataccccggtggggattgacgtgccgactacggtgcaggggtgggacttggcgtatggtttttttcgctaggcgaaaccgaaggggtgaaggggggaacggagggaaatatcagcccagtgggctgtccgccgaaggcggaaatgacccggagttcaggcaaacaacaagcggagcgcacggcagtgcgggccgcgccgattgtttgccccgaggaaagccccctgcttgtagcagcacacggcaactttgctgtaagaaaagccctcgcaggggcttgacgcgccgactccggcgcggatggtggggctgccgccccgaagggggtagtactttctttcgaagcgaaagaaagtaccaaagaaagcacgcggcacggcgactccgggaaaaagccctttattgcccatttttgaaagagggagttcgcaatgtcgcgcgcaaactagttggcaagctaactcatgctatcgtgcgcgctcgtgctcactcttttcctctttcaaaaagggcaaggctttttccctacgctgcctatcgccgctctgcttccccgcagttggcgtggggcaggctcaaccaatgcgagttgggatgattcgatgcaactggggcgattttgcggtgcagaaaacaggcttggttgctgctgcgcggtctacgtgagaagcagccatttagcaacagccggatgcatcaacacaatttggatattcctgtaacgcaaaaggccagcgtggtttcaaagccacgctggcctttttatgcgagccatgaggcctgtcgccgaatggcggtctttttgattcaactgacaggaaaactacaccagaccggcgagccgtggcacctgtcgtgccacggcggtaaaaccccggccaacttgctttccctcgtgtgccccgcgccctatgggcgcggtgtggggtgcaggggcactgcccctgccgttatttgcagagggaaggccacttttgcttagcgtagttgtaggcctggtcggcggcggcattgtgctggttgatgaccgtctggttcgcgctgccgtgaccggcggagttgtagaagcggacgcagaagcagccgtagaagttgttgttttcatacagcagcttgccgttggggaacttctgggtgctcaggccgtccttggcgccaatgcccatgaacccgtggggccagccgtagatgctgacggcgtacaccttgccgttcacgttcagcagggcgggacggcgatcccacgcgctgccgatcttcgttacgccggtcagcttgccgctgtagtccggccaggtgtagttggcgttgttgttggaattatcggcgacgatcttggccagctcgtcgctgttggggcggcgggccggataggtgaatccaacggcttcgcacatggccttggtgtccgcctcggtgtagggcactgcatcggggtgattggtgccgccggtgcggtagatggtgaagaccttgccgctggtgatatccagcacggtggcaaaggtgtacttgggccagtagttgccctcgtccgcctgcgtccacgtgggcttggtgatggaggtgatggtgccgaagtccgttacggtggtgcttccgccgccggaggagccgccgccgcccggattgggggtcacaccggagttggcggaaccgttggacacctgcttggccagattggccatggctgcccacgtgttgacgcccattacaccgtcccgatccagcttctgggcccgctggaagttcttgaccgccgcttcgctggcagcgccataggtgccgtccagcgcgccagtgtaatagcccagcacatacagacccagctgcatggcatagacgcggacgtcgcccaccagcgtgccgtcgttgtagaacttgtcgttcatggtgctgttccacaactgaagcacataggcggccagctgtgtgtcgctcattacgccggaggaaacgtcggagtacagggcatagtagagcttgctctgatagtagagcgagcagtagaccgcgctgtccgtgccggtgacggtggtgtcgccggccatctgcaccacggctccctgaggtgcagtgacggccacgaccgaccggttggcggtggtgtacaaagaggtgttcatgggaagggtgatgtacttgcggggattgacggcggtgcttccgccgccagtgttgccgctgttgcccaccacggtggcgcagtcgccgcgcacatagccggtgacgctgcccgtgcggacgggataccacgtgtatccgccggaggaaacggacgcgccgatcatctccaccacggaacccttggccagcaccacgccggtcttggctccgccgggcgtcttgcgcaccctggtgctgaccttggtgatttccaccttgccggtcacggtgacagagccgctggagcttccgccggaaccgctgttgccgccggagctgctgccgctgccgctggcattgacgtaagtgcccatcagccagccggtattcacgccgtaggaaaccttgtaccacgtcacgccgccagaggtcttcgcgtcaatgtaggccagcttcacgcccatgggcaccacgcccagccggacggaggacttggaagagctcttgcgcaggtttaccttggcggtggtggtcagtgtgccggaggcagtgccggtggaggaggaggtcacgttcacataggtgcccatgagccagccgtttttgttgttgtagagaacctgataccaggtcacgccgccggagacggaggtgttgtagtaggtcagaacggaattcaccggcacgctggccagcttggcggagttctgcgtggccttttcccgcagattgacggaggcaacagtgcggagggtgccgctggtgcccatcgtcccggtagaaccggaggacgaagaaccggaagaactgccggaggagccgccggaggaagagcctcccttgtttcgggccagcgcaaacaaagcctgctgggtcagggggcccgcgtcgccgtccttgctcaggccgttggcccgctggaacttgtacacggccttctcagtgcccttgccgtagctgccgtccagactgtcggaatagtagcccagcgtcttcagcgccagctgcagggcgtatacccgcatttcgccggtcaggttcagctcccgtttcagcgtggtgaaggccgtggaagtccacagattattgcgcacgtaggtctgagcgtccgcttcgctgatcgggctcacttccgtggccagaatgtgataaacggcgctgttgtagtatacatagtagtattcctgaccattgtacgccgccttgacagggttctgcagcatcagtacggtgcctgcttgcaggatggtggccgcattggccgaatcgtaggcgtttgcacccgccaggctgacctgaacaaaggacgccgcatcggcccgggctgaaacgggcagactcagcgctcccaatgcgatgcacagcgccagcgccacagcgcatacgcgtctcaggctggcgcaggttttttggatgcagtttgctgtcatactgccgacctccgttatattctcatcgcgtccggcaaggggcgcttcttatcaaacgccatgaaccctccatagcatccctataatattacaaatttattacaatgtcaatgctcatttttcaaaattgttttgattttcgggacgtctggcagaaaaatcggccggaattgttacaaaatggatttggttttgacggcttcaggcggaaggatttacaaacggccgccaagaccgtataatacaaaggcgtacattacgaaaaacaggaggcgtcattcatgggctaccgggataactatcaggcctggctgcgcgatttcgcggcggatgcacaggctgtggcggaactgaaggccatcgagggcgatgaaaaggagatcgaggatcgtttttaccgcaacctgagcttcggcacggcgggaatgcgcggcgtgctggccatgggcatgaatcggatgaacgtctataccatgcgccgggctacgcagggtctgtcggacttcctttctgcgaatgaagaaagcaggcgccggggcgtggtcatcgcctatgacagccgccggatgagccgtgaatttgccgaggagaccgcgctggtgctctgcgccaacggcgtgcatgttttcctgttcgacgcgctgcggcccgtgcccattctgagctacgccgtgcgccatttgcacgcggcggcgggcgtggtcatcaccgccagccacaatccgccccagtataacggctacaaggtctacgccgaggacggcgcgcagatcagtcctgaggtggccgccgaagtgaccgccaagatcgacgcgctcagcttcactgccgccaagcgcatggagcgggaagccgcgctggaaagcggccttttacagatcatcggcaacaaagaagtggacgacgactatatcgctcaggtgaagaccctgagcatccacccggacatcgtgcgggaggaaggcaaaaacctgaagatcgtctacacgccccttcacggcagcggcaatgtgcccgtgcgccgcatcctgaacgagatcggcatcaccaatgtgagcgtggtgaaggagcaggaaaatcccgaccccaatttctccaccctgaaggtgcccaatcccgaggatccctccgctttcacgctggccatcaagctggcggacgaggtgggcgcggacgcgatcttcggcaccgacccggactgcgaccgtctgggcgtggccgtgcgggaaaaggacggcggcttccgtctactgaccggcaatcagatcggctgcctgatgctcaactacatcctcagcggcaagaaggagctgggcacactgccttcgaacggcgcggcggtgaagagcatcgtctccactgagctggctcggcccatctgcgccgcctacggcgtggaactgttcgacacactgacgggcttcaagttcatcggcgaaaagatccagcagtttgaggatgaaaggagccataccttcctttttggctttgaggaaagctacggcttcctgtccagcacctttgtgcgggacaaggacggtgtgaacgcctccctgctgattgccgaggccgccgcctattaccgcaccaagggcaagaccctgtgcgacgtgatgcaggagattttccagacctacggctactatctggagcatgtggaatccaccaccctgccgggcatcgacggcttgaaggtgatgggcgagatcatgacccgggtgcgggagaatccccccaccgagatcggcggcgtgaaggtggcccatgtgaaggattatctccggggcacggacaccgatctggccacgggcgctgtggcgaagctggattatcccaagagcgacgtgctgtacttcgccatggagggcggacactttgtgtgcgtccgtcccagcggcaccgaacccaagatcaagctgtacgtcaacgtcaatgaccgggacgaagccaaggccagggagctgctcagccacctgaccgaggaatcccggaagctgctgaagtaattattagtagaaaaatatgcaaaaccgccgcgggagttttcccgcggcggttttcatctatcggggaagatggttccgttacagcagcgtcacgccggcttcccggcagatacggtgcgtttcttcgtcccagatggaggactgcacctcgccaatgtgggccttgcccagcagcagcatacacaggcggctctggccgataccgccgccgatggtcaggggcagttcgtcgttcagcagcatcttgtggaaaagcagctggcggcggttatcgcagccggccagcgtcagctgacggtccaaagcctgacgatccacgcggatgcccatggagctgatctcgaacgagcagtccagcacggggttatagaaaaggatatcgccgttcatggtccagtcgtcatagtcgggggcgcggccgtcgtggggttgaccgttggacagcttgccgccgatgcccatcaggaaggtgatggggtgctcccgcacgaaaagatactcccgctccttgggagtcttgtcgggataaagatccagaagctcctgggcggtaacgaaggtgacttcccgacccagctgggtatgcagcttgggatagcggccgttgacgatcagcgaagcgtcgctgatgcagcccacgatctcccgcaccgcatccttcagggtgttcagattgcgggtctccggggtgatgacccgctcccagtcccactgatcgacgtagacggagtgcaggttgtccagttcttcgtcccggcggatggcgttcatgtcggtataaatgcccttgcccggatggaagtcgtagcggtacagcgccatgcgcttccatttcgccagcgactgcaccacctgcgcgtccatgcccgcagcgggaatgtcaaagctgacgggacgctccacgccgttcaggtcgtcgttcaagccggtggagggctccacgaacagcggcgcggacacccgcttcaggttcaacgcctgcgccagatggtcctgaaaagtccgcttgatcaggctgatagcggcctgcgtttcataaaggctcagtttcggctcataaccggccgggataaaggttttgctcatagctcccgcccctttgcgatcaaggatttgcttctgcctatcatagcattttttagggaaattgtcatgtactctttctgtctttgaaggaaaaagggcaacttttcagcagcacagcgtactttttttgcaaaaggacggattttcgcaaaaaaagcgcttgacatttcctccctctttttatataatagctcctgcatccaatgatgcggtggggaattgtgtaatggcagcacctacgactctgactcgtattgtctaggttcgaatcctagttccccagccatggctccatggtcaagcggttaagacgtcgccctctcaaggcgaaatcaggggttcgattccccttggagctgccagaaatgcctgttcgtttggacaggtttttttataccctttttcaagtgaaaaccaaaatatcccccacaggacgaacaatcttctcctgcgggggatttgcgtttgcttattttttctccttctgcgcctgctcgatcagttccagtaccgcatcggtgccgtcctttacgggataggcctccagcgtcctcgccagctcctgccgctgggaaagcagctccagcagggactgagtcagggtctcgggggtcatgtcctcctgcatcagcacatgagccagcccctgccgctggtagctcttggcgttctcgatctggtcgccccggctggctcccagcggatagggcaccagcagcataggcttgtgcagggccagcagctcgctgagggtattgctgcccgcccggctcagcacaatgtccgccacagccagcgcatccggcatttcagcggacagaaactccttctggcagtagccgggcagatctttcagactctcatccagattgcccttgccgcacaggtgcagcacgtccatgtggggcagaagctccggcagcgccttgcgcagacaggcgttcacgctctgggcgcccaggctgccgccggtcatcaacagtacgggtttgctgccgtcaaagcccgccagcgccagtcccgccgcccggctgccctgaaacagctccggccgcaggggcgttccggtcatcacgcccttttcccccagtgccttggcgcattcggggaaggtagccgccacccgccatgcgaacttggcgcagatgcggttggccagtccgggggtcaggtcgctctcgtggcagaccgtgggcacatggcacatccacgcgcccaccaccacgggcacgctgacgaagccgcccttggagaacaccacgtcgggcttgatttttcgcatcagagagacgctttccgccgccccggcgatgaccttgaaggggtcggaaaaattttgcagactgaaatagcggcgcagtttgccgcttttcaccgagtgataggtaatgcccggaatggcggcgatcatctgatgctcgatgccgttctccgtgccgatgtaatggatttcataccctgcttccttcagccgggggatcaggctcaggtgaggggtcacgtgccccgctgtgccgccgccggtcagtacgatccgctttaccatggaacaacctccgtttccgtcatccgtatttcagtataccacacaaatgcaagggatgcgaccccggcggcggaaggttcagccgattcgcttcaattcggtgttcagacggctcaggatacgcttttccagccgggaaatgtagctttgggaaatgcccagcaggtcggccacctccttctgggtgcgctcccgctggccgcccagtccgaagcggagcatgatgatgcgcttttcccggggattgagccgctccagtgcgtcccggaggatatcccgctcgatctccctgtccagattgacggatacggtatccggccgggtgcccagcacgtcgctgagcagcagctcgttgccgtcccagtcggtcttcagcggctcgtccaggctgacctccagccgcagccgggaggacttgcgcaggaacatcagaatctcgttttcgatgcaccggctggcataggtggccatcttgatcttcttgtcgcagtcgaaggtgcccacggccttgatcaggccgatggtgccgatggagatcagatcctccagcggaatgcccgtgttctcgaaccggcgggaaataaagaccaccagccggagattatgctcgatcaggcaggaacgggccgcttcgtcgtgatttttcagccgccgagtcatttccctttcctcctccgggctcaggggcggcggcagcgggtcgggcccaccgatataataaagctcctgcggaaacagttttgccaatagccgctgaaaccgaagctgcaaagtcaagctgtgctgatccatcggtttttcctccttgtatgcgccgggcggcgctattcttccagactgaccggcactttttcgggcagcgcggccagcggcaccagcgcctgaataccgccgtactcctgcccggtgaccgccaccaccacgtccgcgtcgcagctgtgcccgttcaggtacaggcggcagctgtcgggccggaacacgggcagcaggctgctccccgccgcggtacgcacgctgatgagcctcatccgtggcggaagctcctgatgctgtacccagcgggcgatctccggcagcagcacccgcacggctcgaaaaggtaccaccaacaccggcagtccggtgatcgggtcccgcagaagattacctgtatccaccatggcgggcagcagcacgctatgctcgcccacggtcagctccacctgccgcaccgccgtcatggacgagggcgacagcgccgccagccagtacaatagcaggcagagggccgccgtagccgcccacgccgctccgggcggggccgaccgcagcaggacgctcagcgttccgccgcagagcagggccgcgcacagcgtggtcaccagacagcgtaggcaggcctgccagccgaaatgcccaaagcagagaacgacccctgcgggcagaagcaaaagccacaggggagaagggagaaaaagggcgcatattgcgccggcaccgcccagcaccgccgccagcatccatcgggaagggcggggaagaggcagtcccgccagcctgccgcccagcgggtaggcgcaggcgcaaagccccatgttgcaaagaagataggtttccccatggatcatggcctttcgctccctccgctttttgttcctgcccagtatacggcccccgacggcaaaagagcgtcgaagcaaagcgcacggattgtcgaaacggcgggcccattccttcccagcctatgagcgcagaggaaaaaacagaacgaaaaaagctccgaagcaaaactgctttgaagcggaagggggatcatcggggaagggtgaaaaaagcagaagccgcccgaaagggcagcccctgtcttctcatattctggttccatcggaaaactgaaagccaaagtagtattccgcgcccagcgcttccgcgatcttgctcatctcgtcggatgaaaacttgccggttttcattcgctggttaaaagcctgtgggctgcttccaacagaacgcgccaactctgcttcactcattcctttgtaagcgagagccattttgatcttttgcgatatggtcatcttcatccctccgctgctattatatagagattgtttttcttcgtcaattaaaaattgaaaaaagaaagaaaaactttgatttttgtattgacaaaataagcgttatcctttataatataatcgaaaagttgataaacccataaatcagaaatcaatcaaacaaggatagagagaaagagcaaggaggaaacagcaatggattttgcgcttttggaaggacagactctggaacatatgcgccttttgatcgaaggagcggtcgtgctgtatgagaacgacgtgatgccgctctattccatggcgatggagcaggagcgctatcaggaagcggcggggctggatacgctgggcgcggcgctgactacgctgcaaagcgatattcgggagcttcaaaacgcctataccgcttatcaggcagggaaagatgctccatgctgaacgtttgaaaagaaaatgcccgtctccgttggggaggcgggcattgtttcaggcaggcatttcgtcgtaagcatagctgtcatgatacatcgtttccggggcaatgtcaatttcgccgtccagccagaccacaacgccgtgttccaccttggcgtttttgaacacgctgtcgtccttcaagggttgaaacgcgggataatccagcagcggcgttgcgtcatacaggcgtttttcgccggaagcaaaggtcaggatcatcattttatcatccagcggctttacggaaagaacccgtatttccttcatgggcgccgccgcataggcaataccatctttgataaacatagactgcctccttatgccaacggagcaattttttcaaaaggttcgccgcgaacagctttgttccacgcggcatagacttcttcttcgtggagggccagccagcccaccacgattctgagctgttttacaggcagagctcccgccagcaattcaccatcaacgccaacagacgcttcatattccccatagaacacatgaacatggggcttgttgtgctgaacggtatcgtttgatgcccacaaagcggcacaattccggcatggtaagcacctcctgacaaggatagtatagcataggcgggcgggggttatcaaggaaagataagggcagaggaaatataaatagggagattaaaaggtgcccgtctccgttggggagacgggcacggttttaggcaaataaacgataagtgggacatattaaatatcgttcaaaacggcggcatttttttcttctttttcttgttttgcagcattcaattcctcatcggtaaaatatttatagccaacttcgaacatatagattgcgccaccaatgttattatttttaatatagtattgtaccaattctattttgacatgctggcccttctggtattcataatcccattcagaataatgtgaaattgctccactctcgtcaacacttggcactaatgtgaccaccagcactgcattctcaaatgctttggttgtaatgatataccactctccatttgaataaccaagcggtgtgccgtatttttgttgaaaagcattttcaagtttttcataatcactattacttgtatcagaagaagttctgtgcggcatagtccatttgacttcaatcaacttgtcttcgtcatcaaatctgtacaaaatagtaacgccttcaaaaccagcaacatctccctcctctgtccagaggctatcttctttactttttttttcgtcgattgcaattgtttctttggcacgaactttttcctttgtatcgccaaactggattccattgcgcaaaacaaattcgttttcagcgtgagcggataccgcaaagctccacagcaataacattgccattatcgttgaaagcaattttttcatcatcttttcctccttaatgccataagtaatttgaaaagttttcttcagtaaccagaagtctgtttttatccgtaaacgcaattgtaaaggacacctcaactctttccggcatctctgcctgaatctgtggaaataatggaagcagattacaaagcccatttagaattttgacatcatccattggcattgttgaggttagttttccgttatgaagaaccatcacaaggtgccagccatcgcgaaaatcaaaccaaaagttaagctcatcttctccatattccggtgcgttgctggtaaaggtttctatttcttccaaatccattgcctgattaagaaacgaaagaccaatttccatagggttgttctctgccaacccaacattagcaaccgtcagtagtaacgcgattataagaaacacaatttttagttttttcacttttgtagggaaacacctccaataaggcttaggattgctttatgcttttttattttttccaagcggagtcacgtcccagcgtagttaactgatagtatgtgtcggacataaagtcagcttgatttttggggattgttataagatatccgttttctaccatctcttgaagctcggcatctgaacattgccgtaagaaccaggattctgttcgtttttcacctgcctttattttcataagaattgttttcatctttccctcgtccataattttcttgcctccttgttttacgcatccgcgtacccttctttgattataaaacattttccaaaaatacgcaactgcgaaaacgcacttgcgaacaatccggtatgctttccttgaggtgatacgaatgaccgtaaaggacgccgtggcagaccgttttcggcaaatctgtaaggaacgcaatatcaagcccaatgaactggccaatcgggcgggcgttactccgtccagcgtgtacagtatgctggaccccaaacgccgggaggtttccgtcaatctggtgaagaagctctgcgacggtctggatatgactcttggtgcattttttagtactgctgagtttgatgaactggagcaggagattcgttaacgaggtcttaataaaacggagccgcccttcaaagcgtgtgataaaaatccacgctttttagattggtcatataataaaacagcctcagcgtttgccgaagctgtccttgaaccagttttgaattttgacgttgagctttttgctgttgcggcccgcgaccaccgcatccagcgccccggcccggtattcccggttgtccgggtccagcttgatggcctcccggtagctctggtgggcttcgtcatagcggtgcagacccatgaggatcttgccctgcagggcgtaccagccatcgtcccgggtgtcggcccgcaaaagctgacggagggcgctttccagattgccctgctccatcaggcggagggcaaagtgcttggcttcctcctgggcgatcagattaaacccgacccggcgctgggaggccagcttcagcgcctgctcgtaggccagattgagtcgaatcagctcatcctgcgcctgcttctggcgctgtgcgtccgtaaactgatccggatgacattcctttaccttgcggcggtacgcggcccgtacttccgccgcgtccgcgccgggcctgacgcccagcacttcaaatgggctggattcgtacagactgcatccctccccgccctgacgggttcaaatgggtaactcagctcagcttttcccggcggatgtccgcgccgagggaacggagcttttcttcgatgcgctcatagccccggtcgatgtaggaggtctcgtagatctccgtcacgcccttggccatcagcccggccacgatcagcgcggccccggcccgcaggtcggtgacggtgacgggcgcgccgtacagctcccgcacgccctcgatcaggatggtggaatggtccatcagcttgatgtgcgcgcccatgcgccgcatctcgtccagatgcatgaagcggcgctcgaaaatggtctcgctgacggtggaaacgccgttggccatgcacagaagggaggtcataggctgctgcaagtcggtggggaaaccggggtagacctgcgttttcacgttgacggcccgctgcacgccctgaggacggacgcggatgctgtcgtcgttttccgttacccgcacgcccatttccagcagtttggcggtcagcgcctccatgtgggtgggaatgcagccgtggatgaccacgtcgccccgggtggcggcggcggcgatcatcagcgtgcccgtctcgatctggtcgggaatgaccgtgtagctggtgccgtgcaggtcctgcacaccccgcacgcggatcacgtccgtgcccgcgccgcgaatcttcgcgcccatgctgttaaggaagttggccaggtccacgatgtggggctccttggccgcattgtagatcaccgtggtgccctcggcccgggcggcggccagcagcacgttgatggtgccgcccacagtgaccatatcgaagaatacgtcgttgcccaccagatgatctgccttggcgtataccacaccgccccgatcctcgatggcggcccccagcgtttcaaagcccttcaaatgctggtcgatggggcgggaaccgatgttgcagccgccgggataggccacctcggcccgtcctccccggcccagcagcgcccccagcaagtaatagctggcccgcagacggcgggtctgccggtagggaacgtggtattccttcacgttggccgcgttgaccaccatccgctggccgggacggtagtccacctccgcgcccagttcccgcagaatatccaccagcgcccgcacgtcctcgatgtccggcaggttttcgatggtgcagggctcgttgcacagaagcgccgccgggatcaccgccaccgccgtatttttaccgccgctgacggtgatctcccccaccagcggattgccgccggtgatcagcattttgtccttgctttccataatgcgggcccctgcgggccgccctcacctcttttcgcagtccagaggttcctgcgtcattgtatccaaaaagtgtcagctttcattatacacgatttgctgtttcttggcaaggctgcccgcccgcgccctttgcgttcaggggattccacgttccccggcggaagtgaaggctgaacaaaaggcacagcagcaggttgtgggcgatcatgcaggcccacgccgcctgaagccccagccccagaagccgggtgcagacgaaggtgcccgcgatgcgtacgccccacatgcccgtcaggttgaacaggaagggaatcagtgtgcgcccaacgccctgcatcatgccctcgatgacgatgggcacgccgtagaagggctcggagacggccaccatccgcagcacggtgctgcccagcgcgatgaccctctcgtcggaggagaacatcgccatcaggggccgggcgaaggcgaacaaaagggccccggaaacggtcatcagccccacctccagcggcaggatggtgcgggccagtcgcttcatgcggtcgttgtcgccagcccccagcgcgttgccggacagggtagcggcggcggtctgcatgccgaagccgggaatgtagaaggcggactccaccgtattggcgatggtatgggcggcggtggccgtctggcccagcgcgttgatcatggaggcgaacaccacatagcccagcgaggtgccgaagcgctgcagcatattgggcagcgccaccttcaggcaggggcgaagcacccggccgtcgggccgcaggctgcagcccttgggcgacaccataggatgcctccacagcaccgccgtaatcagcacgccgccgaccgtgtaggaaatggcgctggcgatggccgcgccctccacgcccatccccgcgccgtatacgctgacccggtgggaaaacaggctgatctcccggctgggatagatcagcaggaagttcagcacgatgttgatgaggttcatcaatacgcccacccgcatgggggttttggtgtcgccagcagcccgcagcaccgtgccgaagaggatgctggccgtgcggaagagcatgggcacgtacagaatgaagaaataccggtgggtcagctcccggatggcgggatccacctgcatccataccggcaccatggggctcaggctcagagtcagcgcggtaaagagcgcgcccacgatgcaggctaccatggcggcctgcgccgaggcctgatgggcctcctgcttccggcccgccccgcaggctttggcaatgtaagccagaaacccgacgcccagcgcggagatggagctgcccaccatccagcctacggtgctggtggcccctacggcggcggtggcctccgtgcccagcgcccccaccatggcggtgtcgatgtactgcaccagcgtctgcatcagctcttccagcatggtaggccatgccagagcgaaaatcacgggcagcatggcccagcgctccttcgcgcggttctttgactgattcaagggaacgttcctccgaaattattatcgcttcagccagacggtttcgttgacgatgggggtgtagctctggatgagcttgaccaccttcgcgcccacgttcacgtcctcgtaatccaggggcatggcccggggctcccctgcggcctgcatggcaatggccaattcggctgcctgctgtacgctttcctgcgtgatgccgccgataaccacggtacccttgtccagcacctcgggccgctcggtggaggtgcggatcagcacgccgcagaagcccagcatggcgctttcctcactgagggtgccgctgtcggacagcaccaccagactgttcatctgcaaatggttgtagtcgaacaggccgaagggcggcaggctgcgcaccagcggatggaactggaaatgccgctgctcgatgaacttccggctgcggggatgggtggagtagatcaccggcacctgataggtctccgccatgtggttgatggcgttcatcagggagaagaaattgtcttccagatcaatgttttcctcccggtgcgcggaaacgaggatatatttgcccttttccaatcccagccgttccagcacgtcgcttttttcaatgccgggcatggcgtggttcagcacctcccgcatgggggagccggtaacgaagatggtcttgccgtcaatgccctcgctgagcagatagcggcggctgttttcggtgtagggcatgttgatgtcggaaatatgatccacgatcttgcggttgatcatttcgctgacgttccagtcccagcagcggttgcccgcctccatatggaagatcggcaccttcagccgcttggcggaaatggcgctcagggcggagttggtatcgcccagcaccagcagcgcgtcgggcttttccttctgaatgaccttgtagctggctgcgatgatattgcccatggtctctcccagatcgccgcccaccgcgtccagataatagtccggcgcccgcagttccagctccttgaagaaaatatcgttcaggttggggtcgtagttctggccggtatgcaccagaatatgatcgaaataccgatcggcggtgcggatgacggcggacagccggatgatctccggccgggtgcccagaatggtcatcagtttcagctttttcatcagtcgttctcctttgcttcggcaggggtctccagcacgggcagacgcagggtgtcagggtgtgccgggtcgaagacttcgttggcccacatgagggtgagcatgtccgtatcgccggtgttttcgatgctgtgggtgtagccggtgggaatatccaccaccgtgagattttcgccgctgaccttgtaggcgatcactgtggaatcccccactttgcggaagcggatcacgccctcaccctgcagcacgatgaatttttcatgcttggtctggtgccagtggtcgcccttggtgatatggggcttcgacacgttcagactgacctgtccccggctgcccatgtgcagaagctccgtgaaggagccccgctggtcggcgtgggtgacagtgggccgggagaaatcctccggcggcagaaagctgagataggtggcgtagagcttcttcaccagcgggtcgctctggtcgggggcggtcaggctgtcccgcaggccggggaaggactggatcagctcagccatatggcccagattcacttcgtgcacgggctgcacggtgcaccattcgccttcccggtggggctggccctccatggcgcggaggaactcctctaccacgtcgtcgatatagacgagccgcagcgttacggaagggtcgttcaccgtaatgggcaggccccgggccacgttatggcagaaggtggccacggcgctgttgtagttgggacggctccatttgccgaatacgttgggcagacggtaaagatacaccgccgagcctgtctcccggccatagtccgccacggcctgttcggcgcttaatttgctctgaccatagggattttccagcgccgcctgaatggacgagctgagcagcaccggtgggcgcttgccgcgctctttcagcagcgtcagcagctgccgggtaaaatcggcgttccctttctgaaaatccgccgggtccgtgggccggttcacgcccgccagatgaaagacgaaatccgcttccgccgcggcggccagcagttcttcctccgtgtggggcatgtccagcagcatcagccggtgcgcgtctccgtaccggcccgtcagggcggaacgcaggtttttgcccataaagccccgagccccggtgatcaaaatattcaaagggaaagcctcctttatcgcgtcacatttcatccaacctattgtagaggaagaaacgccctctgtcaatgtgcggacagatggcgcacgcagtgctttgggcaatggaaaaagtgcgggaactgtggaaaaaatggtttcacttttcggaaaaatgggtatcatttacttgtaccccaaagatgcactttccgggcgggcttttccccccggaaactcccatagaacagaaaggatgcggcttatgttcatcaccaaggatattctttacgcaggcgtaaacgaccatcaggtggatttgttcgagggtcagtataccgtgcccaacggcatggcctataattcttacgtgattctagatgacaagatcgccgtgatggacacggtagaccggcattttcagcatgaatggctggacaatctggccctgattctgggcgggcggaagccggactatctggtggtgcagcatatggagccagaccattccgccaatatcgccagctttctgagcgcctacccggaggcggcggtggtggccaacgccaagaccttcgccatgatcgaccagttcttcggccctggcctgtgcgaaaacaaggtggtggtgaaggacggcgagtccctttcactgggcaaacataccctgaccttcgtgttcgcgcccatggtgcactggcccgaggtcatggtcacttacgacagcacggataaggtgcttttctccgccgacggcttcggcaagttcggcgcgctggacgtgagcgaggactgggcggacgaggcccggcggtactacatcggcatcgtg

SEQ ID NO: 3479 - DNA, 32759 bp, Unknown
  16S sequences of unknown bacteria
aaaaagacgcggctggctgccgcgccttcaaccgtaactatattgtaggaggtgatcgcatggcgcttatcaccagctgtcaggcaaccttccaaaacttttcgggctatgaggatgaccttgcctccttggaggaaaacatccgggaatgctactccgagatcacgaaaacctcggaacagatcaatatgtccgtccgggaggaattcatttcccgctcggaactggagacgatccagaaggatttcgagaccagcattacccagaacagcacagaaatccggatggattttacagcgatcagagatgagatcaaggaaaatgtctccacgaatcagctgcttttggaagagtatatccggtttaagggagcgctcattgaactgggaaaagtcgggaacgccttcacggcagaactatccaacgaggagttggcctttaaagagaatgggcagaaaatcgcctatatctctaaccagagccttgtgattaccaatgcggagatccgcaacaagctgtccctcggtaatgaaagccgggggtggtttgattttataccaagaactaacgggaacctctcgatcaaatggagaggcccggtctaagacgctgatggaagaaaggggtgagaaccatggcatccagcggcagtttttccggctccatccgggacgggcattataagctgcgggtggactggtcgcagagcaagaatgtctctgccaatacgtctaccattacctgtaagctctatctggtgaatgactggagcttaagcattagcgggcggacggataatacctgtaccattgacggaacggccctgaccttctcgtccccggccatcggctctaccgggacgcacttgctgggaacggtatcgaagacggtcaatcatgccagcgatggcagcaagtccttaacgatttctgctgtgttccagatccgggctactctgagcggaacgtactatggaaccatctctgccagcgccaacatcacgctggacagtatcccccgtgcctccagtgtatccgctgccaatatgacgatggggacagccggtacgattaccatcagcagggcatcttcttcgtttacccatacgttgacctattcctttgggaataccagcgggacgattattaccaaaacgacagccacttcggtcaagtggacgccgccgctttcactggccagccagatcccaaatgcgaccagcggtacctgcacgatcacttgcaccacctataacgggaatacgaacatcggttccaagacctgcacattgacggtcagtgtcccggccagtgtgaaacccactatttccagcctgaccgcctcccggattgacggggaggtgcccagtgcatggggaatttatgtgcagacgaaatcgaaagtcaagctgacgatcaatggggcggcaggaagctatggttctacgatcaagtcctactccattaccggcggtgggtacagtggttccgcttccacgctgaccacaggttttctcaataattccgggacgatcacctttaaggctacggtgacggattccagaggacgggtatcggcggaggcgtccgtttcgatcacggtgaccgcctattccccgccgtacttcaattcctccctgtcccagaggtgcttaagcaatgggacgctggatgatgacgggacatacatccatgcgatggtatcctttggctattccacctgcagcgggaagaatactctcaagacttccgtccagtacaagcaggtttcagcagagcagtggacggacgccggggtggcctttgcctcaaatacagctttcacttacggcaaaggacagatctctacggagacctcctatgatgtgcgctacaccttggaggatgcgttttccaccatctccgtgcaggagatcgtctccacagctgccgtggtcatggactttaagagcggcggcaaaggggtagccatcgggaaggtgtcggaaagggataatacctttgaggtggccgagaactgggatgtgaaagtctatgggatgctgctgaaggaatacatccagcaatttgcaaaaacgatgtatccggtaggtagtatctatatgagtaccaaatctaccaacccctccacctactttggaggtacatgggtggcttggggcagcggccgggtgccggtgggaattaacacatcggacagcaactttaatacggtggagaaaactggaggcgcctctacggtggcattgactacagcgcagatgccaagccactcccatgccaaaggttcactggctacagcgagtgccggggcgcacacgcacaatatacagaaccagaaagccgcatggggtacgaacagcgggaacagggttcttattgatgccacgtccgggtatacggcagtcaccaataagaccacgacctccggaggggcgcatacgcacaccatttccggctccactgcggctgcaggttccggcagcgcccataataacctgcagccctatatcgtctgctatatgtggaagcggacagcataactttatattttctgggaatcagcgactactcttcggagcagccgcttttttcatatcaacatttcaaaggaggaacgcaccatgaaagaattctggaacaccatccaactcatcttttccgctgtgggcggctggctgggatattttcttggaggctgtgacggtttgctttatgccctcattgccttcgtgatgatcgactacatcacaggtgtgatgtgcgccatcatcaataaacagttatccagcgaagtcggctttaagggaatcttccgcaaggtactgatcttcctgctggtcgggattgcgaacatcatcgatgtgcaggtgatcggaaccggggcggtcttacggacagcggtgatctttttctacatctccaatgaaggcgtgagcctgctggagaatgcgggacatctgggactccctatcccggaaaagatcaaaacggtattagagcagctccatgacagagcagaaaacggaaaggaaggtaatgaataatggcttacacaaacagttcccttgtatcttacacaaaacttagcccgaaccattccgggcagaggacgcattccattgatcggattactcctcactgtgtggtcggccagctgacggcggagagcatctgcggatgctttaccagcccgtccagagaggccagctgtaactatggcatcggaaaggatggaaagatcgccctttgcgtagaggaaaagaaccgctcttggtgttcttccagcaacgccaatgaccagagggccgtcaccatcgagtgtgccagcgatctgaatcatccctacgcaatgaccaacgctgtttataattccctcgtgaaactgtgtacggacatctgcaagcggaacggaaagaagaaacttctctggctgggagataagaataagacgctcaactattccccgaagtctgatgagatggtactcaccgtccatcgctggtttgcgaacaaatcttgtccgggggactggctgtattcccgtcttggagatctggcctccaaggtaacggctgcactgggaggttcctcctctggctccacaggatcggttttataccgtgtccgaaaaagctggtcggatgccaagagccagaagggtgccttcaacaatctggataatgccaagaaatgcgctgactccaatgctggctattctgtatttgatgaaagcggcaaggtggtttataccggaaagcagtcgggcgctggaagttcaactggttcctttctggtacaggtaacagcaaccgacctgaacatccgcaaaggtcctggtacgaattacgccaagaccgggaagtatacggggaaaggcgtattcaccattacggaggtgaaatccggcactggttccactacaggctggggtaaactcaagagcggcgctggttggatttccctggattactgtaagcgtctttaagtaaaaagaggaagagtaggattgcccgtgggctgtgcgatagatgcatagcctacgggcctatttttttttgcccgtgatacccccctcaaagcaccggggaaatctccgtattctgaaggaggcatccttcggatgggaggaataccatgcaggtgacgaagataacagctggttttcagaaccagacggcagagaaaaaacgcttcacggacgcagaactgcaaaaggaatttgactattacatggcgcagaaactgctggaaaatctgcgggaggcaggcctgattaccaaggaagaattggagaaaatcacggcgaaaaaccgccagtctttctctccttatctggctcggattatgccctgaatgacttgctatttgtgggttttagagcgaatatgtccgtaccgaaagagaggtgagaggatgaaacgaatcacaaagattgcggagaatgcatcccttggaaagaagaaaatcagagtggctgcctactgccgggtgtctacagccagtgaggaacagcttgtcagcctggcagcgcagaaggcccactatgagaactatatcaaatccaatgacgagtgggaatttgccggactttactatgacgaaggcatctctggcacgaagaaggaaaagcgggatgggctattgtctatggttgccgcctgtgagcggggaactattgatatgatcattaccaaatccatcagccggtttgccagaaataccacggactgtctggaactggtgcggaaactgctggacttaaatatctacatctattttgaaaaagaaaattacccctttgagatttcaccacctttcgagaggtgttatcgggtgttattaaatccccggaaacccttgaaaatacgccaatttatccatgcaaaggcgttataggctgttatcgaacattaccgcatttttatggcctcacggacgctcgtgagggaaaaattaagggcaaaacacagggaacgacaagagaatgaagtggcaaagagaactgtcgtgatgtgtgccaggctccgccggagcctcccctgtgtgaagccggacaactgaatatagcggctcttgtgagccgatggattgacggacattagtgtttctgctgatgtccgtttttctatgcctaaaatcagatgcgaaaggaggttccgggctgggcctcctttttgtgtctcaatggaggtgagaagcattgagcgacaagtccgcgtcacctgccaggggacgaaagaaaaccgccccgcctgcccagcagccaccccaggaagaagtggtggttcgcctgccgctgacggaccttcatcctttcccggaccacccttttcaggtgcgggacgatgaggaaatgcgggagacaatccagagcgtcaaagagtatggcgtgattgtccctgccattgtgcggccccgcgaggaaggcggctatgagattgtggccggacaccggcgcaaatacgcctgtgagcaggccggtctggataccatgccggtcctgatccgcaacctggaccgggacgccgccaccatcatcatggtggacagcaaccttcagcgggagaacatcctgcccagcgaaagggccaaggcatacaagatgaagctggaggccatcaagcggcagggcgcacgaaacgatttaacttctgaccaagttgggcagaagtcaaaatggtcgattgagcaaattgcagagcaggctggggaaagcaaatcccaggtacagaggtatattcgcctgaatgagctgtccccggagctgttgcagatggttgacgaaaagaaaatcgctttcaatccggcttatgaactgtctttcctcaagccggaggaacagcagatgctcgtcaccacgatagactatgagcaggccaccccgtcactctcccaggcccagcggatgaagaaattcagccaggccgggcggctcaatgaggacagtatgctggcaatcatgtccgaggaaaagaagccggagaagttcagcctgacctttgacggggaccgcatacgcaagtattttccaaaatcctatacgcccctgcaaatggagaacaccatcatcaagctgcttgaggcatggcagaagaaacgccagcgcagccaggagcgataaaaccgaatacacctaaaccgccggacaatccatttgcccggctttttcattttcataaggaggtatccatgtatatcaacactttcaaatacacaccggaagatgtggactgcaaactttgtaccgagtatgtcaagaaatttggctgcaccgcctgcggctgcccctggatggccgagcgcattgaggcgggcgttgtgagctatgcagaggtggtccggcagatgtttccccatgacaagcgcctgatggctcgcctggaaccgctgatccgggatttccccggtatgctctggaaggatgagcggcaccggcagcgcatggagggcgtgaaaatccacctgggccacagcaagcgccgggacacgcctgccttctttgcggtcatgttcctgttcacttccgatgaggacatttaccgccgcgccggaaactgcctgtgcaggcggggcgcggagttcgattatgcaaggctccatgagatttcaccccatgactacaccctctatatcgctgcgcggggcatctacaccaacgcgggaggactgacaacccgtgacctggcggatgccgaagttgtagacgctgcggcactccgcatgatcgtgaacgccctgctcatcgcccggtatggctgtgcggtcctggatattcacgaaagggggcgcaaggcatgaaacctctgcatctcccgctggaaggccacgatctgctggctgtggaacggttcaaggacgatacccggcacatggcagaatttctcattctgtccacccactgtcccctggggcgcaggggccagtataagcggctgtttctgaccgaggacgaatatgcccggatgcggtccctggaacgccagggccagcttcagatccgccgtcacgctgcaatcatcgaggggcatatcctgcccgacaaacccaaaaagcgccgccattgatggcaggcgcacccataggaggatttaagtatggacgcttatgaagcattgaaagaaacctttgacgatctgtttcagcaggcggtggaggaaggctgctacaccgaggacgaagccgccgagctggtggaaagcctggacatttacagtctgttgcaggtggtccgccacaatgccacaacggtgtattcctacatcacccagggaaggcaggaacggtcctttaactaccggggagaggacctgttccgccagaaggccaccctgctgtatgaggaaaccgatcaggtcacaatggagatcgtggtggctacccgcaccttggagctgtggctcctggaagatatgtccctggcggttgtctcctgcgtgagcgtgaactacgaccatgacggttacatcacgcagtaccgcaccatcaaagatacgccggtcatggacagcgagctgtgcctggacctgggcgagcttgtagaggacttaaacgggctgtgcggcccggtgtatgaacatacccagccggtctatgaaccgtaaccagtaaggcggctggccccagggccgggccgcccttttagaatgggagtgatgaatatggcagtttttcgcgtagagcgcacacgggactacaccgtgatgagcaactaccacctgaaagataccggcctgaccctgaaagccaaggggcttctctccatgatgctctccctgccggatgagtggaattacaccacgcggggcctggcctccatctgcaaggaaagcgtggagacgattggcaagaccctccgggagctggaaagcgcggggtatctgacccgcaggcagctccggggcaagaatggccggatcaccgataccgagtacaccatctttgagaagccggtcaagccccagccggaaccggcaccgccagatacggcttcaccaggtacggaaaacccggatatggtaaatccagatatggaaacaccagatatggctgtaccagatacggaaaacccgccgcaattaaatactaagaaatcaaatatccaaaaatcaaatactcatggatcaaatactcattcattctttccttctgcacctgcggcggcagagacggacggacagacggaagtgatggagaaacgagaagaaatcagggatcagattgagtacgagcatatctgtaattccctgaaccgagaacagatagacgagttcgtggaaatcatgctggaagtggcgctgaccaaaagccccaccatcaagattgggcgggatgcggaataccccaccgcttttgttcagcaacggtttgcgaagatcacctgttcccatatcgaaaaagtgctggacggtatccacgaaaacaccacccgcgtctggaacaccaaggcatatctgatggcggcgctgttcaatgcaccgtcctctctggacaaccactacacgatgctggtcaatcacgacctttacggaggcggctcataagggccgccttttctgcaccccggacatggggagaaaggagtttcgcatgaaacgcccgcttgcgtatatcaccgcccattggggcgacaacgagtttgagaacaccgaaaacgccgccaaatactgccgcctggtctacgaggccggattttcgccgatctgcccgcttctgttcctgccgctgtttttgaaggacagcatcccccaggagcataaggacgggatcgacatggcacgcgactatctccgccgcgcttctgtgctggtggtctgtggcggtacggtggatgaggccatgaagaatgacattgccgtggccgagcggctgcggatcaccgccaccactctggacggtattttgacggttaaaggccagggccgcgaggatggcggcaaaaagggagcctgaaccatgcgggggaaatacctgctccgccgtctggtggttccgccttagacggggccgccgctttcatcctgacagaagggagtgattttgatgcaggaagaagtggaaaacaggacattgacgctgacggtcaatgccaccaagttcaccgggcgggtcctgaaagcggcgctttccaagtacctggcccaccgaaagaacaagaagctgcaaaacagccgggacagcccggacggtgtgaagccatacggcagggtcagcatggaggacctgaaaaagcagtacggcgatatgaaggagatcgacctgcaagacaaggggcttcggagttttgaccggattgcccgcgagtacaaggtccagtatgcggtctataaaacggcaaagggccagtatcagattttcttcaaggctcccagtgaggcgagtatgaacgccgccttccagaagtattccaagaaccggctgaaaaaggagcagcgccgggagtcagtgctgggtaagctcaagaagttcaaggagctggtgaaagccccggtcccgaaccgtgagaaacggagggaacaggaacgatgagacagctcgatttgaaaaaacttctgctccccaacctgccctatctgctgatcggcctctatgccaccaagctgggcgaggcatggcggctggctccgggcgcggacgcttcggccaagctgctgggcctgatggatggatttgccgccgcctttcagtcggcgctccccagctttcacccggttgacctgctggtgggcctctgctgcggggctgccctgcggctggctgtttacttcaagggcaagaacgccaagaagtaccgcaagaacatggaatacggttcggcccgctggggtacggcggaggacatcaagccgtttatggacccggtgtttgagaataacatcattctcacccagacggaacggctgacgatgaacagccgccccaaggaccccaggacagccaggaataagaatgttttgattatcggcggatctggaagtggtagaaggcccgcacctgaccctgcatggggtacgggccgattgccgtcttaaccgaagccagcaagtaagttaagagtatcagcgcggaagaaatctggaagggttttgcagtcctgaccggagtggaaggcccgccttaaaaagcgggacacacgcaacgcatagggcttgagcctgccttgcagaatataacagccccacgaggccgcgctgccggctggcctgccggatacggcagggcaaaaagatatgctatgctgggcgtgaatggacacgccgctgaaaatgggcgaaagctccagaggggccgataaaaagcggcccggtaatcacatcagaaaacacgcttctggttgaaacccaacctgatgcagtgtacttccaagacctatccgacctcctttgtagtcaccgatccaaagggcagtattctcatcgagtgcgggaaaatgctgcaaaagttcggctaccgcatccgtttcctgaacaccatcaacatgaaaaagtccatgcactacaaccctttcgcctacatccactcggagaaggacatcctgaagctggtaacaacgctgattgcgaacaccaaaggcgaaggcaagggcggggacgatttctgggtcaaagccgagacgctattgttcacggcgctgatcggctatatccattatgaggccccaacggaggagcagaacttctccaccctgctggaaatgattaacgcgatggaggtccgggaggacgatgaggaatttgaaaaccctgtggatttgatgttcaaggagctggaaagccgccagcccggacactttgcggtgcgccagtataaaaaatacaagctcgccgcaggtaagacagctaaaagtatccttatcagcgcggcggccaggacctctatttttgacattcaggaggtccgggacttgaccgcctatgacgagctggaactggacaccctcggagatcgcaagacagccttgttcctcataatgagcgataccgaggatagcatgaattttttgattgctatggcctactcccagcttttcaacctgctgtgtgagaaggcggatgatgtgtatggcggcaggctgccggtccatgtgcgctgcctcatagacgaggccgccaacatcgggcagatcccacggctggagaaactggtcgcaaccattcgaagtcgtgaggtatccgcctgcctcgtcctccaggcgcagagccagcttaaagcgatttacaaagacaacgccgacaccatcatcggaaacatggatgccacggtattcctgggcggcaaggagccgaccaccttaaaggagctggcggcatcccttgggaaagagacaatcgacacctacaataccggcgagagccgtgggcgggaaacctcccactctctcaattaccagaagctcggaaaagagctgatgagccaggatgagctggccgttatggatggcggcaagtgcatcctgcaactgcgcggcgtaaggccgttcctttcggagaagtttgatattaccaaacatccgaactacaaatacctttccgactacgacaagaaaaacgccttcgacatagagcgttttctgtctgccaggctcaaattgaggccggacgaacaatttgcagcctattcgatagacctgtccggggacgaagccgccgaggaaaccggcggctgattaccttcgaggaaaatgtgtgccttccgtaatcaatcaaaaatcaatcaaattttatggaggtacattatggaattctttaactctgctgtggatgttcttcagactctcgttatcgccctgggcgctggccttggtatctggggcgtgattaaccttctggaaggttacggcaacgacaaccctggtgcaaaaagccagggcatgaagcagctcatggcgggcggcggcgttgccctgatcggtatgctgcttgttccgcagctcaccgggcttttcggctaatctgtcaccccaaaaccccagcccctcccgtcctgcgcgggaggggcagaaaggagggtaaacccctatggattttctgtgggatgccataaccgaatggctcaaggagcttctggtgggcggtatcacgagcaacctgtccgggatgttcgattccgtcaaccagaaggtggctgaaatctccggccaggtgggtatgaccccccagggctggaatggcagcatctataacatgatccacaacctttcggagacggtcattgtccccatcgccggagtgattttagcgtttgttatgacgctggaattgatccagatcatcaccgacaagaataacttccacgagatcgaaacagcggtctttttcaagtggattttcaaaactgcctgcgccatcctgattgtcaccaatacctggaacatcgtcatgggtgtgtttgatgtggcgcagggcgttgtcaatcaggcatccggcgttatcatttcggatgccagcatcgacatcagctccgttatcaccgatatggagagccgcctgatggagatggagctggggccgctgttcggcctgtggtttcaatccctgtttgtgggcattaccatgtgggcgctcaccatctgcatattcatcgtcatttatggccggatggtggaaatctatctcgtgacctctgtggctcccatcccgatggcggccatgatgggccgggaatggggcggcatgggccagaactacctgcgctccctgatggccctgggctttcaggcatttctcattattgtctgcgtgggcatctatgcggtcctggtggagaatatcgccctggatgatgacatcatcggcgcaatctggagctgtgtgggctatacggtgctgctgtgttttaccctgttcaaaactggaagcctcgccaagagtattttctcggcgcactaaatcgggagggaggtttctaaatggcttatgtaccagtaccaaaagacctgaccaaagtaaaaacgaaggtcatgttcaatctcaccaagaggcagcttgtctgcttcgggagcggggcgcttctcggcgtgccgcttttctttctgctcaaagggcctgtggggaccagcacagcggccatgtgcatggtcatcctcatgctgccgtttttcctgctggcgatgtatgagaagaacggccagccgctggaaaagatactccgcaacatgatccgggtgtgtttcctgcggccccggcaacggccctataaaaccaagaacttttacgccgttgtcatgcggcagaaccagttagacagggaggtgtatcacattgtcaacggaaaagcgaaaactgacccgcgccgagagaaaactgatcgaggccgccatcgccagggcgaaccagaccgataaaaagcagctttcggcgcaggacagcatcccttatcagcggatgttcccggacggcatttgccgtgtcactgataccttttacaccaagacggtccagtatcaggatattaactaccagctttcgcagaacgaggataaaacagccatctttgaaggctggtgcgacttcctcaactacttcgacagctccatccgctttcagctttccttcctcaacctgaccgccagccgggacagctatgcgaacagcatcaatatcccgccccagggcgatgaatttgacagcatccgggccgagtacacggaaatgctgcaaaaccagcttgccaagggcaacaacgggcttatcaagaccaagtacctgactttcgggattgaggcggccagcctgaaggcggcaaagccccggctggaacgcattgaaacggatgtgataaacaacttcaagcggctgggcgtggtggtggaaccgttaaacggcaaggagcgcctgcgggtgctgcatcagatcttccacatggacggacaggagccgtttcaattctcatgggactggctggccccttccggcctttccaccaaagattttattgcgcccagctccttttccttccccaacggcaagaccttctgcatggggaaaaagttcggggccgtttccttcgtccaaatcctcgcgccggagctgaatgaccggatgctggcggactttctggacatggaaagcagcctgatcgtgaacctgcacatccagtcggtggaccaggtgagcgccatcaagaccatcaagcgcaagattaccgacttggaccgggcaaaaatcgaggaacaaaagaaagcggtccgcagcggctatgacatggacatcatcccctccgaccttgccacctacgggacggaggcgaaaaagctcttgcaagacttgcagagccgcaacgagcgaatgttccttttgaccttcctggtcctcaacaccgctgacagccagcggcagcttgccaacaatgtgtttcaggccagctccatcgcccaaaagcataactgccagctcacccggctggacttccagcaggaggaagggctgatgagcagcctgcccctgggctataaccagatcgagatacagcggggcttgacaacctcaagcgtcgctatttttgtaccctttaccacccaggagcttttccaggatggcaaagaggccctgtactatgggctgaacgcgctttccaacaacctcattatggtggaccgaaaactcctgaagaaccccaacgggctgatactcggcacaccgggcagcggtaagtccttctcggcaaaacgcgagatttccaatgtgttcctggtgacgaatgatgatgtcctgatttgtgatccggaggacgaatatgccccgctggtgatccgcctgggcggacaggtggtgaagatttctcccaccagcaaccagtatgtgaacccaatggacatcaacctcaactattcggacgatgataacccgctggctttgaaagccgacttcatcctctccctgtgcgatattgtggtggggagcaaggacggattgcagccggtggaaaagaccgtcattgaccgcgcggtgcggaatgtgtaccggccatatctggctgacccggacccggagaaaatgcccatcctgcaagacctctatgatgagcttctgcgccagccggagccggaggcaaagcgagttgcggcggccctggagctgtatgtgaccggctccctcaatgtgtttaaccaccgtaccaatgtggagctggaaaaccggctggtctgcttcaatatcaaggaactcggcaagcagttaaaacagctcggtatgctggtcatccaggaccaggtgtggaaccgtgtcaccgtcaaccgggcggctggcaggaccacccgctactactgcgatgagtttcacctgcttttgaagggggagcttgcaagctggagcgtggaaatctggaaacgctttcggaaatggggcggcatccccaccggcatcacccaaaatatcaaggacctgctggcctcccgcgagattgagaacatctttgagaacagcgacttcatctatatgctcaatcaggcatccggggaccggcagatattggcgaagcagcttaacatcagcccacaccagctttcctatgtgacccactccggcgagggtgaggggcttctgttctacgggaatgtcattctgcctttcctggatcggttcccgaaggacacggagctgtaccgcattatgaccacgaagccccaggaggtatcagcatgaggcaggaaccccgcttacagtttaccaaagaggaacgggctgccccggaactggaaaagctcatccgcaaggcagaccgggcggcggacaaggcagaaaagacgcgggcgaaaatccccaagaagaaaatccgctttgaggaaacggtaacggaccctgccaccggcaagaccgtcacccgcctgcgttttgaggaagtggataagaaaaagccgccctccaagctgtcccatgcggtacgggacgcgcctgggaacgcggtcctctccaaagtacacaaggaaatccgggagtccgaggaagataatgtgggcgtggagagcgcccacaagatggaagaaactgccgagacgggcgggcgcatgattgagagcgcctaccattcccacaagctgaaaccctaccgggaggccgccaaagccgagaaaaagctggaaaaggccaacatcaacgccctttaccacaaaagcctgcgggacaatccccagcttgccagcaatccgctgtcccggtggcagcaaaagcacgccatcaagaaacagtatgccgctgccaagcgtgcaggccagaccgcaggcagtaccaccaaaactgcggagcagacggcaaagaccgccaaaaccgccgcgaaaaagagtgagcaggcggcgcagtttgtctggcggcaccgccggggctttctggtaggcatcgccctggtagtgcttctttgtttcctgctcaataccatgtcctcctgttccatgatgtttgaaagcgtgggttccggcgttgccggttccacctatccctcccgcgatgaggatatgctgggggccgaggccgcctacgcacagatggaggcagagttgcaggactacctggataactatgaagccacccatgactatgacgagtatcactttgatctggatgagattgtccatgacccctatgtgctgatctctatcctcaccgcctaccatcagggggaatggacccttgccgaagtggaagggaccctctccatgctctttgagcggcagtacattctcaccgaggaagtggtggtggagacacgctaccgcaccgaaacctcaacggacccggaaaccggcgaaaccaccagcgagcaggtcccttacgattactatatctgttatgtgaccctggaaaactttgacctgtcccacctgcctgtctacatcacgggcgaggaacaggtgagcctctatgcagtctatatggcaacgctgggcaaccggcctgatctgtttgaaggcaatcccaacgcctccaacagcggcagcctggaatttaccgactacgacattcccccggaggccctggaagatgaaactttccggtccatgattaccgaggcggaaaaatacctgggctatccctatgtgtggggcggcagctctcccagcaccagctttgactgctccggcttcatttcatgggtcatcaatcattccggctgggatgtggggcggctgaccgccaacgggcttttgaacatctccacccctgtttcccgcgagaatgcccggcccggcgacctgatctttttccaggggacctatgacaccgccggggcctctcatgtggggctgtatgtgggggacggaatgatgatccactgcgggtccccgatttcttacgcaaatatcaacacatcttactggcagcagcatttttatacctttgcgagactgccgtaacagaaaggagcttttgtatgaacgccaaaatcaagaaaatcaatgccgagtatgagaaaaacgccgcgaagatcgcggagcttcaggcccggcagaaggaactggacaaacagcgcaccgagctggaaaacctggacattgtgggcatggtccgcagcatgggcatgacgccggaggaactggcggccctgatcgaagcgtccaaaaacggccagatggcccctgccatgacggagaaggaggaaaccggcgatgaagaaaactaaatctcgtatccttgccagctttgtggccgtgatgctctgcttcacggctttttctacggtggcttttgccaacgggaacgacccggaggcaaagccggaaaccacggccagcaccgaacaggccgaggaaacggaggcccctaccaccggcggcatcgaagatactgcggatgcagacgaaaatgcctctgatacggcagaaaccgaaaccatgaccgaggaagatgtggtcgagctgctttcctccctgttcggctcccaggtggaagtcaccaccacggacagcggccttcagattacatctaacggcgaggcggccagtaccaggaccgggaccgtcactaccaacggcggtaacttaaatgtccgtaccggcgcggggaccgacaatgccgccatcacccagctccccaatgggactgaggtggaggtgatcggcaccgaaggcggctgggtgaaaatcctcctgccggagcgcgagggctatgtgtgcggcgactacctcaccatcagcgatgccagtaccggcgatggcagcttttccctctctcttggagaagatgaactttcttccctgatgggactgcttggcggcgggggcggcagcgccctgaccccggacgggaacctgaccctgattgatgattacggcagcacaaccggcaccggcaagcagtttatcacactggaaacaaaagccgggaatgtcttttacctgattattgaccgtgatgataagggtgaggaaacggtccacttcctgaaccaggtggacgaggcggacctgatggccctggccgatgatggcgaaccggccacctgttcctgcaccacccgctgccaggccggggcggtcaatatgaactgcgaaatctgcgcttcggatatgaccgcctgcgctggcccggaaccagagccggaaccggaagaaacgcctgccgccgaggaaaccgagccagagccggaggaagaaagcggcggtatgggcggcctgctgattgtcctgctgatcgcggttctggcgggcggcggcgcgttctattacatcaaattcatcaagaataagcccaagaccaaaggcgacaccgacctggacgattacgactacggcgaggacgaggaacccgccggggaggaagatctggacgaggacgcagaggaagaaatggacgatgagtttcctatggatgcggagccggaggatgagaagctatgagatattttaccgacaaccctctggagcgcatgatgatgcaggtcccccgccaggagcgggggcctgacctgtcccgcccggccaaaggccacccctgccacggctgcaaacgctacggggagggctgcatcctgccctgttaccggggcgtgatagaaccgagagcgatgaaacccaaagaaaggagcgtgaacccatgagccgacttgtgatcgcagagaagccctccgtggcacagagcatcgcctctgtgctgggggcggggaaccgaaaggatggctacctggaaggcggcgggtatctggtgagctggtgtttcggccacctggcggagctttcggatgcctccgtctataacccggactatgccaagtggcgctatgaggacctgccgatcctgccggagaaatggcagtattcggtggccgccgataagaaaaaacagtttgacctgctgaaaaaactgatggagcggtccgatgtgaccgaggtggtgaacgcctgcgatgccgggcgcgagggagagtccatcttccgcaccgtctacaacctgaccggctgcaagaagcccatgctccggctgtggatttccagcatggaggatgccgccatccgggagggcttttcggccctcaaaccgggcggcgactataacgggctgtatgcgtccgccctgtgccggtccaaagccgactggctggtggggatcaatgccactcggcttttcagcgtgctgtaccaccgcactttgaacatcgggcgcgtgatgtccccaacgctggccctgatcgtccagcgggaagccgagatcagcgccttcaagccggtcccgttttacacgccggtccttgactgcggaggattttctgccgccggtgagaaatgcgccgagaaagcggcggcccaggcggtggcggatgcctgcaaagaccagcccgccctggtccagactgtggagcagaaagaaaaatcggaaaagccgcctgccctctatgacctgaccactctccaacgggatgccaaccggcagcttggctacacggcccagcagaccttggactatctccaggcattgtatgaaaagaagctctgcacttatccccgcaccgacagccggtatttgaccgccgatatggaagggacagttccggcactggcggcggcggcggcgaagatctgcggggtggctgtgccgtacaccgttctggctgcccaggtgtgcaacagcgccaaagtcaccgaccaccacgccatcgtccccaccgagggagctggccggacggatgtggaggccctgcctgccggggaacgggaaatcctgcgtctggtggcgcgggagcttctgtgtgccaccggctccccttaccgctaccaggaaacggctgtcaccctggcctgcggcgggaaccagttttctgccaaaggtaaggccatcaccgatccgggctggaaagcctatcagcgggaaaaggcagacccggcgaacgaaagcgtcctgccggacagactgacagaaggaatgacgctccctatcaccgctgtcaccatcaaggagggcaagaccacagcccccaagcactacaccgaggacacgctgctctccgcgatggaaatggctggcgcaaaggatatgccggaggatgcggagcgcaagggcatcggcacaccggcgacccgcgccggtatcttagaaaagctggtatccaccggctttgtggagcgcaggaaacagaaaaaggccaccaacctcattcccacgcagatcggcgtttccctgattaccgtcctgccggagcagcttcaatcgccactcttgactgcggaatgggaacaccagctcaaagaggtagagcgcggcgaagtgaagcccagcgagttcatggacggtatctgcaatatgctccgggacctggtggggacctacaaggtgattgacggttcccaggtgcttttcccctctgaccgtgagacggtgggcaaatgcccccgctgcggcggggctgtcaccgagcgcaagcagggatttttctgcgaaaacgctggctgccggtttgccctttggaaaaacagcaagtttttcaccgccaagaaaaagaacctcaccaagtcggtggccgcctctctactgaaagatggccggatgaagctcaccggctgctattcggagaaaaccggcaagacttatgatgcaacggtggtgatggaggacaccggcgaaaagaccaacttcaagctggtgttcgggaatggataagcctcgcatgacggagggccagctccggcgcgcccggaaactgatccgccgcctgtgcgccaactatgatgaaggaaactgcctggccctggatgaaggcgagggatgcgtctgcgtgcagagcatttcttactcccttctctgccggtattttaaggaggcggtcctgcctgcggatgcggagctgtgcgcggccatcggccagggagccgatgagttgaaacgctgtcggtcctgcggcaagcccttccaggccagaagcaaccgggccttgtactgtccccgctgcgccgcttttgaacagcggaagaaaacccgtgaacgggtgcgccgccaccgggggcagatgtaacgctttcggggccggaaagcccaggtatttcaaggcatttccggccccgtttgtgcgctgccgtatgttttccccttaacccctcaaaaccgtgtttgaaaccgttacatttccgccctgataagcaagcataggaagtgtagccacactttcggcaaatccctgtcgttattcatcaagtatttacaaaattctgctatgcttatcttgatgaatgaggtataatcaatctggcaataaaataaattagaagtcaagttggaggaacaaatttatgatacgtcctttgtcagaaaaagattacaatatagcgattgatatagtaaatacgaattggaaaaggacatattcaaattatgtaaatccacttttgctaaatgaaattggctgtaatgaacgcgcagaagaactaaggcatgattttcaatcaaaacggttgtcggaatatgtttgggaagaacaaggccagatattagctctattatcaataggtgatacagcagatatagataaaaaaggagcttttgagatttggcgtatttatgtaaggccagaagcacaaggacataatatcggtagcaaatgtattttatttgctgaacaagaagctaaaagacaaggttatcaagaaattgttatatgggcatttcaggaaaatacgaccgccatctcattttatcaaaagaatggttatgtgatcgataaaaacgaatatttgggcgagccgtatttaacatttggaatacgcttaataaaaactctgatgtaactcttttgttatcaagaaatggacgcaccagaaaatcgaattctcactacttcattcaacaaataataagttgtcgggtcatcatggcccgaattttcaaaactgaataccagccgcttaccggcggcaccaccgagcaggaaatcaaatggtttcctgcttttttcataccattttcaagaaaggagctgaaccctcatggctgataagcccaccaacaaggaacgcctgaaagaactgggtgaaaagatcgaggcaggcatccgggaagtgtttgacagcggcaagtatgccgagtatctgaaagtcatgtcccgctttcccacctattccgttaataaccagatgctgatccgcttacagcgccctaacgcgaccaaagtggccggttacaacaagtggcagcaatttgagcgccatgtaaagcggggcgaacatggtattacgattattgcccccacaccttacaagaagaaaatcgaggaacagaagctcgacccggacaccaaggccccggtactggacgccaacggcaaagtggtgatggaggaaaaggaaattgaaatccccaccttccgccccatcaaagtgtttgactacgcacagaccgagggaaagccgctgccccagcttgccgccgacctgttcgggaatgtccagcactatgaggctttcatggaggccctacggcgcacttcgccggttcccctgactatcgaggcgatgcaggacaacatggacggctttttcagccctaccgcccagcgcatcgccatccggcaagggatgagcgaggtccagaccgtatgcgcctgcatccatgagatgacccatgccaccctgcacaactatgaaaagcagcggatggaggccgctgccggggacccgtccaaggagccgcccaagcccaagccgcaccagatcgaggaaatcgaggcggaaagcacttcctacatggtctgccagtatttcggcatcgaaaccggggagaacagcttcggctatgtggcctcttactgcaaggaccgggagctgtcggagcttcgggcctgcctgaataccatcaataaaaccgctggcagcatgatcgccggtatcgaaaagcactttgccgaggtctgcaaggaacagggcattgacctgtccgagcagaaaaaggagccggagcagacacccccggctgcggaggaacccgctgcgccggaactggaccccatcgaccggcttgcctccgacatcgaccagtttgcctttgagtttgacccttatgaatatcgggaccaggtggaggaccgggaggctgcggtgaaagaccttgcggcttctctccgacatggcggggcgcgtggtgttcaggactggctccaaagtgtgctggatgaaaacgaacctggggaagataccgcaaaggctgcggagctgatgcagcggctggaccagcttgcgcctgagcaggaaaaattgttgcttctggatgaggcggtgtatttgcatctgcaaaccaccgagggcggctatgactacactctctatgataaagacaccctccgccagatggatggcggacagttggatgcgccagagttacctttgtccaccgccgccctgaaaatctgcgagatgcacgacctgggaggccagtccatcaagtatgcgccccttgccatgattgaaactttgcaggaggcggcctaccagcagatgcaggaggcggcggcccaggccgccgtcccggaaagtaccatgctgccggatgccccggagcaggcgctggatgagtaccccatgccggacacgatgctcacactggatgatctggaaaagtgcggctaccgggacggggatatgctccccctttccaaagagcgggcgatggagctttacgagcgggatctgaccgtgtatgcggtggtggatggcggcagcgcggagatgctgtttgaccaggaagaatttgacacccaggccgccgggaccatgtatgccgtttcccgcgaggaatgggaggaaagcccggagttcgatgcgcgggtgcaggaccgcctgaaccatcaggaagaacgggaacgggcatttctttcccatgagggggactgcttcgccatttaccaggtgtccgagaatgacccgcagaggcttcgttttatgaatatggactggctgaacgcccatgacctttctgtggagcggggcaactacgatctggtctataccgctccgctttcggaaaccggcagcattgacgggcggcttcacaagctgtttgaacagttcaactttcaccgtccggcagacttccacagcccatccatgagcgtcagcgacatcgttgcgataaaaagggatggcgtggtatccttccattactgcgacagcgttggctttcaggaaatccccggctttctcccgtccaatccgctgaaaaatgcggaaatgaccgttgaagatgattacggcatgattgacggcatcatcaacaacggccccaaagcaacggtggcggagctggaggcgcaggcaagaagcggacagcccatttccctgatggacctggcagatgccgtccaccgggaggaacgggacaagaaaaaatctgtgatggaacagctccggcagagtccgaaacaggagcggaaaaagacagcgcccaaaaagagcgcggaaagggagctttgatatgaacaactttacctttgaagaaatcaacctgatgtgcatttacaattccggggacgggacccgccaggagctgatcgaggccctcaccgagatgcgcggctacctgggcgcagatgaaacggagcttttggagcttaccgactctgctctttcaaagctgtccgccatgaccgatgaagcatttgccgagctggaactgtacccggattttgacagcgaggacaatgcctatgatgagtaacctggaattttattctgcgatggccagctacaccgccacccatctgacggatagctggcagaggtggaccgcatttctcaccaccgcctcccggctgtataagtaccccttccacgagcagcttatgatcttcgcccagcgcccggatgcaacggcctgtgcggaatatgacctctggaacgacaccatgcgccggtatgtgcggcgcggctccaagggcatcgcccttgtggacaattcccgcgaaaagccccggcttcggtatgtgttcgacatttccgacaccggcctgcggaaaaattcccgccaccccttcctgtgggagcttcgcccggagcatgaggcggcggtggcccaggcgcttgccgagcggtttggtgcgccgcccgaaaacaacctggcggaacagcttgaaagcatcgcggcccagcttgtcagcgagtattgggtggaacacaagcgggacatcctcgacatcgttgacgggagctttctggaaggctatgatgaatttaacatcggagtgcagttcagaaatgccgcaacggtcagcattacctactcgctgctgtcccggtgtggactggagccggaaggctacttcgaccatgaggactttttaagtatcttcgatttcaacaccccggaggcggtagccgccctgggaacggcggtcagccagagcaaccaacaggtgctgcggcagatcggcattaccattcaaaactatgaacgagctaaattcgcggaaaggagcgtcacacatggagaacaacctgacttacaccaagaacggagattatctgatccccgaactgaagctggaggaaacgaagcccctgggccggtacgggaggatgcgccgggattatctgaaggagcatcggccggtcctgttcaacgccatgatggtgagcgggaaactgtacccgcacctgaacgagatcgagcagaccatgaaccggcggctggagcagatgatgccggagctgatgcaggcggcgggcgtgacggaggaactgaaagcccgcgatccgatgacctgggtggggctgatgaacaactgcaaagcccaggcggaggaaatccttctgacggaacttatatacagctaaccctgttcccctcggaacaggaacaaatacggcggattgatgaagggccaggcgttttcgcgtctggcccttctgctgtcccggagccggaaccggccccgccagcaccggcggcccctcgccgggtgcttacccaggccgacattgatgccgccatccaggaatggaacggcaatatcgagagcaagcacgcggttgtccgctacatgaaggaccatgcccgtgaaaaagacacagccgcctggctgcggcaggaatacggcgatgggctgcctgcctttcctgtcacagcggatggcgcggcgggcgatgtgccgtggcccaaagtacagcgccggatcgcccagctcatcaaggaggaccgcttctatacccaggaagaacaggaccgctttgacaacatcgaccctatcgccatccgggaggccctggccgagcgcgggattgtggacggtcaggtgacggacccggagaaactggacaatgacccgttcatccggcaggtgatgcaggatgtggaggccatcgcagccgaggaacgtactgagccagggcaggagccgcctgtgccggacttatccggccagcccgtcacccgcgagggagacaccatcaccatcgggaacggggagccgacccatgagattgacattaccgtttccgatgaggaatacgaggccatccagcaggccatcccggaggaaaaggtctatgaccctgccgcgccggtctaccataaaggcgatacggtctacctggataatcaggaataccagatcacggagctacgggaagatacggtacagcttcttccttccggcatggcttaccccatcttccggtccgaaagccgggagcggtttgagcagcttctgaaaaacgacctgagaaacggccctattaccgagtttctttccactgacccggagaaagcggaccaggacctgcgggaagtgctgacttccggcttgtttgcctggcaggataaggagtacatttcccgctggctgcgtgatggcgagggcaacaccaaaatcgcccagcgcctttctgagctgtattccggtcgcgtggagacgatggagcttgcgactggggatatagcggactaccgcaccttcaccaccagtgtcgaggtggaaatcctggaccatgaggaacgaaaacttgcgaccctggcataccgctgggaggaacttgcaccgcttctgcgggggctgtatgtaaaggagcaggacggcttctttcaggacccggaaggctttacagaccggcacacccctctcatggaaggaactccgttctatcaggtgggcgaccatgtgacgctccccgctcccgaccaccccatcaccggcacgattgatgccattgaggataactctgtccgcatttacaccgggccttatgcctggagctatgatgtcatcagccgggagcagtttgaaacctggctgcgtcaggatgagcgaaacgccggactgttcacgccggaggaaaaagaaacccctgcgccggaaattacttctgagccggtaacggtctatccgggggacaaaaacggacttccctatgatgtggtggtggagcggctgcgcgtagatgagccggaacccacgccgccggaaccggccttatctgcggagcaggctgactatcaggaaaacacggaccagccccgccgaaccgggcagaacttccgcatcacggacgatcacctgggggaaggcggaccgaggctcaaataccaggccaatatcaccgccatccgactgttgaaggaacttgaggcggcgaaccagcaggccagcccggaacagcaggaagtgctgtcccgctatgtgggctggggcggcgtgccggaggttttcgacccgtccaaaactgcctgggccaaagagtatgccgagctgaaggagcttttgaccccggaggaatacgaggcggcgcgggcctccaccctgaacgcccactacaccagccctatggtgatccgcgccatttatgaggccgtggagcagatgggctttcacagcggcaacattctggaaccgtcctgcggcgtgggcaacttcttcgggatgctcccggagagcatgagcgaaagcaagctgtacggcgtggagttggacagcatcaccgggcgtatcgcccgccatctctatcccaatgcccgcatcgaggtcaacggctttgagaaaacgcagtacccggatggcgtctttgaccttgccatcgggaatgtgccgtttggcaactaccgggtgagtgaccggccctatgaccggcataacctgctgatccacgattacttttttgccaagaccatcgacaaggtgcgggctggcggcatcattgctttcatcacttccaacggcatcagcggcggcacaatggataaaaaggacgcgcacgccagagagtatatggcccggcggtgcgacctgctgggcgcggtccgcctgccgaacaccaccttccgggccaatgccgggacagatattgcgatggacattgttttcctgcaaaagcgggaagtcccccggatgcagggagaaccgctgccggaatgggtggagacagacctgttacgcacaaacacttatacggataaggacgggcgggaacggcacgaccatgtgaccatgaaccgctacttccgtacccacccggaaatggtgctgggcgacctggatattgtgaccgggccgtttggcccccagctcgtctgcaaaccgagggaaggcgcagacctggaacagcagctccgtgaagcgatgcagcatatccaagggcgctatatcgaagccgcgctgccggagctgggcgaaggcgaggacatcgacacctccctcccggcagacccggatgtgaaaaactattcttacacggtggtggatggcgcggtgtactaccgggaaaacagccgcatggtgcgcccggacttaaacgccaccgccgaggcccgcatcaaggggctggtggagctgcgggactgtgtgcagcggctcatcgacctggaaatgaacgccgccatgccggatgccgccatccgggaacagatggcggagctgaaccggctctatgatgccttttctgccaagtacggccttatcaatgaccgggcgaaccggctggccttttccgatgacagcagctattacctgctctgtgcgctggaagtgctggacgaggatggcaggctggaacgaaaggcggatatgttcaccaagcggaccattaagccccatgaggctgtggcctctgtggacaccgccgccgaagccctggcagtctccatttcggagaaagcctgtgtggatatgggctatatggcttctctcaccggcaggaccggggacgagctggccgaggaactgcggggcgtgatcttccaggtgccggggattacggagccggacggctcaccccattatgtgaccgccgatgaatacctgtccggcaatgtccggcagaagctgcgccaggcacagcgggcggcggagcgcgatccggcgttttccgtcaatgtggaggcgcttaccgccgcccagcccaaggacctggatgcctctgagattgaggtgcggctgggtgcgacctggattgacaaggaatacatccagcagtttatgtacgagactttcaagaccccgccctatctgcgggatgtgatcgaggtgaagtatgtcccttacaccgccgaatggcaggtgacggggaaaaactctgtgggctacaacaatgtggccgcctataccactttcgggaccaaccgggccaacgcctataaaatcctggaggacagcctgaacctgcgggatgtccgtatctatgacacggtggaggatgcggacgggaaagagcgccgggtgttgaacgccaaggaaaccaccctggccgcgcagaagcagcaggccatccgggaggcgtttaaggactggatttggaaggacccgcagcggcggcaggcattggtccgccaatacaatgaagaaatgaacagtaccaggccccgcgagtatgatggcagccatatcgtctttggcggcatgaacccgtccatcaccctgcgggagcatcagaaaaacgccattgcccatgtgctgtacggcggcaacacgctgctggcccatgaggtgggcgcaggtaaaacctttgagatggtggccgccgcaatggaggccaagcgcctggggctgtgccagaaatcccttttcgtggtcccgaaccacctgaccgaacagtgggcttcggagtttttgcggctgtacccttcggccaatatcctggtgacaaccaaaaaggacttcgagaagcacaaccgcaagaagttctgtgcccgcatcgccaccggcgactatgatgccatcattatcggacactcgcagtttgagaaaatccccatcagcaaggaacgccaggagcggcttttacgggaacagatatgggaaatcaccgagggcatctccgaggtggaggccagcggcggggaacgcttcacggtgaaacagttagaacggaccaagaaatccctggaggccagactggaaaagctgcaagcggaaggccgcaaggatgatgtggtaacttttgaacagctcggcgtggaccggctctttgtggacgaggcacacaactataaaaacctgttcctctataccaagatgcggaatgtggcgggcctttccactacggacgcgcagaaatccagcgatatgtttgccaagtgccgctatatggatgagatcacgggcagccggggcgttatctttgccaccggcacgccggtttccaacagtatgacggagctttacaccatgcagcggtatctccaatatgaccggcttcaggagcttggcatggcgcactttgactgctgggccagccgcttcggggagacagtgaccgctttggagcttgccccggaagggaccggctaccgggcgcgtacccgtttctccaagtttttcaacctcccggagctgatgaacctgttcaaagagatcgcagacatcaagaccgccgaccagctccatcttcccaccccggaggtagaatatcacaacatcgtggcccagcccaccgaacaccagaaggagatggtaaaggccctttccgagcgggcggccaaggtacacggtgggagcattgaccccaggcaggacaatatgctcaagattaccagcgatggccgcaagctggggctggaccagcggatcatcaacccgctgctgccggatgagccgggaaccaaggtcaatcagtgcgtggacaatatcatgcagatctggcgggacgggcaggcggataagctgacccagctcgtattctgcgatatttccacaccccaggcggcaagccctaccagaaaggcggcaaaggctctggacaatcccacccttcatgccctggaagatgcggtgccgctgccagagccggaaccggcctttacggtgtatgaggacatccggcagaagctcatcgcccaggggatgcccgccgaacagatcgcgtttatccatgaggccaataccgaagtgcggaaaaaggagctgttttctaaagtccgtaccggccaggtgcgcgttttgctcggcagtacccaaaagatgggagccgggaccaatgtgcaggaccgccttgtggcgctgcatgacctggactgcccctggcggcccggcgacctggcccagcggaagggccgcattgagcgccagggcaaccagaatgaaacggtccatgtattccgttatgtgaccgaggggacctttgacgcatacctctggcagacggtggagaacaagcagaaattcatcagccagatcatgtcctcgaaatcgccggtgcgaagctgtgatgatgtggatgaaacggcgctctcctttgccgagatcaaggccctgtgcgccggggacccccgcatcaaggagcgcatggacctggatgtggatgtgtcccgcctgaaactgatgaaggccgaccaccagagcaagcagtaccagatggaggataacctgctgaaatacttcccggagcagatcgaaaagcacaaaggcttcatcaaggggcttgaggcagatatggaaacgctggccgcccatccccacccggaggacagctttgccgggatggaggtgcggggcgataccctcaccgacaaggagaacgccggtgccgccctgttggatgcctgtaaggaagtgaaaaacgccgatccggtccaggtgggaagttaccggggctttgccatgtcagtgtcctttgatgccttccgccaggagtacaccctgcaactgaaaggccagatgacccatcaggccaccctgggcgcagacccgcgcggcaacctgacccggattgacaatgccctggcacagatgccccagcggttagaaagcgtgaaagcccagcttgataacctctaccagcagcaggccgccgcaaaggaagaagtcggcaggcccttcccctatgaggacgagctgcgggaaaaatcggcccggctgacggagctggac

SEQ ID NO: 3480 - DNA, 2887 bp, Unknown
  16S sequences of unknown bacteria
gtctctgcaaatggggcttgtatcacttttcgcttatctattctatgcgccggcagcgcaattatgaatgagactcgacgggcgcgctgcgcgccgtgggcatcgcgtgcatcgtggtcgcggcgatcgccggcattgccgcggtggcggttaccgttgtcgccctcgtgcagatccccatggccatcccgccgtttttcatcctcgcgatagccgtcgtgctctacctcgtcctcatggtgggcacgcgctggctcgccaagcgcaccgtcacgacggagctcgcgctcatcgtcgggtggatggcgttcgaggtctccacggtcaacggcatcgcgagcctgcatgccatcaccggcgcgtcgtttatcatgctggtgctcgtgctgggcgtcgcgtttatcgtgaacgtcgtctgctacacgctgtactacgcgctcaaggggcgcgctgcgtttatcgacgggtgcattccgctcggcatcgtcggcgtcatctcggcgctgctcgccatcgcgtttgtgtagacgggcggagcgctgcgcggcgggtggccgcatcggttgcgggcggggccgtgcacagggtccatggcttcgtgcgattccacgttttgtacaaccaagatgcaatctgttactcatataatcatcgggtatgttcgatggccgagaaggatgctgcgtgactgacgagagaagaacagacgacgagccgaagcgcgtttcccgcgaggagcgccatcgtgccagctcacatgggcgggagtctttcgatcacgtgcacgtctacgacccgtatgccgacaggtttcacgaggaggacctcggcgacgagtactacgagcagctcacgcacacgaagcaaaatcccgtctcgcgcatcgtcaaccagtgggtcgaccgtctcgtgggcggggtcgaggaccgcagtttcgccgaccaggaggcgcagtacgccgcgcaccgtaccaagcgcgactacgtgtggaacacgatcggcgtcggtctgtggggcatggtgttcccgatcctcacgatcatcgtcacgcagctcgtcggcgcggagcaggcgggcctgttctccttggcgttcgtcacgggcacgctgctcatgttcatcgccaactacggcgtgcgcacgtttcaggtttccgacatcgacgaggactactcgtttgccgactaccagataaaccgcattctgacctgcatcatcatgctcgtggtcgggttcgcgtactgcatgatccgcgggtatgcgggggacatgttcgtcatcagcatgggaatctacgtctaccgcatgatcgacggtctggccgacgtgtacgaggggcgtttgcagcaggctgacaagatgtacctcgcgggcatctctcaggcgtttcgctcggcgctggtgttcgttgtgttcacggtggtgctcgtcctcacgcgcagcctcgtcgcctcgtgcatcctcatggcggttgcctcggtgttctcgttcatcgtcttgacgctgccccttgcctacatggaaacgccgcgctcgcgccgggggagcctgaaaaacgtcaacaagctgctcaagctgtgctttccgctgttcttcgcgctgtttttctacaacctgatcgacaacatgcccaagttcctcatggaaggcgcgctcgcgtacgagaaccagctgtacttcaacgccatctactttccggcgcacagtatcctgctgatcatcggcatggtgtacaagccgcttctgctccgcctgtccgaggcatgggacgaccccgccaagcacaagcagttcctcgcgattatcggcgccgtgatgggtgccgatgtggcagcgacgctcgtcatgatgctgctgatggggtggatcggcatcccgattatgtcagtgctttacggaattgacttcgagcagttcaggtacctggtctacatcatgatcatggccggagggctcaccgcggccatcgagtttttatatcaggtcatcacggtgcagcgccgccagagcactatcgtcaagctctatctggcgacattcgtgttctcgattgccgcgacgctcatcttggtgcacacgatcgggctcatgggggcggtgctcgcgtatctgctcgagatgctgctcctcgtcgtgctcctcatcctgcagttcgcaaacatcaagcgttctccggggcacgccatcgagggcgtcggccaaagctggtactagcgcccgtcatggggggcgggtgcgagagggcgcacaggggtgtcccctcggaccaaaatgacacgatacccacggcccctcgtgtcatcggtatgccgcgttcgtggtcgtgacagatcggtgaggtattggccatgtacgtgacaaaccggcgaggtattgaccatatttggtcagagcctaaccggtctgtcacgtagatggccagagccttaccggtttgtcacgaggatggaatctggggtgtcctttcatgcaggaatgacacgatacccacggcccctcgtgccacaaaaaaacgcccgagccgatgaacgacccgggcgtcttgcgttcggagcttcgtgctgaactgtcgagttattcgttcttcttctcgacttcggtctgcacgtcttcgccggtcttggaaatccaggtatgctcggcggtcgtctcttcggtggagagctcgtcggcagcgatgtcctcctcgggtagcggggcgtccttgccggggaagaactcgatgcccctcttgcgacggagcatgtactcggcagttgcggtgaacagcgcgtcggagctggagttgagcgcggtctcgcaggagtcctggatgacgccgatgatcaggccgactgccacgacctgcatcgcgatgtcgttgccgatgccgaacagcgagcaggcg

SEQ ID NO: 3481 - DNA, 7264 bp, Unknown
  16S sequences of unknown bacteria
aaattgccattagggtatctgaatccttttcataacgactgatttcaatgggttcgcttggcaaaagcacaattgcttttttctttttttcaagtttttgacaaaacaatctctgttcgttataaatatccgcacgtttattcagtgctttgagcaaagcaggatatttatgatatttggctttcattaatgcctgaggaaattccggttttgcactttttttatattttgcatcgcgagtcaatacaatcacgttatattcattaccgtcacaaatagagcgttccaccggaattggcatagagatgccaccatcaagtaatttataattacctacttttataatattagataaaaacggtaaagaactggaggctctaatgacatccattcgttcatccatatcatcttttgtaaaaaacacaggcaaccctgtttgtatatcggttgcaccggcataaaatttgacggaagatttcttaaaagcttcataatcaaacggtaaaatggtatgaaataaatctccaaaaatatagtcaaagtcaaacatacagccgtgcttaataaaatttttgacgctgacatatttatcgccctgcacatactgataaaaaatatcgtgattgcggtaagactgaccggaaatataactcagtgcattgcaggctcctgcagagataccgtagatacttggaaaataaacgtcattatcctcaaatgccgaaagtacaccggcagtataagacccacgcattccgccgccctccagcacaagcccaaccgacatagctcccgcctccttacataaaaatgagtatctttattataatggaatccttatttttttacaagacttgacaagaagcggcacaaacaaaaattaatataagaatgtacttgattttacggtttgttttaggtataataattcagtactattatggacgtttagctcagctggtagagcatttgcttgacgtgcaaagggtcagcggttcaagtccgttaacgtccaccacaatgacagggtaacaaacagtactttggttatcctaacatgagtcattgaattgctgtcaatgactcatgttaggataaaaatatgctgggttcaatttgtgtttaccataatacaacagttactcttttcattcattaagaacgcattataggttatacaactattcacattcagcaatattttggaatacttgtcttggcttataatttgttaagtgtgaatacataatataaaaaatcagcatctctcaattatgaaagtgtgaatttgaaactatgtattccaaaatgcaataaattcccacataaagtattcatgaggtatgttgaacgcacattcaacacacctcatgaatacttttttattttgaaagtggcaagccaatacaaatgagtatctatttttaatgttgtaacatacataaaataaaaggcaatacagaccgataaaaacgttacaacatttatgaattagaattgctgtacaatttcttttatgttataacaacctagcaacagcaacaaaactaaagttttggttgttgacaagaacgttttagcttttatccgtaaaaaattgcaaagcaatttttttaatgttataataataggtaaagaaaatttatctagattatcacatgtagttttgaataagatgtttattgacaactataattagcaatgctaatatttgttattagatagcaataatttggatgaaaggttcaggaggaaaatttcgatgatatttgattctttggcagatgtacttgccgaaaagtatggttttgagcgctcagaaattacaatggaaagtggtcttcgtgagcttggactggattcgctggatgtaattgatatattggtagaattggaagagcaaataggaaaagaaatagaattggaacaaaaagtagaaactgttggtgagcttgtccaatatattgagaaaaaatgtcaggaagatgaataaatatggcattttttgttctaagtaccaaactatttgaaagtaaaggagtgtgatcgtatgaaacgtgttgttgtaacaggtcttggagcgattacccctctgggaaataacgtatccgaattttgggacaatcttgtaaaaggtacttgcggcatcaaagagatcacaaaatttgatacaacaaattataaagtaaaacttgcagctgaagtgcatcagtttgacccattacaatacatggataaaatggaattgcgtcacacagacctttatgcacaatatgctatggcggcagcttgccaagctatggaagacagcggcattcaaaataccatagcccctgaacgcattggcgtatatatgggctcgggtattggaggtatgagcaccttcatgtcagaacacacagctcttttggaaaagggaccgcgtaaggtttcaccgtattttattcctatgatgattgccaatatcgcatccggaatgattgcaattcgttttaactgtaaaaattctgctatgcctgccgtgactgcatgtgcatccggaaccaacgccattggcgaagcattaagaatgattcgccacggatacgctgatgccatgattgcaggcggcgcagaagctaccatcaatgaaattacagcagccggctttaccaatatgcgcgctttgtctgtagtggataatccaaaaaccgcatgcttgccatttgatgaacgccgtagtggattcatcatgggcgaaggtgcgggcgcgcttgttttagaagagctggaacatgccgtaaaccgtggtgcacatatttatgctgagctatgtggatacggctctacttgtgatgcttatcacattacagcacctcaaccggaagcggaaggcggtgcacgtgccattgcagatgcttggaatgaattgaatttggatacagaccatgtttacattaatgctcacggtacaggtacacctctgaatgataaggcagaaacagttgctatcaaaaaagcgttgggagaagaacgtgcacgtaaagtactggttagttctacaaaatctatgacaggtcacatgtttggagccgcaggcgccgcagaagcaattgcttctgttctcgcactgcagcatcaaactgttccaccaaccataggtttaacacaacccgatccggaatgtgatttagattatgttccactggaggcacgcaaagcaaacattcaggccgctttgtcaacatccttaggcttcggaggacataatgcttgtattgcattccgtaagatcggcggtgacaatcaatgagtaataaaattgtaataaccggcatgggtgcagtgactcctatcggaattggtgtggacaactattggaacagcttaatttcaggggtttgcggtattgaagatatctcatgtattgacacttccacattacctatcaaacaggctgcagaagtacataactttaatccaaaggattatcttccaggaaagctggcacacgatttagataccttcatgcaatatgcatatgttgcagcacaagaggctatcaaacaaagcggtattgaatcttttcatccttatagaacaggcattgttatgggaactgctttggaaggacttacacttgcagtttctacacaagaagaactatctacaaaaggaaaacatgtcagtcccaaatttttaacgaaatatatgggcaatattgcagcgtcacatctatctatccaatatggaataaaaggtcccagtttgactgttacaactgcatgttcttcaggcggagatgccatcactgttgcttctatgttattaaaagcaggtatggctgatgcaattgtggttatggcaggagaatccgccattaatcctgttttaattcaaagtcttgcaatgagcggagcgctgtcccgtacaggcatgagcagaccatttgaccaaaaacgtgatggttttattataggtgaaggcggcggagcattaattttagaaacagaagaacatgctctaaaacgtggtgcaaccatttatgctgaattgttgggctgtgccaataatacagatgcatttaaccctgtagcacctgaccctgacggtattggtgcagcagaatgtatgcgtcttgcattacatcaagccaatttaaaacctgaagatattggttacattaatgcacacggaactgctaccgtcaaaggcgatattgccgaatgttttgcaattcgcactgtattcgactcttacgatgtacccgttagttccacaaaaggtgcgacaggtcatttaatgggtgccggcggcattacagaatgtattgcctgcattaaagctttggaaacaggaattctaccgcctaccataaactgcgatgaaattgaccctgaatgtaacgttcaaattattgctgagaaaccaatacaaaaaaatataacaaccgctatgtccaacgctcttggatttggcggtcaaaactccagcataattgttggaaaatatcagaggtgaattatgggatacacatatgatgcagaaaactttaaagaaatctttgagaaaaattttacttggctaaacggatttatgcgaaatgttcgtcgttttccggataaaaccgcaatgattgacccattggccgaacaaagctggacttataccgaattaaacgaaacctgcaatcgcttggcaaatgcattacaaaatgacgggattggaaaaaatgatgttgttttgtttcaactgttaaattctcctcaatttgcattttgttacattgcaccacaaaaattgggggccatcgactcccctgctaactttaatcttgcccctggcgaaacagcacgtctgcttgaccataatcgtccaaaagcttatatttatgactgtgaaattaaagaaactgcccacaaagcattagaactatgtgaatataaacctcctattattttggctgtagattatcgtggtgagcgccctgcattgcctgaaggacatattttctttgacgattatattaaagattccagtacagctgacccggttatgaaagaagagccaaatctatatgatgaagtaacccgtttatatacttcaggtacaaccggattgcccaaaagtgtacctcttaacaatgtaaatgaagttttatccgctcacgatgttatcatgcattttccgctatgcccattggacattactatgaatatgtcaccatggttccatcgcggaggattacattcaggcggtttaacaccaactttctatgttggcggtacttgtgttgtattgagagtgtttagtaccaaattatgcatggaatacactgaaaaatacggtgttacttttctaatcggctccccttctgccttgaatagcttggtaacccgtcaggaaaaacatcctgcggatttgtctcatttaaaaggaattgttaccatgggaagtcctttggagaaggaagcatgtattcgttaccaaaaagagttaacaccgaatatttttaacggctacggtactacagaaaccttctggaactgttttctaagaccatatgatttgcctgaaatggctggttctgcaggacgttcttgcaccgatgatgaagttagaattgttcgtgtatacgacgataaacgtgctgaaccagatgatttggttccaatggacggaaaaaccccgggcgaaatcattattttcccatgttttaaatctacactgacctatcccggtaacgaggaacttacaaaagataaattctataaaggctggatttatactcatgacctaggtacatgggataagaatcaatttattactgtttccggcagaaaagacgatatgattatcagcagcggtgaaaatatctatccggcacaagtagaagaggcaatcaactgtcatccaagcgttgcagactgtattgtaacagctgtacctgataaggcacgcggtgaagcagttgtagcttatgtgattccaaaagatgattctcttacaataaaagatttgaacaaatactgtgcaaatcaccctgacctttctgcatacaaatgtcctagattttactgctttgtagataaaattccatataatgcaacaggtaaaaaactacactatgtggtaaaagcacaagcacctgaagatttggaaaaaggcattctgcaaaaaccataatttgaataaaaaagaaattcccctttagctttgtaaagctaaaggggaatttcttttttaagtttgggttataaatacatttaaataagtgttacatatagtccagatatccaaccaattctatccgctccaaaggatacttgataccaaccgttttgttcttgcaatatagtaaattgatacccattatgaacttgaaatagtacattattacccgaagtagttgttggacttgtgcgaacatttacattacttgaattacacttacctttttgtccatcaggaagtacaaatttaccactatattcactgccagtgtacataatattcatatccacatttgtactaataccacttacgctacctgaagatgtatattgccacattctaaccggatatggccaatcatatgtaatacttcttccataattggctatccaaatatcataacctgattcttttaacattttatagttatatttgttggttataaaatcaggatttacgtaaatcatgggggtgtagcctgctgcctcaatttttttgcaccaagcaattgccatttgagacaaaacgtcaggcgtaatgtcattatcaggtatatcgtccttgttaagcttatctatgatctttgattcttcaaaatcaaaaatgacataagaatctacggctcttccgtttagccatgtaaggcaagtttctgcttcgcgttcagcatcagctacactgtccgcatagctgtactgataaattccaattggaatattctgcgcttttgcacctgcatagttttgctcaaaaaacttatctttttgataagtttctctaccgtaacctgcacgaataatcgcaaagtctacctgtccgctggcttttacctgctgccaattgatatttccctgatgctcggatacatctatcccctgtagcgtttttaactctacaggtaccaactgccattgctgattgattccgccgttatactcataatccaccacatactgaccgttattcatactgccatataatacgtccattgcgtgattgttggacatatttctgatatagtaatttccggcttgcgacttggatatctgcc

SEQ ID NO: 3482 - DNA, 2094 bp, Unknown
  16S sequences of unknown bacteria
tgatcatgacctcccgggcatctaacggcagggagccatcggaattatccagcgtcagcgtcgcctcggcgaagccgacctgggcgcgcttctgggtgccgccgaagatgacgtcctccatcttcgcgccgcggagggccttggtgctctgctcgcccatgacccagcggatggcgtcggaaatattcgatttgccgctgccgttggggccgacgatggccgtgatatcgtcgccgaattggatgacggtcttatccggaaaggacttaaagccctggactgctagggatcgtaaatacacacgcacacctcttgcaccgcggcccaggccgcagggattccatcgtaaaatttcatcgtagatattagctattttaacaactcttccgtcgctttgcaagtcatatttcccagatgcagcgatttgatgaagatttccgccgggaatctcccggaattgcaaaaaagcggggccgcagcgcgcaaaaggcacgccaaaggcgcgccctttgcctgtcgatgtcgtctgccaattccgcataagcgttccagatacgccgctgtactgtggcttgccctgatgtgttcgtaccgcttattgaactctatcgctgcgtctatttttcgaagcagatgccctgtaggtgccgactgctctatgaccgcaagcgctgccagctcttgatccattttcctgcggtccagcattcctccccctttcccattctgccatatctattagaaaaagcccagcttaagctggaccttttcgacagactgcaggttcgacagactgcaggcacgctgcggctgcagcgggtgtttttattctttcttgatgataaaaaatgcttagaaggtcgccacttcttctggggctggttcggcgggggtgatctcgagggcggtcaggatggggccggtgcctttgtagatggtgtggaatttgacgtccaccttggccttgaccttgacccaggtccgggccttgagggcggcgctgccgtcatacttgcaggggatgcccataaactggatatcctccacgcagcaggtcataacgaagcggccgggggcaaagtaaccgtcgcgctgctggcgcagcttggcgacctgggctttaaactggaccgtcttcccggcgtatttcttcggctcctccgtaatatcccggtagaacagggcatagtcctcgtccgcgatggtgatgacgggggcattgatatcaaagggcagcgggtcctcgatctcgtcaaaggtggtggagccatcggtaaagtcgtagacgatatccacccggcggttgacagcccgggccagcttatgcagcggcatggtgtccgcgccctttttgacccggttgaagacgaccatctcgcagccggagagcttatcgacaacgagatttcgcagattggcgttgaaggcctggatcgtcgtactgtcggcaaacatgacctcctgggcgatgacccactcctggggcattttctgatagaaatcgcccaccagctgcatcccgttgagctcgacgacgacgcgcttggcgtggtgctttttctgcagcgcgtccagctcctccgtcgtgaccttctcctgctcgatctgctcgagatagacgcaggcgtgggggtaggtggagctgtcgtactgctcgcggcccttttcgcagaccagaagcagggtccgggtgccgtcgttaaagcgctcgtcctcaaacgtctcctggataaattttgtcttaccggatttgataaacccggtgaagacatagacaggaatctgcatgcgcagcctccttagacgccgaacagggcggcaatggcggcttcgttgatcttggagccgatcacgcagacgcggccggtgacattggcgcagccggtgcggacatctgcctcgccaggcacatggtcaaagtggatccagctgccgtcttctccttcgacaacgcccttggcccgcaggaccatgccgtactgggccttgtcatccagcgcgacaaggatgcttttgatctcgtcctgggtgaattttttcgttgtctcgcggccccagctggtgaagacctcatcggcgtcgtgcccatggtgg

SEQ ID NO: 3483 - DNA, 9810 bp, Unknown
  16S sequences of unknown bacteria
acggcggccccgctcataccttcaaagaggaggtggagccgggtggcacgtaccaaaaaacaagcaaaaccaaaccgcaagccgcattggatggatctgcccatagaacttcgggtcggacagccccgcataacgctggtgggcagcggcccggtgtttgtggaaaaccacagcggcctgcttgcttatacgacaaaacgcattcaattccatacgggcgaggggcttttgaccatcaccggcacgcatttgacgctggactgcatggccagcggcgccgtgcgcatcggcggccgcgtccaaggcgttgcgctggagggaggggagcaggccgatgcgtaatctctggcagcttttccagggctatggcgaggtagagctcaagggcatgggcctggagcgggccctaacccagctggaacgtgcgggcgttacgctctggcatatccgcagggtagatcggctgaccatcacttgccgcgttcccatgcaccaaaaacgcctgttccgaaagactgcggcggagctgccctgccatatcgcctggcgccgcgaacgcggcctgcctggctttgcccaccgcctgcttcagcgccgcgcgctcatagccggcctggtgctgctggtggtaggcagcctggcgtcggtgcaatttgtctggcgggtggaaatcaaaggcgtggacgatccgcagcgtctccaagagatccgccagctgatcgaggactgcggctatggcccaggcgcctggtggcataccattgagctcaaagaggtagagcgccagctgatcttgcaaatgccggatgctgcgggcctggtggccaaccgcaccggcaccacgctagagctggaggttatccccaccgtacccgcgcccgaattgtttacccccggcgagccgtgcgacatcgtcgccaaagaggatggggtcatcgtttccgttaccgcgttggaaggcattgccaaggtgcaggccgggcaaacggtaaaaaagggtgatgtgctcatttccggcaatatcatccgcgaggaaggggaaaaccgcaccgtacaggcccgtggcgaggttatcgctacggtcaacatcacgggcagccatactgtttctatgaccacggaggagcctgttgcccagggcgaagcgtataccacccgcgctttgcagctggccggctggcaggtgccgctggaaagcgcaccaaatgagggggacgccatgctgctggaaaccaaggtaacgcagctctgcggcctatacctgcctgcacgggtcattacccagcgctggcagccggtcacggtgcagagcgctccgcgcgcctttgctgaggcggagcagaccgccgccgaaattgccacgcaaaacgccaaggcgcagctggccgaaggggagcaggtgcaaaacgtcgttttgcaaaccaacctcaatgaggacggatcgcagatgaccgtctatgccattttagaagtgcagcggcagatcggcgagccaggcgcgctggcccccgtgcctacacagccgccgggcggggcataatgcgctgcctgctgcgccccggtggcaaaaagttttttggaaaccattgacagcatgcaaaagctatggtatcctatcgatagttagattaaactaaccacaggaaatgtatacgggcggtgcccgttcctttttccacgatggttagtatacactaactatgagtttgttgagagaggtgcatcgtgagcgtagtcatcgttggcggcaatgaacgcatggccgcccagtatgaagagatctgccgatgctacggctgcaaggccaaggtattctgcaaggagaacggatcgctaaagcgcaagatgggcgtgccggatctgctgatcctctttaccaataccgtctcccacaagatggtcatttccgccgtgggcgaggcgaaaaagaaccgcatccccgtggccaggacccattccgcctccagcgcggcgctgcaccgcctgctgcaggatcatgtggggcaggcccggcatgcttgaagccatgctggcccgccatgcagcacccaccctggcagggctgaaaaccgccaacctgtttgctgtgcgctatgcctcctatcatgcgcttgcggagcaggcggcggcctggcaccaaaggctgtgcaaaaagggcgtgtgcgtatggctgctgggcgtatcctgcgggcgggcgctggtgtatgtttgccggccgcaccgcctgcagcgcgatttgtccgcacagggcagccgcagcattctccgcgcttgcggctaccgcagcgcttctgtacagggctgcctgttgcagctcaggcgccgcctggcgcagtccgggcagtttccgcacgaaatcggcctgtttttgggctatccgccttgcgatgtgctgggttttctgcacgatgccggcaggcacagcaagctcagcggatattggcaggtgtatggcgatgcgcaggcggcgttggcgttgtttgccaaatacaaaaaatgtgccgatgtctatgcgcgctgccatgcaaacggaacttctatttggcagctcaccgtagctgcctaacatattctcttaaagaaagcagggttttatgatgagtaaagtagcagttgtgtattggtccggtacgggcaacacagagcaaatggcccagcaggtggccgaaggcgccaagcaggcaggcgcacaggcggttttgctgaccgccgccgagtttggcgcggatcagatggatgcttttagcgccgtggcatttggctgcccctccatgggcagcgagcagctggaagaaagcgagtttgacccgatgttccaggcgtgcagagcaaagctgaacggtaaaaaaatcgccttgttcggctcctatggctggggcgatggccaatggatgcgcgattgggaagaaatctgccgcggcgacggcgccgtgctggccgcagagccggtcatctgcaacgaaacaccggatgacgaggccaacgaaaattgccgctccctggggaaagcgcttgcttaaaacaaccattccttcgtcaaaagttccctcttggggaatcccctacatgtcttgaatgcctctttgctttcccccctagtataaaaagaacgggcccacacccgttctttttttatcgtgcacccggcgcttgacagccttttgccggctttcgtacaataaagccgtcatttcatcgaggagggaatcgtatgcgcttttccaacttaagccgccagtataccgctgtttggcggcagaccaatgcgatttatgacgcctgggccaagcgccacgggctcacctatccagagctgctggccgtgctttcgctgtctgcgccggggcctgcgcccaggccggaggaaattgcggaaacctggctgctgagccggcagtccgtacgcaccattttgcaaggctttgccaagcgcggctggctcatgctggaaccctgccaggcggaccgtaggaaaaagcgcatcgtcttatcgcgggaagggcaggcggccgtgcgccgcatcgcccgcgcgctgggggctgtggaggcggccgtatggcagacgctgggggaaaagcgcaccgagtcgctgattaaaaccacagcgctgtacaacgaattgtttgaggaggcagccggccgatgaccccacaggctcgtggaaacgtgatgcgccgatgattcgccgcccggacggcgcagtgggaggaaggcttgggggcgttttttaagcgaaaacgccgtctatatcgagtcctgggggccaaggatgaagggcgggcgcgcatactttaccggtttgccgaatggaacacatgcggacgtgtagcttcctgggagattttgcgctttttgcacggcgcagaggaggccgttgccgtttggcagtttggcggcgtgtcgctggttcgctttgatgcggatgggcgcatccgctttttgcgggaattcggctgcaatgccgatcgctatgatccctatgccaacggccctgtgcccgtgtttcggtacgaaaaggtgcgctggttttgagtttcttgcaaaaaaaaccgggttgcaacccggttttgctgcgtcttatcgctgttccgtatgctgctgcacatggcgcttgatcgcctcaaagctctctgcgctgatgacgtgctcaatccggcacgcatcctcggccgccgttgatttctctacccccagcgccgccagccaatcggacaaaaaagtgtgccgctcgtagatggtttctgcgattttacggcccttgtccgtgagtgtgatcatgccgtcctcatccgttttggcgtacccgttttcacgaaggtttttcatcgctacgctgacgctgggcttggtaaacccaagctcattggcaatgtcgatggagcgcaccgcccctttgcgtttgctcaaaatcaagatcgtttccaaataattttccgcggattcctggatcttcacatgctcacctcctttgtcagggccgtgctgcccgcccattttttatttcaaaagtataccatattcttttcgttccttcaatttgctctgggcgccctgtgtttacataccatgcttgaaagttgggtttttggggcatataataaaacaaacatgccgtgcatggcgcggaaaaaaggcagaggagcagtggcttggaaacggaaaaaagggagatagaattggtggagttttccaccctggatgaattgatggcggtctttggcccgtacgatgccaacgtcagcctgattgagcgcgcgctggatgtatccatcaacgcccgcgataagcaggtggaggtgcgcggcgaagcggaagcgcgccgggctgcggctaagacgctgaaaaccctgcaaaggatggtagcggaaggggaaaccgtcaacgattgggctgtcagccaggccatagagatgacagccagcggccagacagaagaggtcatggccgccacgcgcgatgccgtggccgtaacctaccagggcaagccggtaaagtgtaagacccttgggcaaaagcaatatatccaggccatccgcgacaataccgtgaccatctgcatcggcccggccggcacaggcaaaacgtacctggccatcgccatggcggtggcggcgctcaagcgcaaggaggtcagccgcatcatcctgacccgcccggctgtggaggcgggggaaaagcttggctttctgcccggcgatctgcaaagcaaggtagacccatacctgcgccctctgtacgatgcgctgtttgattttttggggcaggagcagttcagccgcagcctggaaaaaggcgtcatagaggtagcccccatcgcctatatgcgcgggcgtacgctcaacgatgcgttcctggtgctggatgaagggcagaacgccacgctggaaacgctgaaaatggttctgacgcgctttggcgaaggctccaaggtggtgctgaccggcgatattacgcagatcgacctgtccggcgggcagagatccggcctgaaaaagtgcgcggagatgctctccggcatcgagggcatcggtgtggtgcgcctttccaaccgcgacgtggtgcgccataagctggtcaaagagatcatcaaggcgtttgaaaagtacgagcgccaggccgagcagcatgcgaaaaacagaaaataaatggcagcattgtgccggctcttttgggagccggctttttttcgccgtttggttagcagtgactttgccatacgcttctgctataatctaagaaaatagggaatgccccggaatttgtataaatttttgaaaaatgggcgtacaatgtaaaaacaaaccgcttgctttttgcggcgggtcttaacttaaggaggcgtcattatgacattgggggacaggctgggcagacgcctgagccgcaaggccgtgctggcgattcttgtcctttgtgtgtttggaatcgttgccatggccattacgcctaaaagctatgatttacaggtcggcagcgtgccggaggaaaacatcaccgccccgcgcgaggtggaggataccgccgctaccgatgcgttgaaaaaacgtgcccgcgaagccgtttcgcctgtgtattccaaagacggcgcagagactgtgaccatgcaggagaagatccaggcctattacgaggagatcgaccaggtgagaaaccacgcctttgtgcagctggatgccgtcagctctcaatgggaggccgccggccagatcggcccggcccctaccatcgaaatggtgctgaccgaggcgttttatcaagagctgaatcagctcatgccagagcaggtggacaacgaaaccctgcaccagctgctgcttgctaccgacgcgcaatggcaggctgccaaaaaccaggcgacggaatcctccaacgcggcgtttgaaaacggcgtgggcgaggatgcggtggtgcttacgcgcgatggcgtgcaaaagcagctagaggcgctggatgtgccggacgtttgcaagcagatggcgatgaagcccattaccaaatacctaaacgccaacctattgtatgatgaggacgccaccgaggaagcccgcgataaggcggaaaacgatgtaacgccggtggtatacaaaaaaggacaggtcatcgtaaaatcgggcgaggaggtcacggaggaccagtttgccgtgctgcaaatcctgggcatggtggcgggcggctttaacgcgccgctgtatatcggcgccctgctggtggtgctgctgctgaccgccatgggcgtgcacttgatccgtgaacaggacccggacatcgaaagcaaaaccctgttgatgggcggcatctgtatcgtattcgtgctgctggccgcgctgcttgtcatccgtaccaaccccggctttgtgccggtatgctttgtagcgatgacgatgagcatggtggtaaacgcccataccggcatggtactgggcaatttgaccagcgcgcttgtcggcgtgatggcgcttgtcggcggtgctacctcgcaggtggcctttgccgtgctgctcagcggcatggcaggcagtacggcctgcgccaaattggcggaccgctgcaaaagccgcgtgcgtatcctgggctgcggcctggtagcaggcgcggcgggcggcgcggtgtacatctgcatgggccttttgatgggcaatgcttttttgacgattttgcagtccgtgctggtatccctggccgtagccttggtggcgtccatggtatgccttggatccacgcccatttgggagcagggctttaagattttaacgccgatgaagctgatggagctttgcaaccccaccaaccccttgctgcaccggctttcgatggaggcccccggcacctatcatcattccatcatggtaggcaacctggcagaggcggctgccgaggcagtgggggcgaacccgctgctggcgcgcgcggcggcctattatcatgacgtcggcaagctgaaagcccccgccttttatgcggaaaaccagccgcaggatatgccaaatcctcatgataagctgaccccgctggaaagcgtgcagatcatccgcaaccataccatagacggagagcgcatgatcctggaggccggcattgcaccggaaatcgcgcgcatcgcccgccagcatcatggcacgacgctgatgtattatttttacaataaggccagggaaaacgaccccaacgtggaccccagcctattccgccacaacggcggcaagcccaccacccgcgaagccgcgcttatcatgctggcggatgccaccgaggcggccacccgtgccggcggcgctaccggcgattataagcgtacgatggaaaagatcatccagcagcgctatgacgacgggcagctggatctggtaaattttgccttccaagacctgaacaccattgcccgcgagtttgagtccgtgctgcgcggcatgtaccatcagcgcatccagtatccggacgtaaggctgaaacgcgcccgcatggaggaggaaagcagccaatgaagcaagtacagatcgacaatttacagcgcattgttccttttgatacccaaatgaggggcaatatgacccaggcggtgcagtcggtattttatacggtaaagggcgttacagcgccgctggaggtgcagatatcgctcattggcccccgcgccatgcgccggctgaaccgcgaaagccgaaacatcgatagggaaacagacgtgctcagctttccgtatttgaattgggagggcgccacccccggcgattttaccaccttggcggagccgcccatggtcaatatggaaaccgggcgcatcctcatgggggatatcgtcatttccatgcaccgcgcagcgcagcaggcggaggaatatggccacagcctgatgcgcgaggtgtgctttctggcagtgcatggcgcgctgcaccttttgggatacgatcatatcaccccggaggacgacgcgcgcatgcaggagattgcacaaaaaattttaagcactttgggcatttttcgtgattgattcgttgtatcttttcgccgtttatgctaagataatgccaataggagtctctgtatgagccaattcgtttcaggattcgcggccgtgatcggccggcccaatgtgggcaaatcctctttgatcaacacaatggtgggagaaaaaatcgccattgtttccgataaaccacagaccacgcgcaaccgtatcatgggcgtggtcaacggagcggggtaccagctcgtcgtgctggatacgcccggcatccaaaaaccgaaaaacaagctggggcgctatatggaaggggcggtgcgccatagcttaacggacattgaagcagccctggtcgttgtggacggcgccaaaggattgggcagccgcgacgaggaggcgctgtttcgggctacgcattgcggcgtgcctgtcgtcgttgcgctcaacaaaatagacttggcgcagccagaacaaatccgctccctgtcggcccggcttgccgcctatccaggcgtaagccacgtatgcccggtatcggcaaagaccggcgcggggctggcggaccttttgcatacgctgcgggcgctgctgccgcccggcccggcttattttccgaccgacgttgcttcggatatgccggaatcgttcctttgctgcgaaatcatccgtgaaaagctcttgcacaatttaagagacgaagtgccccatggcatcggggtagagctggaaaaattcatggaacgcgaggacggcgtggtggagatccacgcgctgatctactgcgaaaggcagagccataagggcattgtcatcggccaccggggcgcgatgctcaagcgcatcggcagccaagcgcgcggggaactggaagatttttttgggacaaaggtatttttacagctctttgtcaaggtacgggaggattggcgaaattctccctccgcgctcaaggaactgggctacgaataagcccatctcccgttttcttcccattttgcagcctttttgaatcagagtttttcgcctgctgtttgccaactgttggcaaatctgcaaggcattgccatagacgcgccgcccattcccgggcaagctaaccaaaaacctatttggccggggaggcgcatagatatgaatcagaccgatctttcccgctggcagcaattctgccgcaccgggcgtgttatggattatttgctgtataaaaaatccacagaacccatagaggaatctacatgcaacaaaccgtatttgccgtagtggcgcaagccgtgaattaccgcgatcatgaccgcattttaacgctcgttacccgcgagcgcggcacggtcacggccacggcgcggggc

SEQ ID NO: 3484 - DNA, 16112 bp, Unknown
  16S sequences of unknown bacteria
gcccgttttcgggcggcggcgatagaaatcattgctgttttacgtgcgtatatattttccccgcgaagaaggggcagtcgagcgccttggacaattgagaaacgttcaccacctgatacccgtcctttttgagagccggcagcagcaatttcaccgcctcgacggtatgtttgtacccgtcgtgcatcagtacgatggcgccggggcacctgtctttgtagaccgcggtaaagattttgtccgcggagatacctttccagtcctccgtatcgatctgccaatcgatgaggggcgcgtccgcctgtttcagcactctgtcgttgaagcacccgtagggaacgcggacgagatgcttttcctttccgtcgatcttttgcagaatcttatccacggcctcgatttcctttttgatgctctcggaggggagcttggtgagattcttgtgggaatcggtgtgattcccaagctcgaatcccgccccgtaagcggcttccagcatggaaaagttcgacgaatcgatgtagatgccgttgcagaaaaaagtggcggaagcggggcagtcgggattgtccttgttgaaggatgcgaaagcttgaagcagacttttgatcgtgctgtcgggcgcgtcgtcaaaagtgaaggcgatgagtttgcggtggatgtccacgtgcgatacgtcggtgtccgaagtgttccatacgggggcgcttttgtcatcggcggaacttttcgagtctttttgtattggcgcgtcctttttttcttcggacgtctttatcggcgtttcctgtcgtatgatttcgcttgtttctttgcccgacggaagtgcggagggcgccgcagcggcgccccgggaatgacatgaaacgagcgaaaaaacgagcgcggaaagcactaagtaagcaatttttttcaaatccgatctcctcctgactttaaaacaatgttttgaagacagtatctgcgcttcccctgaaattataccctttttcccccgcgctttcccgcgtttttctctcttttaaaaccgggacgcaccgcttttcttcaaaaaaggaaagccctttccccgtttatcgccggaggaagcgactcgcgcgtttgtcggattcgatcaatatacgaatctgatctttccatccaaaagccgttcgggcggcggagcgtcggtcgctacgaggtcgaacgcggacagcggcgtcagacgataggtgccgtgcgaagaaaacttgctgtggtcgacgacgagcaggcgtttggaactcctcacgaacgcggcgcgttttagctccttctgatccaaggaactttcaaaaacgtccgcgccgatgacggctgcgcaggaggagagcatcagatcgaacgtaaaatcgttcaattggcgcgccgtccagctgcccgtcgcggaattggtgttgaactgcacgttgcccccgaggagaatgagcgtgatattcggctttttggaaagctgcatcgccgtttgcaggttgttcgtcaccaccgtcttgtagcttaaatccatgcgctcggcaagcgccagcgcggtggaggagctgtctacaaagacgctcttgaaagtgaactcgggcaggattttcagcgcgttggtggcggcgcgctctttttctttggcgtttttgccgatgcgcacgaaaatggaaacttcctccgcgttttcgggtagcaccgcgcccccgtgactgcgctcgatgagtcccatcgcctgcatctctttaaggtcccgccgaatggtcgcctcgctcacgtaaaagctcgccgcgagattcttcaccaccgcggtcttgttccgtctgagaaattccaaaattttgttctgccgttcgctcgtcagcatcgcttttcctctcgtttgcacgtttttgttcgtttgcgtttatatcatatcacaaaaatgcttttctgtcaatatttcaaacatatatagacaaacgaaaaaaagagtgatataatatactcggatttgtaaaaggaagcgaaaaccgcccgcgcgaagcgggaagggcggcgggagcgcttcgacagaacaatcgatgatcgggagatcatgacaaggagaaacaggatgaactactatcttgccatagacatcggcgcgtcgtcgggacgccatatcttggcgcacctgcaagacggaaaaatggttacggaagagatctaccgtttttcaaacggtccgcaaatcttgcccggtacgccgggtgccttgggcagtcagggcaataagcgtttgatgtgggataccgagcgcctgttcaaagagattttgaacgggctcaaaagggcgaaggaactgaataagattcccgtttccgtgggcgtagacacctggggggtggactatgtgctcctggacgagtcggacgctcctttggagggcgtgtattgctaccgcgacggaaggacaaagagcgccgttccctccgcgcaccgccggatcccgttcgcggaactatacgcaaagacgggcattcaatatcagtctttcaacaccgtctatcagctgtacgacgataagcgggacggcagactgcaaaaggcgaagacttttttaatgctccccgactactttcactatcttttgacgggtataaagaggcaggaatacaccaatgccacgacgacgggcatggtcaacgccctcacgcacgcgtgggacgaagaaatcctcgacgcgctcggctatgataaaaagctgttcggcgcgctttcccagccgggtacggcggtgggcgaattcaccgacgaagtggcggcgttcgtaggatatcgggcaaaagtggtcctgcccgcgacgcacgacacggcgagcgcggtgctggcggcgcccctcgaagggcagacgccgtatatttccagcggcacctggtcccttctcggcgtggagcagaccgacgcgcacacttcggagaaggcgcgcgagctgaattattccaatgaaggcagcgtaaacaacaccttccgcctgcaaaagaatatcatggggctttggatgattcaacaggtccgccacgagctggacgacaaatacgatttttccatgctggcgtccttggcgcgtctgaacagagtgagcgacgtcgtggacgtcaacgacgaaaaattcctcgccccgtccagcatgatagaggcgatcaacgcgtcggtgggcaaacagctctcggtgggcggactcgcgtactgcattttcaacagcctcgccaagagctatgcggagagcttgtccgcgctggaagagctgacgaacgagcgctatgacacgttgaacatcatcggcggcggcagcaaaaacgagcttttaaacgagctgacggcggaatatacgggcaggaagatcgtcacgggacccacggagggtacggcgatcggcaattttatgatgcagatggtgggtatgggggagctttcgtccgtcgcggaagggagacggatcatcaaaacctccttcgacatccgcgaggtctgacgggatatgcccgaaagagaaacgcccggcgttttcgcaacgggcgcgaaaggacaggatagagataaagaaattaagaataaggagatcaacttatgtcaagatacgaggaagcgaaaaaaatgtacgccgcttacggcgtggatgcggaagcggcgatagagcgcctcaaagagatccctctcagcgtacattgctggcagggggacgacgttttgggcttcgacgggagcgattctctcgacggaggcattcagacgacgggtaactatcccggcaaagcgacggggtttgaacagctgaaagaggacatcgtaaaggcgttttctttaatgcccggcaaaaaacggctcaacctgcacgcgagctatgccgttctcggcgcggacaaaggcaaagtggacagagatgcgtatacgtatcaatatttcgagccgtggttgaaattcgccaaggaaaacggcatcgcgggcatcgactttaacccgacgttttttgcgcatcccaagatgaaagacggtctttccctctcgtcgccggacgaacccacccgcaaattctgggtgaaccacggcaaggcttgtttgaaaatcgcggcggagctgggcaaggcgatgggaagtccctgtttcgtcaatatctggattcccgacggctataaggacattcccgcggatcggctgggaccccgtctgcgcctgaaaaaatccctcgacgaaattttggcggattacgataaaaagtgggtgatccccgcggtggagagcaaggtgttcggcatcggcgtggaaagctacacggtcggcagcaacgaattttatcagaattacgcggcgaaggcgggcatctgctgccttttggatacggggcattatcatcccacggaggtcgtttcggacaagattcccgcgctgctcgcgttttacgacaaagtggcgctccacgtttcccgtcccgtcagatgggacagcgaccacgtggtgcttctcgaagacgaattaaaagagatcgccaaggagatcgtgagaaacgacgcgacggagaaagtaatcatcggattggactatttcgacgcttccatcaatcgtatcggcgcctgggtgacgggcgtgagggcgatgcagaaagcgctgttgtacgcgttgctgttgcccaacgccgagttgaaatcgttgcaggacgaagccaatttcggcaagctcatgtatctcaacgaggagtttaagacgctgcccctcggcgatatctggaacgaatatctcgctcggcagggcatgaataacgattggtacgcggaagtggaaaaatacgaaagggacgtccttataaagcgcgcctgaaaaaacgttagaaacttttaaacggaaaaaaagctccctgattatcgtccgggaaaattcggcgaataaacttggaagggagcgggtgtgcccatatgcgcatatcggagcggaaactcaaaatttgcgcgaaattaaaaacgggcataccggatatgcgataaagaaaattagaatttataaaaatccgaggagtattaaaaacatcatgggattcatggacgatttgaaaaagagcgcgagcaaactcacgagaaagaacattctcgaagcgccctttgtgaaggaaatgtgcaagaccaccgccaatatgtaccgtcttggctgggacgaaaggaacggcggcaatatcagctatctgctcgacgaaaaggaagtggcggaatatctcgacctcgcggaagttctccgcaccattccgacgggcttcgacgccacggcgctcatcggtaagattttcatcgtcacgggcactggcaaatatttcaaaaacgtggagggcgatcccgaaaccaatctcggcatcatccgtatcgctcaggacggcaccacggcggaactcctttggggctataaggacggcggcaaattcacttccgagctgcccgcgcacctcatgagccacatttcccgcttaggcgtcgaccccgaaaacaggatcgtcatgcactctcatcccacgtatacgatcgcgatgaacgcggtgtgccccatcgacgaaaaggactttacgcatcggctttggcagtcgaacacggaatccatcgtcgtctttcccgacggcgtgggaatcctgccctgcatggtctgcggcaccaatgagatcggggcggctacggcggaaaagatgaaaaagtaccgcctcgtggtgtggacgaatcacggcatttacggctgcggcaaggacatcgacgaagcgttcgggctgatcgaaacggtggagaagacggcgcagatttatatgctcgcattggggcgcgccgtcaacgtcattcccgacgaaacgctcaaaggcctggcggaacgtttcagcgtaacgccgctggaaggcgttttgaaataaggcgggctgcggaggatgcgggaaatggagcgctatgcgtggagagcgtctgtcaagcccggcaaacaggcggaatatatcgaacgtcacaatcaaatctggcctcagatgaaagccgtcttgaaggaggcgggcatcgtcaattattccatttggctggcggacggcgaggtgttcggctactacgaatgtgaaaagggcgccgcatacgccgcgaaagtgcagtcggaaagccccgtggtggacagatggaacgagtatatgaaggacgtcatggagatggagaaggacgaaaagacgggcgcgcagcctctcctgcaagaggttttctatctcccgtaaagccctttaaagacgggaatgtttccctgcggcgctcccgcgtttgaagaaagagaaaccgtttatattaggggcgaaaggtcggctttcgcaagggagtcacaacgacctcggacagataaaatttttcgtttttctaaacgatagatcaaaaacaaaaataaataaaacaaggagatatcaacaatggcaagaatcgttttaaacgaaacaagttaccacggcgcgggctgtatcaaggaaatcccgggagaagtcgcccggagaggtctgaacaaggcgttcgtctgttcggatcccgaccttgtcaaattcggagtcacgaagaaggtgctcgacgtgctggacgaggcgaagatcgcgtacaccctgtactccaatatcaaacccaatcctacgatcgaaaacgtccagacgggcgtggcggcgtttaaggaaagcggcgcggacttcctcatcgccatcggcggcggttcttcgatggatacggcgaaagcggtcggcatcatcatcgccaatcccgaattcgaggacgtgcgttctctggaaggcgtagcgccgacgaagaatccttccgttcccatcatcgcggttcccacgacggcgggcacggcggccgaggtcacgattaattatgtcattacggatgtcgaaaagaagcgcaaattcgtctgcgtggacgtacacgacattcccgtcgttgctgtggtcgatcccgaaatgatggcttcgatgcccaagggcttgacggcttccacgggtatggacgcgctgacgcacgcgattgaaggctatatcaccaaaggcgcctgggagatgacggatatgttccatctggaagcgattcgcctgattgccgaatccctccgcggcgcggtcgccaacaccaaagagggcagagaggggatggcgctcggtcagtatatcgcgggcatgggtttctctaacgtagggcttggcatcgtgcactccatggcgcactctttgggcgccgtctacgataccccgcacggcgtggccaacgcaatcctccttcccaccgtcatggaatataacgctcccgcgacgggcgaaaaataccgttatatcgccaaggcaatgggcgtggaaggcactgaaaaaatgacccaggcggaatacagaaaggcggcggtggaagcggtcagacagctttccaaggacgtcggcattcctcaggatttaaaagccatcgtcaaagacgaggacgtggatttcctcgcgcagtccgcgatggacgacgcttgccgtcccggcaatcccaaggatcccacattggaagatatcaaagccctgtatcgctctttgatgtaattccatctcccgtatggctttttgaaatacgcccgctactcgggaaggcaaagttttttcgaaaaactctttttccaaagatggcaaagcgttttttagcggaataaagtaaaaagacaccccgtttccgatttgtcggaagcggggtgttatcgtctgattttttcgacggcgcgataaatcggctttttcgcgcgcagacaacgattatttggagttcttttccaaattgataaacgtctttgccatttcgatcttgttgatgcgatattcgaggaagctttgctttctccgctccttctcctgcgccatcgccgtttcccggcgcttaatcgcttcgtccagcttttcttcccaggcgagaaaatcgctttgcaaaacgactctgtcgccgtaaattgccaccatgccctcgcctgtggcgaaggatctgacggcgccgtccgcttccgtcagcttcgccatgtccgtagtgatattgatgaacataggcatatgcccgggcagaatggagatcctgccgcacggctccacgacggaaagctcgctcacttcgccttcgtaaaactgtttgtcggggcgaagcatcaaaagggaaaaagtcttcttcatgccttgtaccccgcaatgtcggtaagactgccgataaagtagaactcgctttcggggatgtcgtcgcatttgccgtcgaggatggcgttgcagtcctcgatggtctgctccaaaggcacatactttccttcgatgcccgtgtagaccgccgcgacggaaaagggctgtgagaaaaatctctgcaattttctcgcgcggtagacgagccgcttatcttccccgttgagttcgtccatacccaaaatggcgatgatgtcctgtaactccttatatcgctgtaaagtttcgatcgcccgctttgccgtggcatagtgcttttccccgacgatgtcgggttcgagaatgcggctggtggattccaggggatcgacggcggggtaaatgccttcttccaccaccttcctcgaaagcacggtggtcgcgtcgagatggctgaaaatcgtggcgggggcggggtcggtcaaatcgtccgcgggcacgtagatcgcctgaatggaagtgatggagccgtgtttggtagaggtgatccgctcttccagctgccccaattctcccgcgagggtgggttgatagcccaccgccgaaggcatacgcccgagcagggcggaaatttccgagcctgcctgcacgtagcggaaaatgttgtcgataaagaggagtacgtcctgattctgcgcgtcgcggaaatattccgccatggtcagtcccgtgaaggcggcgcgcattctcgcgccgggggattcgttcatctgcccgaacaccaaggcggtgttttgaagcacgcccgactccgtcatttcctgcgccatctcaaacccttcgcggctgcgctctccgacgccgatgaacaccgaacggccgttgtggtgggtggcgatgcctgagatcagctcctgaatcagcactgtctttcccacgcccgcgccgccgaaaagtccgatttttccgccttttgcgtagggggtgagcaggtctatgactttgatgcccgtttcgaaaacctccgtgacggggctttgctccgtcaaagcgggcgggtggcggtaaatggacatggcgggggcgccgaggccgcccttgccgtccacgggcttgccgagggcgtttaagactctgcccgccacctgatccccgacgggaacggagatgctcccgcccgtcgttctcacttcaagcccgcgcgagagtccgtccgtcgcttcgagggcgatacagcggcatacgccgcccggaagatgcgccatcacttcgagatccaccgtcctgtccgtatcgatgacgtataaaagctcgttttggttaggcaggtgattgtcgaattttacgtctaccaccgaaccgataatctgtacgactgttcccgtatgtttttttatcataactttaaaaccttcttattcgccgcggagggcggcggcgctcgcgttgatcagctcgcccgtaatgctttcctggcgctgatggttgtattttgccgtcagttctcccatcagttcctctccgttctccgtggattgacgcatagaggtcatgcgcttgaaatgaatcgccatagcgctgtccgcaagggcgctgtatatttccgccatgacgtattgcgacaaaaaattatccagcgcttcccgcgttctcggttcgaataccgcatcgctcaccgcagccctgcccgtcccgttttccgctttttccggcagaaggacggggagaagcttcttcgccgtcggttcctgcgcggagggggcgggggtgcgggtatagacgatataaacctctttgtactcgccgctcgaaaacatttccaacatatcgttggcgacggaaatcgcgtcgaaggcgtgcggctcctgcgccatatggatatagaaattgctcagggggattcctttcttttcgtagtgctccctggtttcctgtccgagcgcgaacactttggatacgtcgtgttcggcgataaacgcatcggcgaagtcgagaatgcgatgattgaagtccccgcacagccccttgtcgcccgcgacgacgaaaagcgccgtcttgccctctttgcggggccgaagaaaggggtgctcccgcacggcgtcctccgtttccacggcggcgagaatatttctcagctctttgaggtagcggtagctgttttcgcatttctccttggcgcgatagagcttggaggtggcgatcatctgcatggcgcgcgtgatcttcaccgtatcctctacgcccgagatatggcgtttcagctcgtgcgcgttcatgagggacctccgctctgcaaggctttgcgatcttcggcaatgcgcgttacgttccccttgtagacggcgaggtattctttgatcagctgttcgtcctcgtcggataactgctgcgtttcttctattctcgcggcgagttcgggatgattggcttcgagaaaatcgaaatagccctgcatcgtcatattgacgtcgcgcacggcgatgtcggcaaacaaatcgttcatcatcacggtaagcgcgatgacggtgtggctcatttcgacgggggacgcctgcggctgtttgaggatctccgtcagcctcgcgcccttgccgagaatggatttcgtcgagtcgtcgagttccgcgccgaattgactgaactgcgccatttcgcggtagtgagcgaggtcaaggcggactttgccgctgacctttttcatcgccttgcactgcgcggcgcctcccacgcgcgacacggacagaccgacgttgaccgcggggcgcacgcccgaacggaacagttcgctttcaagatagatttggccgtccgtaatggagatgacgttcgtgggaatataggcggaaatgtcgcccgccagcgtttcgatgatgggcagggcggtgagggagcctccgcccaatttatccgaaagtcttgcgcttcgttccaaaaggcgggagtggatatagaaaatgtcgccgggatacgcctcgcgccccgagggacgctttaagagcagggagatggcgcgataagcgacggcgtgcttggaaagatcgtcgtagacgatgagcacgtccctgcccgaatacataaattcttccgcgatcgccgtgcccgtgtagggggcgatgtattgaaggggcgcggattcgctcgccgtcgagcagacgacgacggtgtaatcgagcgcaccgtgctttttcagcgtctgtacgacggaattgacggcggctatcttttgtccgatcgccacgtatacgcagacgacgtccttgcccttttggttgatgatggtgtccaccgcgatggcggtcttgcccgtctgcctgtcgccgatgatgagttcccgctgtcctttgccgatggggatcatgctgtcgatcgccttgatgcccgtcaagaggggactgttgacgttggcgcggtcgaaaatggcgggcgcgggggcttcgacggggcggtattttttgctcgtaatgggtttgccgccgtcgagcggagtacccaggggattgacgacgcgccccaagagcatatcgccgacgggcacgccgatgattttgcccgtcgagtaggcgatgtcgccttcgccgagcgcataggagtcggtgaggaggatcgcccccaccttattttcttcgaggttcatcaccagcgcgtatttgtcgccgccgacgtagaggagttccccgttcttgacgttcggcagtccctctatcgtgagtacgccgtccccgcaggcgacgattctgcccgcgtcggagaggcggttttcgaattggaagccgcggacctcggatttgagttcttcggcaatcgagccgtaaacgctaatcgtttccatgggtaagcctttccttgatagtttccagcttggtcttcaccgatccgtcgtacaccgtcctgccgtcgaatacgacgagcccgccgatgagcgaatcgtccacgagatattccgccaaaatgccgcccttgtattttttacggaaggtgtcttccaccttctgtttctgcgcgggcgtcagttcgagcgcggagatcaccgtcagcttggtgaaggaggattcgtctttgccgtcaaagacgatgagattatccgtcaaagaggaatccgtccgatattcgacggcaaccttttccttatattgcgcgttgaaggacgccgccagtttttgctgttcctcttcggagaggggcgcgggcgtcgttacggtaagcttaatcattgccttcgtcccattcctttaagcagtcgtcgataatcttggcgttttcttcgggggtaatctctttgtcgaggattcccgacgcgatgaggacggccacctccgccacttcgcccttcatggcggtgacggctttcaccttttcccgcttggcttcctcctcggcgtccgacaatatcttttcggctcgccgctttgcctcttccagcgttgcttccgccttcttggccgcgtcggcgtccgcctcttttttcttggcggcgatatcctgttccgcggagccgatcagcgccgcatactcggtctttttttcctccgcctctttcatcttttcgttgtgttctttttcctgattttctatctcttcgcggcgggcgtgtacgaaacgaatgacgggcttatagataagacctcccgcgatagcgacgagaatggcgaaattgaggagatggaggagaatatccttccaatccagtcccaaaatccccgcaagtaagctgtttgacatatttcacctcgctgattaaaggacaaaaatgacgaaaattaccaccagcagcgcgtatatgatacaggtttcgaggaagacaagaccgatcatgagcgtcttaaagagctttttttccgattcgggctgacgggcgatgccttcgagcgctttggaaacggcgatgcccatgccgatggcggccgcgcctgcgacgaggatggcgatcgccgctgcgatggcctttgctcctatgtctgtcattgcgagtaatgctaacgtattcataagtattttctccttaaataatatttgatattgcgtatcggcggaagtttccgccccgatagttgccccggcaaactgttttgcgggaatttttgtcccgcattggtccgtctgaaaacctgtcccgccgaaacatctcgacggtcgcaagtcttaaacgtgtttgatttccgcgtttaaagttccccgtttcccgcgccgcttgtttttcttttcgagatcggcgcccgtcagcacccgatcctcgctcgcctccccgtaaaatatcgccgtaagcagggtatagacgtaggattgaatgacggcgtggaagagggtgaagatgacgcccacgattacgggaatgccgatggagagcgcgatgtaatgatacaccagcgcggtcatcaggagtccgccgatcatgctcccgaacagacggaaactgatggaaagcagcagagagaagtctttgaggacgctgccggcgccgcgcagcttgttaaagcggatgccgccgaacagcatgatgccgtaagcggtgacggcgagggcgatacaggcgttcagatccaccaaaatagcgcggatgccgaggatctcgcacagcgttcccagcccgatatacacccagctggcgaaggaaaacgcccccaaaaagagctggcttttcgagctgttgtccttgaccaagccctcgaccatttcgcacgccttttccagaacggcctgaaacccgccggggacttttttaaatctcgggaaaataaggaagcgaaacgcgagcgcgaagacgaggacgaggagagtcaagtaaaacgcggttttaaaactcggattgaccatcagcacatttccgaacaggctcccgaaaaggggcacaggctcgggcaggaattcttcccgcatcacgtcgcttacgctgcccgcaagcagcaaagataagttcataatacctccttttccgtttcttccgcgtttttgtcgtttaaagcggaacgcgcttcctttcggcgtatagcgagcacccacagcaggagcgctgcgaagagagcggaaataaataaaatcgcatattgcatcgcccaatcggtgaggaaatatcccgccgcgacgccgcagagaaaacaggcgatcaggagcagatattttcccgcttttttaagcgaaactttgtccttgtccgcggcggcggaaaagagatgtccgctcaaaagccgcaggttgttcgtgcagaataccgtggagaggggaacgccgttcatgtcccgaaacgcatgatattgcagcgccgccaccgacgagatcagcgcgttcggcagtacggtggggaaagaaacggggatacctcccacgacggtcaacagtaggatttccgccgccaggatgccgcagtggtagagaaaacgctcggtgtcgtcgggcatacctttgcgccgggcctttcttttcgccaggcggtaaacggcttctccgacgaaattggcgaggataaaaaaggcgacgggcacgagatatcgcaaagcgtttaagccttccccgcccgcaagccctatcgtcattaaaatcagatttcccgtctgcgcgttgcaaaagactttaccccgcgccacataggtgtaggcgtcgaaaaatccgcccgcaaaccccaaaatcagcacggcgaacggacgggtgaaaatgtcgggttttttgaagattgccttttcttccatattcttatatatgactccgcaaaaaaatttgccctgaaaaagacggcgcccctcatttccctcgcgggtattataccccttttttctcgttttgtaaaatggattaaagggtgatataatatatcaaaaaattatatctgtcatatcataaacgtatcgtaaagacttgacagaaaactcgcctcggcggtatactggtatgggacgaaaagaagggagggacgagggctttatgctaacaagtttggactattataggattttttattatgtggcgaaatatcggaatttcacgcgcgcggcggacgtgctgctgactagccagccgacggtgacgaggacggtgaaaaatttggaaaacgatctcggctgccgcctgttcgtgcgcaataaacgcggggtgacgctgacgtcggagggcgaacttctgtattcttatatcgcgcccgcgtacgagcggattttaaagggagaggaaaagctgggcggcaaaatctctctgagcggcggctgcgtgtacgtcagcgctacggaaacctcgctgcattgctttctcttggagaagttagggctttttcacgactatcacccgcaggtgcgtttgcgcgtcacgaacgtttccacctcgcaggcgatcgaaaacgtagtcagcggcagatcggatcttgcctttgtcgcttctcccttcgaaattccctccccgttaaaacagatgccgctcaaaccctttcaggatatattggtgggcaacgccagctatcacgaactgtcgcgcggcgcttacgaactcaaagacctcggcaaatacccgctcatttccagcagccgcaacgcgtctacgacgtatctgttttatcagggcgtctacgcggacgcggggctggaatttcatcccgagatcgaactgaataccgcagatcttatcatcccttttatccgccgcaacctcggcgtgggctttgtgcccgaggaattggcgctgcccgcgctgaaagcgggcgaaatcgtaaaaattaaattgaaaacggtcattcctccccgctggatctccgtcgtctataatccgcattatcctctctccgtcgccgcgaaagaacttctcggcgtggtgaagacgggcaaatgaaattttcggaagaaacgatttgaaaaggaagtacgaaaatgcagtatatatatggaaggaaaaaacgatataaaaaaatctcgataccttcggggcggactgtccaatcgtaaggatatccgagcctctatggaaataacgaaagggagcc

SEQ ID NO: 3485 - DNA, 3354 bp, Unknown
  16S sequences of unknown bacteria
gggctgcgccccgaacccgtggcttgtgcaggctccggggggtccgcagggcctgccgccggcaggcggccgcaggcggggcggagccccgccgaaaccgcttgaaaaggcggtttgccctgcgggccgtaggggcttttgctttaagcaaacctttgtgctgaatttataaaaatttaatatttgtccccttgcaaatagggaagaataagactacactaaatacagcgggttcctgtttccgacagagtttttcgcgccgggaatggggacttttttggcgtttttttgctcttttgggaggacaagatggtattttccagcctgctgtttgtgtttctttttttggcgctgaacctggtgagccaggcggcgctgcgcggcgcgcgacagaagaatattgccatgcttctcttctcgctggtgttcttcagctgggcgggaccgcggtatgtggtgctgctcctgctggataccgccctgtgctggttttttgctatctgcatcgagcgggagccgcagcgtaaaaagctgcacctgagcctgtgcgtggcgctggtgctgctggtgctgggcatctttaagtacacgggcttcctgatggggaacctgcaaagccttttcggctggccggaagtgatcccgcagatcgtgctgccgatcggtatttcgttctacactttccagctaatcagctatgtggtggatgtataccgcggcgaggtacgggcccagaagaaatactggattctgctgctgtatgccagcctgttccaccagtgcattgccgggcccattgtgcggtaccgggatgtggcgcaggacctggcgaagcgccaggtgcacgcggaggaagtgagccggggcatcagccgttttacggtggggctggccaaaaaggcggtactggccaattcggtggcggtgctggctgaccgctggctgcccatgaccaccgaggggctggcgaagattccgacggcgggactgtggctgggcgggctgtgctatatgctgcagatctacctggatttttcggcttattccgatatggccatcggcatggggctgatgtgcgggttccattataaggagaatttcaactatccctatattgcctcctccgtcaccgatttttggcggcggtggcacatttcgctttccaccttcttccgggattatgtgtatatcccgctgggcggcaaccgccggggcaaggggcggcagctcctcaacctgttcattgtgtggggcttgaccggcctgtggcatggcgccagctggaactatgtgctgtggggactgtactttttcctgtttcttgtcattgaaaaattcctgctgggggagaagcagcaacggataccggcggtgctgcggcacctcttcctgctcattattgtatacttctgctgggtcatcttccgcttccgcgatgcggcggcgctgggcatggcgctgcggggactctttggcggcgggacggctgcggccggtatggcggtgggcctcagcctgaagaataacattttcctgctgctggtggcctgtgtggcctgcacgccgctgacggcaaagctgtggcagcgctggaaggcggcggcccagggggacagctacaatccgttcctgtatttccagttctgaggaaagaaaagcctgcgggggaaaggcggggcgcagcccctttcggcgaagccgaaagccgcgcgcgaagcgcgcggagcccgtcctcagggcgggcgggctgcgccccgatccccgcggtttttgcggattggcggagatgcagggatgatttacccgcggtttgcagggaccggccaagactggaaaccggctttttaacgagccgataagcagggcagaaactatgcccccatacaaagtatgagcggggcgcgaaaaaggagggaacgggatgaagcaaacggatcgggagagcaggacccggtggataaaactgacggcgttctttggcgtgctggcggtgctgtgcgtcattggcatctttttgccccggcccaccgaaagtgagatagagaaacgaaagctgaccgagttcccggcctttacctgggaaagcttctggagtggaaagtggtttagcgggatagatacctggtatgccgatacctacccactgcgggagctgctcattggtgggaataaggtggtacagagcctttacggcatccgcagtgatgtgatagtgggcggcgaaaatcagggtgaggagattccggatatcggggaggggcagggagagctgcccaccctgccgaaagatgatcctgaaaataagaccgatgatccccagcaggataacaataccgagccgccccgcgatggtaatgtaaacgctgacggcgagatgatcagcgggattttcgtcagtgggaatgtgggctatggactttattatttccagcaggagaattccgactggtacgcggctatcctgaatgagatggataaacggctggcgggcaaggctcagctatacagcctggttgcgccgatcaatggcggtgtgctgctgagtgactccttgcagaaagagctgcacatcagcgatcagcgggaggccatccgatatatttacagccgcatggcggcggatatcaatggggtggaggtctttgacgcgctgcgggagcatgtggatgagtatatctacttccacaccgaccaccactggacagcgctgggcgcctactacgcctacacccagtatgccaaggcggctgggttgaccccgcacacgctggatcagtttgaacaggtggagttcccgaactttttggggacctattattcagtcagcggtatcacttcgctgggggccaatcctgatacggtgatcgcctacaagccgatgggcaccaacaaaatgaagatgaccatggccgatggcaccacctacgactggttcgtggtgaatgatgtttccggctatggcagcagcatgaagtacggggcctttgcaggcggtgaccagccgtacagcgtggtggaaaacccggagattaccgatggttccgcctgcctggtgataaaggacagctacggcaatgcgctgatcccctacctggtagatcactaccagtacctgtactggatcgatttccggtactacaagggttcgatttacgacctggtggcggaaaagaacatcaaagatgtccttgtactgcaacagatttacaatactggcgacagcggcgcgctgaagaaattgcaggcgctggtcgaacgataattcataatgatagaacccgccccggtgtggaagcaccggggcgggtttttgcgtggggagggtgggtgcaggggaaaggccggggcgcagcc

SEQ ID NO: 3486 - DNA, 10652 bp, Unknown
  16S sequences of unknown bacteria
agcccatgacggcgaccttgaggggcttgtccagcttgccgaggcgccgtgcgacctcgtcggcaatggggatgaggtcgacctggcagcggctgcacgtgggacacgagatgatctcgggcttgacgcggcgcacgtccacggcggccaagatgccgtaggccacggcaatctcctcgacggggtctgccgtgagcgacacgcgcatcgtgtccccgatgccgtgcgcgagcagcatgcccagccccgcggcggacttgatggtgccctgctggatgccgcccgcctcggtgacgccgatgtgcagcggcacctcgggcagttcgcgcgagagctgctcgtaggcggcaaccgtcgtgagcacgtcgtgcgccttggcggacacgacgatgtcctcgaactgccgctcgtggaagtgctcgacaaagccccgcgcggacagcgcgagcttctcagcctgcgtcaggtcgtcgcgtgccgcgagcgcatcttcgagcgaaccggcgttcacgccgatgcggatgggaatgcccgcctcgccggcagcgtctatgacggcgtcgacgcgctcggtcgagccgatgttgccgggattgatgcggagcgccgcggcaccgcgatgcgcggcgccgatggcgatctcgtggtcgaagtggatgtccgcgatgacgggcagtgggctcacggtggtcacctgctcgaaatacggcagcgacgcgcggttgggaacggcgacgcgcacgacctcgcatccggcgtctttcaggcgcagaatctggtcgaagttgccgctcgggtccagatgcgggccctcaccctcgtcgatcatggggacgttggtcatcgattggacgacgacgggcgcccctcccccgatcgtaacggagccgacctgcacgggacgggtcttctcacgtgctgcttgctgtgtcatggctaccctcctaagacgaagcggatgatgtcctgccggagcatgaccacgaacagcaggagcagcagggcaatcacgacgacgctgataccgttgatgaccttgacggggatatcgcggccgacgatgcgctggatgacctcgaccacgatcttgccaccgtcgagcggtgggacgggcagcaggttgacgatgcccagcgacagcgagatgacggcgaggatgtacaggagcggcacgatgccggcagacgccgcgcgctcggagatgacggcgatgccgacgaccgaagtcgactggtcgaggacctgcgccgtcgtggccgggttgaacaggttggcatacgcctgcaccgtgagcacgaggtagtcccacgacgccttgagcgagtcgcccagcggcagacgaacctgcgtggtgcccgcgtagatgccgaactgcggagcgccctgctcgctggtactcacggtaagctgcgcatcatgcaccgcgccgtcgcgctcgtagctgacggtcaccgtctgccccggcgagaactgcgagatggcctgggcgagcgtcgtccaatccggggtatcggtcccgtcgatggcggtgatcgtgtcgcccgcctgcaggccggcctgggctgcggggccgccgtcggccacatcggagatggtcgtggtcgtctgcgtcacgccgatgccgctgaacagcacgagcatgatgacgaaggcgagcacgacgttcatgagcggtccggcgaacagcacgacaaggcgcttccagcacggcagcgagcggtacgtctgcgcacgctcggagtcgagcagcgctttggggtcggcgacttcgcgtgcctcgccgagggcatatgcgcccaccttgggcgccgcgtaggcctcgagcttgttgctcctgcccggtgcgtttatggaaccccagccgtcgaggacggcaagggcctcttcggcctcgtcatcggtgatgccgcacgccaacgcgacatgctccgcatcggccgtgccgtgacggtacacgtaggcgagcacctgctcgaggttggggtcctcgggccccggctccatcccggtgatgcgattgtagccgccaagcgggatgcacgtgatgccgtagcggcagccgttgcgctcgaagccgatgttggggcccggcagcccgatcatgaactcggtcacgcgcacgccgaacgcgcgcgcggcgatgaagtgcccgagctcgtggataacgacgagcaccagaaggacgacgatgccccagaacactgtcatgacgacgttcatgaactacctagtcctcgaaaaactcgtgggacagcgcgcgagtacgggcgtcgatctgctcgagctgctcgagagactcgactttctcggagcccatctgctccatggcgtgctcgacgcaggcgtcgatcgccgtgagcgtgcaggcgccgctcaagaagcgggcgacggccacttcgtttgccgcgttgaggacgcagggcagcgtgccacccgtcctgcccgcctcgagcgcgagcgccaggcagcggaaggtctcgaggtcggggtcgaagaactcgagcgcatgcagctgggtgaaatcgatctgctgggccgggctcggccaacggtgcggatagctcaaggcgaactgtatggggatgcgcatgtcggcgacccccaggtgcgccttgacggagccgtccacgtactcgaccatcgagtgcacgcacgactgcgggtgcacgacgacgcgaatgtcatcgacgcccacgccgaagagatggtgcgcctcgatgacctcgagccccttgttcatgagcgaagccgagtcgatggtgatcttggggcccatgttccacgtggggtgcgagagcgcctggtccaccgtgacctgcgaaagcttctcgcgcgtgtagccgcgaaacgggccgcccgagcacgtgagccagatgcgcgcggcctccctcgggtcttcgccgaggtagcactggtagatggcggaatgctcggagtcgacggggagcatggtctcgtgcgtggagagcggcatgatgaggtcgccgcccacgacgagcgactccttgttggcgagcgcgagctttcgtccggacttgagcgtgtcatacgacgcgcgcatgccggcctctccggaaagcgcgttgagcacgaggtcgacgtcgtcgagctgcgtcagacgcgcgacggcttccggtccgaactcgacggtgacgtcggggtcgagctgggcgagcgcgggcgcgtctttgacgctgctatcgcccagggcgacgtgcttcacgccgaactcgagggcagatgccacgagctcgtcgacgcgcctgcccgccgcgagggcgacgatttttaccttgtccggatgcatgcgcgcgacgtcgagcgtctgggtcccgatggaacccgtggcacccaacagcgcgactcgaatttgactcatagagcaaaccccaagatgttgaagatgtacggtgcgccggcgaccatgccatacgagacgacggaggcgaacagcaaggagtcgctacggtcgagcatgccgccgtggcccggcatgatatcgccggaatccttggcgttgaacccgcgcttgatgtgcgattccgtcaggtcgccgataacgctgacgatgccgaccagcaggcccgatatggccgcccacgcatagccgaactggcaatcgggcaagacaagcggcatgaacagccaggcgatgacgctgccggcaagcccgaagaagaccccctcccacgatttcttgggagaaatcttgggggccatcttgtggcgtccgaaggcagaaccgcccaggtacgcgaacccatcgttcatccacaccgatgcgagcacgatgaagccgcagatgccgccttcgatacccgggtaataaccgcgcagcaggatgaacgacgagagcagcatgcccgtgtagaacagggcgaacagcgtgatcgccacgtcgacgatggtgtcttcctcgtggatgaagaagcgcaggagcatgaggatcgccgcgcaaaacgcgacgacgagcccgccgaccaccacgtgctcgctgcccgcggcaaggcagaacgcgagcgggatgagggcggacgaaagcgtcccgatgatgatgtatggccgaaagccgttcgtgcgcgccatgcgcaaaaactcgtagcagcaaagcgatgccatgatggcgaccacgatgacggtcgtgtaccacgagacgatcgtgctcaccgacacgatggccacgtacacggcgcccacggcgaggcgttttccgaggtcctccctgttgatcgccatggccttacgcctccctgccaaagcgccggttgcggttttggaaggagatgagcgcacgggcgagttcgtagcggtcgaagtccggccacagcacgtcggtgatgtagaactccgtgtaggcgaactgccacagcaggaagttggacaggcgcagctcgccgctcgtcctgatgcacaggtcggggtcgggcatgtccgacgtgtagagcctgctgccgataagcgcctcgtcgatgtcgtcgggcgacaaggtgccggcagcgacgtcggcggcaatcgacttgacggcatcggttatctcgagacgcgagccgtagttgacggcgatggcaagcgtcatgccggtgttgtttgccgtgcgctttgccgcctgcctgaagatcgtgcgcgtcgtgagcggcagggcctcgacgtgcccgagcagctcgatacgcacgccctcgccgtcgaggccgtcgatctccttgcccatgaccttcgcgaacaggtccatgagaccggttacctcggtggcagagcgcttccagttctcggtggaaaacgagtagatggtgaggtagcgcacgccgacgtcattgcaggtcgtgatgagctcgcgcaccgccttgacgcccgccttgtgcccttcccccctgtcgaggccacgttccgtcgcccacctgccgttgccgtccatgatgacggcaacgtgctgcgggatacgcgtcagatcgagcgcccccacatcaaggtctgcagggggctcgggaaagatctcgggaagtgttgtcggtcttgcgctcaagctagatttccataacctcggcttctttgaccgcgagcatgccgtcgaccttcttgacgtactcgtcggtcagcttctggagctggtcttcggcgcggcgcatatcgtcttcgctgatctctccttccttcttggcgcgctcgagtttgcccttggcatcgcgacgtgcgttgcggatggcgacgcgcgacatctccgccgcggcacggcagtccttgacgatctccttgcggcgctcttcggtgggcgcggggaacggcaggcggatggtgcccgaaccgtcgttgttgggggtgatgccgaggttgctggccagaatcgccttctcgacggcattgacgatgcccttgtcccacggctcgatggtcatgagatgcgcctcgggaaccttgatggcggcaacctgcgtgatcggggtagggacgccgtagtactcgacggtgatctcttcgaggagccccgcggagggacggcccgtacgaaggttcagaaactcgtgctcgagtgccttgagggccttgttcatgctctcttttgctgcatcgatttcagacatctgctgtactcctcgttagctcacgatggtaccgacgtgctcgcctctgagcacgcggtcgatattgccctgcttgtgcaggttgaagacgataatcgggatgttgttgtccttgcaaagcgacgtcgccgtagagtccatgacgttgagctcctttgccagcacgtccagatacgagatctcgtcgaacttctgggcgtcggggttcgtgcgcgggtcgctgtcgtagatgccgtcgacctgcgtcgccttcaagatagcttccgccccgatctcgcacgcgcgcagcgcggcggtcgtgtcggtggtgaagtagggattgcccgtgccgccggcaaagatgacgacgcgccccttctccagatggcgctcggccctgcggcggatgtagggctcggcaacttcctgcatgttgatagcggactggacgcgcgtgtcgacgcctgtgcgctcgagcccctcctgcagggcgagggcgttcatgaccgtggcgagcatgccgatgtagtcggcctgcgcgcggtccatgccctctgcagcgcccgccaggccgcggaagatgttgccgccgcctaccgtgatggcgagctcgatgccaccgtcgacgatttctttgatttgcccggcgatctcggtgatgaccttggggtcaatgccgtagccctgctcgccctggagcgcttcgcccgagagcttgagcaagacgcgcttgtacttgtagtcgctcatagccgcccttcccgttgctgtcagatgagaggtttacagacgctccacgaaacgcccgtcgcgggtgtcgaccttgacgtggtcgccgatctcgatgaacagcgggaccttgagctccgcgccggtctcggcaacggcgggcttggtgccggactggacggtgttgcccttgaagcccggctcggtctcggtgatctcgaggtcgacgaacatgggcggatcgacgctgatgagcttgccgtcggcgtactgcgccaggcaggtgtcgccctctttcagccagacgatcttgtcgccgagcatgtctgcgggaacctcgggctgctcgtaggtgacgggatccatgaagtagtaggtctcgccgtcgttccaggagtactccatctccttggtctcgaggcggatgtcatcgaacttgtcgttgggacggaacgtgtactcgacaacgcgaccggtgttgatgtccttgagcttggtacggatgaatgcaccgcctttgccaggcttcacatgttggaattcgacgatcgtgcaaagcttgttgttgtacttgatgcacatgccgttcttaaagttcgagggctgtacgctcacagctatcctgcctttctctagatataaactttcaatattctactctacgacgacaagctcgtggctcaggccgcagaaattcatataaccatctgccgtcacgacgccgcagtcctcgatgcgcacgccgttttggcctgcgatgtagatgcccggctcgtccgtgacgacgttgccggcgacgaggggcttgtcgtagcgcggcgacagcagcggcgcctcgtgaatgtcgagcccgacgccatgtccgagcgcatgccccatcttgccgccgaagcccgccgcggcgagcaccgcctcggcaaccgcgtgcatttccgcgccggtgacgcccgccttgatggagttgcggacctcctcgttcgcgagcttgaccgtctcgtagatgcgcagctgctccttgctcggctgtccgatgcacagggtgcgcgtcgtgtcggagcgatacccgttgaggcgcgcgccgaagtcgaccacgacgaggtcgccgggttgcagggtgcgatcgcccggtaccgagtgcgggtttgcactgttggcgcccgaggcgacgatgtttgcaaacgccagctcgtcggcgccgtttttccgcatcgcaagctcgagctcgagcgaggcgtcgcgctccgtcatgcccacgtgcagcttgcccacgaactcgaggaaggatttggacgcgacctcctgcgccgccttcatgagctcgacttcctccggctccttcacggcgcgcagcgcaaggatgtcgccatggccctcgacgaattcgaccttggggttctcctcgacgagcgcacggtacagggcaagcgagatgtcggtgtcgatgagcaccttgccgccctgcagacccgcgccctgcaggaaggcagcgacgaactttgccgccgacacgcgctcgtcgtcgatctgccagatgccctcgtccttggcgcgcgtgcgcatcgccgtcgagtagcgcatgtcggtgtgcagggcgcacgcgtcccgcgtcacgaccgcgatatgggcctgttcggtgtcgaagacccgctcgaagccggtgagccacatgaggtcggtcgtcgagcgggcgatgacggcgtcgaggccgcgttgttccatgagcgcgcgcaggcgctcgatgcgttttgcaactttcattgtgcgagatgctccaataccaagtcgaccgcgcgcagatagcctttcttgccaagccccttcacctggccgatgcaggcatcgaccagcacggacttgctgcggaagtcctcgcgtttggaaatgtccgatatgtgaatctccaccacgggcacgtccacgctcgtgatggcgtcgtggatcgcgtagctgtagtgggtgtaggcgccgggattgaacacgatgccgtcgtagacgccctggctctgctggatcttgtcgatgagggcgccttcgtggttcgactggtagcagtcgagctcggctccgcgctcccgggcgtagtccatcaccatcgcctcgatgtcggcaagcgtcgtggtgccgtagatctcgggctcgcgctgccccagaaggttcaggttcggcccgttcatgagcagaagccgcgtcatttctcgccccacatcttcccgccgttcttctcgatgaggcgcgacttggccatgcaccacgcctcgaggtgcgagatgatcgtgtcgtctgccaccggctggaccttccagctggttatatcatcaagaagcacgaacctgatctggccgccgcgcgccttcttgtcggtcttcatgatcttgaacaggcgctcgggcggtgcgacccaggggatggcctcgagcccgaggctgtcgagtagcttgtcctgcgccttgacgattcgtgggtcgagccccagcacctcgaccgagagccgcgcggcaaatcgcatgccctcggcgacggcacgcccgtgcccgatcgtgccgtagccagcagccgcctctatggcatgcgcgagcgtatggccgtagttcaggcactcgcgggcacccgcctcggtctcgtcggacgcgacgacacgcgccttgaactgggcggtctcgtagaccacctgctcgagcagcccctcgtcgtgctccttcagaccggcggcgttgttgcgcagccactcgtaaaacgagcggcgcggcgcgatcatcgcgctcttcgcgatctccgcgaagccgtttgcccagtcctcgtctccgagggtcttgagcgtgcggacgtcggagcagatgaagatgggctggtggaacgtgccgacgaggttcttgccctcgggcaggttgaccgccgtcttgccgccgatggacgcatcgaccatggccagaagcgtcgtgggcacctggatgaagtcgatgccgcgcttgtaggtggacgcggtgaaccccgtcaagtcgcccacgacgccaccgccgacggcgaccgccaaatcgtcgcggccaagctcgtagccggccagcgcgctccagatctctgtcgcgagctcgatggacttggactcctcgcctgccggaacgagcaggtcgtaggtctcgaagcccgcctcttccaggcgcttcttcacgagcttgccgtaggcgggccccacggtggaatcggagatgacgaccgccttgcgggactccttgaggctgcgcgccgtcgagcccaccgccgtcaacgcacccttgccgatgcggatctcgtagcggtgcccgctcggcagcacgacctgaatcgatcgatcgttgctcacagcaacccccttttgtccagttcccttctgcacaacgtcgcgacgcgctggacgctcagccccgacgtgttgatggtgatgtcggcgacctcccggtagacgggcagccgctcgttgtagatctcttccacgggacgcggccccgacagcatcgggcgcgtctcgggatgcgtgatgcgcccgacggcctcctcgacgggcacctgcaggtagaccaccgtgcccagcgccttgagtatggggcggttggccgggttgcacacgagacgatcgagcgtccctcgtagcgtatgccctcgagcgtgtgcgtctctatcctgcgaaagccctgctcgccctcttgcgcgaagatcgcggggattttacggtgctggagcgcctcgatgcgctggtcgacgtcgatgagcgacagccccgtcatcgaggacaggcgccgcgagaccgaggtcttgcccgagcccatgaagccgatgagcaggatatggtcggtgcagatcgcgcgttcgggcatcaggagagcctcgcgaggtaggcgtcgcgtgcggcgaggatgtcgcgcacgcagtcgtggccgaacttgtccaggtaggcatccgccagcacgaacgcaacctctgcctccgccaccaccgatgcggccggcaccgcgcaggtgtcggagcgctccttggaggcggcagcggcctcgtgcgtgtcggtatcgaccgtggcaagcggcgccatcatggtcgggatgggcttcatggcaaccgtggcgatcaggggcgcgcccgtcgtcatgccgccttcgaggccgcctgcgttgttgctcgtgcggtagtacccgcgcgcgtcgtcgtaggcaatagggtcgtgcaccttgttgcccggcaggcttgccgcccgaaatcccatgccaaactcgacgcccttcatcgcggggatggaaaagagcgccgcgcccagcttggaggtcaggcgctcggggccgctcgtatacgagccgagcccctccacgagccccgtcacgatgacggtgaactctcccccga

SEQ ID NO: 3487 - DNA, 32759 bp, Unknown
  16S sequences of unknown bacteria
tcaggttgctgacaaagtgcggggtgcagggggatcatccccctgccggggtttggggcagagccccaaagccttatgccgcagcatttttcgtgagcgttgcgagcgtccaaaggacgcaagaaacgcggctctttccaaaaccagggttttttcaacggtctgaggtgcgctgcccaaaaccgggcagcgcgccttttatttttgcttctcgtttgcaggaaacgctgtccctcctgcacccttcggagcgcgcaacgctcgccaaagtggtgcggctaaggcttgggcaccggagggaagcaggggtcctgtaggcccgtgccaccgaaggtgacaatgcgacccgaaggggagcgaaacgagccgagggtccggccagccttccgtgccgattgagcgaacgggaatctgctccaaacgccgccctttgtcagcattcctgaaagacagcaggcggaggctgagcgggttttccgtcaagacgggcgaggcgttgccgcttcagaaccgcgccgcacagcaatttgctcacgtttcgttcgtgcggcgaaggttcctccgcctgagcgacagcgccgccagcaccaacgacagcaccgccatcagcgcccacaggccgggcatgctttggtcgcctgtcagcggcagctgcgtgacacgaaggatggctgctgcggaaacaatctggtcaaagttcccgtcggtcacaatgcagcgcacctgcagaccatccatgtcataggtcgctgtcagaggcagaactgcttcccgcgtccctgccacatccgtccatgcgccggtttctcctgtgcgatctgccagcggtaggcataggggaatgcgccgacggaagcctccacttgaaactgtgccgtttctcccatgagcgccgtcatatcggcgggttgacgtacaaagaccagcggttcctcacgcagccgaatgacaaagcgattgtcggcgacctctgcctcctggtagtcctttccggaaatctccaccgtcacctcggcggggtcggaagcgcccgccagccatgccaccgacagcgtgatcgtgtgcgtgcgtccgtccacaatctcctgcgggaacacatagcggaaggtttccgcttcttcatcgccgtcagcccatgcgcgcagggttacgccccctgtgcgcgagcttcgtccgtctgccgccgcgcgattgaggatggtcatctccagcatgcgctcgccaccgcgtgtaaaaacgcggtagtccagttccaggtcctccgcagaggtgtccaccgtttccgagtcaaaggtgatatcgttgctcagggaatatgggactgcactgcttcgggcagaagcaggcggtgtaatctgcacgctgccgtcctccatgtgatgctcttacctaccgtctcggaatagggaagacccacgtaggcgtcgacctccagactgggcttaaggtaatatccgtccagcttcttttcaatcgtcgggtaagcgttcaaaagcggctccggcctgacctccggcacgccccaacggcctgcacaaagaacagagatgcatagcagccgtccgcagccgtccgacgcgggttcgcaggaggagatgcgttggccgtccgcataggtggttgtgcgctctgcaaaattctcggttgacagcacggccaccaccgcgccggacaggctgagtccggctgccggggcaacgtcgaaagcgtaatcccggcgatccctggccgcctgggagtatcggttttccaaggtgccggtcgccccggtggaaaggttgatccacgtcagccgcatttcgtcggcaagatagaagccgtatacatctccgcccagctcggcatatttcatctcgggcatgctcatggacaggggcgtttgcgtctttttggtcacgtttaccagcaggtcggggttaagggcggcgccgttgaaggtttccgtctcttcctgcgaagacatcagcgagggtgcggacgtcagggcgcgtccggattttccgcgcgaatcatagagaggaatgtcgccgctgttccagatcgtaaacttccactttgcaaagaagatcttcaccagcagataggcgccgcctccggccgaaacgcgcagatactgatccccgccggtcagcatgaccaggaagctgatgtatccgtagccgttgatgctgatgctcggcacgtttttggctccgatccccgccgcaaagccgatctgcagccggatcatgacggacataccgctggtgccggtatccagcttcaaattgtggaggctgggccagccgttgtccttccagcttacgcccatttccacgcccagcatgccagccgccgatacggacagagacagacccgcgctgaggaaaaaggcgctgatctgcgtggtcatctccacaccaaaggtggcggtcgcacccagcatggcctgcccacggatggaactcttcctgtcgctgtccttgaggtagcgcccctgaaggacgaagaagaacccggcctccgccgtaaagctgcccaagaactgaaaccgtttgctttcctgcccctttcatacggcctgcgccttggcaaactgcttggcgaagtagccctctttttccacttcgcgctggcgcttttccaggtcggcctggtcctgtgttttccacaaagaggtatcgtctgtacccgcgatatccttcatggcgatgcccatggcaaaataggcgctgccgtccagattgatgccgatttggggaatgtacttggagggcaggtcgaagccgatggaggacactgtcagaaagctgggcaggcttgaaggaagggtgaaccccagtccgcccagggacagaatgctgctcatggctccgctctgatcaaagagcgggccatccagcacaccgcgctgtaccatcagctgggtatcgaaggtctgactggttccatccccggcggtcaggcgcacgctcacctttgctccgggcttgaatttgcggagccagtcgcccttgaagctgaaaacctgatttttgcccgctacgcccgaataggagccgccgctggccgcctttccgtcggtggaaacataggtcagctcgacggtaaacgtcccctgcgcggacacctgcacagacagatcctgtgacgcgtcgttggcagggctgtagtatacgccaagctcctgggcaaaagcgtccttgccgttaaaggtgatggaagatacatagggtgatccgtcgtcagcgatcagggtgagggcgctgaatacgccgccctttttcacggaggttttggccacgaagacgtcgcggtaacccgccttttccacgcggatgctcacattcatgtagccgtcgctgtcgggtgaaaagtccttgacggcaaaaatggcatggccgctggtatcggtaagcagggtttttgctgcaccgcccgcatccagatcggccactgtgaccgtgactccctcggccgccgtgtggtcaggcagggagacgcagatgccgaaactgttgtcgttaagcacggtgatcttcatgtcgggctcggccgtgcctgcggacagccgctgcatgcgggtggaggcggggacgggaatgcccagtgcatcccgggaaagggccctttcctgtacgggagagggctgcagcagctgcgtggtcagctgggacagatcgctggcggaggcacggagctccgtcgtgccggcacccagcagcgcgcgccattcggcaaggctctgttcccaggacgggtagtgctgcaccacggcgggaatgatggcgcggatggtttcggaggcttccctgatgctccggccgtactgaatgcgttccttttcggaatattccgcgttaaaaggcgcgttgcggttggtgtagatgtaatcgctctgcgccacaagctcgtcatgatcgtaggaaagatcgtccatcatggcacgcgggttggctgtgaggctgtccagctgggcaagcgccccattgccggacgtgagctcggcgtagcgctggggatcgctgagcaaaaggtcggccagggctttttccacgtcctgcgccgtatccatcaggcccttgagatcatgctcgatcagccgctccaggtatccggcaatctgggcggcgttcatattctcgctgggtgtcatgccgtcatgccagccggcggcgtcctcgtcaaggccggacagcgccaccgccgcctccagctccgcctcagaaatcagaaagcgttcgccgtctgccagcgcttccagtggcagcgcctgcagaaagagcagcgcggaaagtgccgcggccaagaatcgcttgaacatgtcctgcctcacttcacctttcattcgtcgctggagagcaccgagaaatccgtaacgatttcatagtccgatcgccatgcctgcatcagcgattcgagcttttccagctgcgcggcttcgagcgcggaattctccagggcagcattttcctcctcggtcagcacatgcgcgccgcccggctcatcgcccatgtatttgatgatgtgtacgccggccgtggtcagcaacgggccgctcacatcgcccggttgctcgagcgccgcggccgccgcccgaaacgcctcggcccagttttcgctctgcgggtgaaacaggaagccaggatcttgtacatcctgatgcgtggaatcgatgctgtattccgccatcagggcttcaaagctctcgccctgctccagacgggcggcaatctcctgcgtcttttctgcaagcgccggcacagcctcctggctcttggcgccgtattcctccaagagtgccgtcacattcgcatcggcctcatcataggcggccttgtagggggtgatgtccaggccatccgccgcagcccttgccagtgcgtcgtaagcctcgtccttgaccgcctgcgcctgctgtgcgcgcgcatcgatctgcgccagcgcctcggtgatttcctgcggataggccagcagaatgtgcttgatgcggcggtacccctccggcgtatagaacgcctcgttgcccgccagcaggatctccgactcataaagcggaatatcgttttcatagcgcagccggtccggactgacaaaggcgtccggataatactgcaaaatctgagcaggggtgacggttacatcgccgcagtagagggccaggatgcggcggtaccgctcggaggccagcgcttcctgataataggcgtccacggtgtagccctgctcctccagccattggctcacctgcgcttcgctgacctcttccccggatgcggtcagttcctgatacaggccctgccatacgctctcatacaggttttgggcataggcacgcaggctttgcgtctgttcctccgtgatgatgtcctgacctgcctcgcggagcttgttctcaatcagccccagaccgatgaagtggtcaatcgtatccgccgccagctgctcccggtcggcctggctcagctctatccccatggcggcatagtaatccagcgcggattggtaggaaaaccgcaccacctcaggcgaataggatacatcgcccacacgcaccgcggggagctcctccgcctgcgcgaaggatagcagcaagagggtcaccagcatccagcacagcgtcgttttcagcttcatttcttttgcattctccttgttttccgcaaatgagtcaggcttcttgatgagcgggaaagaaacccgtgatgtaaattgaatgataatctttgtgaacatagcagatttcaccactttgcaccagtgcctttttaaactcttaactataattgtaatgcaatttacatacgggcagaccgggatggcaggaaagcggtggatagtgtccggccggagtttgccgggcctttccgaaagagcaaaacatctgctggcacgggccctgtcgcgctaacagctgcttcctgtgcaggcgtcgcaaccgtcccggggagaacggctgccaaatgcggcaacaggacttcctgcctccaatgaccggtacacctcgcgacgacaaaaggaaaataattgaagggaaccataggccctgccttgcctttttcctcccgccgtgatacaatcaccccatcaggaaggaagtgaagacgatggattccatacgcatcgtcgtgattggcgcgggcgccatcggcggcgttacggcggcgctgatgaagcagggaggaagcgatgtgacgctggtgtgcaagcatcaggagatcgcggatatcgcctccggcagaggcctgcacatcacgggcgtaaggggcgagcacatggtgcacctggacgctgtggccgatattgccgaactggacggaacctatgacgtggcgctgatcgccaccaaggcctacgatatgcccgcctgtgcgcgggcgctgttgccctatctgaaagacaattcgctggttctgagcctgcagaacggcatttgcaccgacgcgctggcagccgttgtaggcaaagagcgcacagtggggtgcgtgatcggctggggcgcaaccatgctcgggccgggcgagctcgccgtgaccagcaagggagagtttctcatcggacgcatcagcggcgatcaggaggcgctggaacctatccggcgcgccatgaatgcagccgcaccgacggtcattacgccggatatctatgcggagctgtattccaagctgattgtcaacagctgcatcacctcgctgggggccatctgcggcctgtatttggggcagatgctccgcagaagccaggcgaggcgcatctttctgggcatcatccgcgaggcgatggacgtggcgcatgcccagggcctgaaggtgccgccctttggcggaaggctggactatgacaagctgctggcgggggatggagcgctggacaatctgcgccggcacgccatgatcctgctggtggggctcaagtaccggcggctgaaaagctccagcctgcaatcgctggagcggggacggcccaccgagattgactatttcaacggcttcattgcgcaaaaaggcgaggaactgggcgtggattgccccatcaaccgtcgcttgaccgtcatgatcaaggaaatcgagggcgacaagcgcagcatcaaggtcgccaatctctacgatcctgtgttctgtgcgcaaaagagtgcgcgtcacagcgcaaaggcctgatcgcaaagcaaaaagaccgcttcggaaggaagaaaacctcccgaagcggtctttcttgaagggttacgcgtcgcggtagccgttggggttattgctctgccaacgccaggaatcgcggcacatgtcgtccagcgtcttttccgcctgccagccaagcagctctttggccttggtggggtccgcgtagcagcgggccacatcgcccggccggcggtctacgatgacatagggaatccggatgccgttgacacgctcgaaggtattgaccagatccagcacgctgtatcccgtaccggtaccgaggttgaacacctcgcagccgctgtgctgcatcagatagttgcaggccgccacatggccgcgcgccagatccaccacatggatgtaatcgcgtacgcccgtgccgtcatgcgtgggatagtcgttgccgaacacgcgcagctgctggagcttgccgctggccacctgggtgatgtagggcatcaggttgttgggaatgcccacgggatcttccccgatgaggccgctttcgtgcgcgccgatggggttgaagtagcgcagcagcgccaccgaccagtcgggataggcatgcgccacgtccttgagaatctgctcgatcatgtacttggtccagccatagggattggtgcatccgcccgtatgcatggtttccaccagcggcatctcatcagacataccatagaccgtcgcggaggagctgaacacaatgcgcttgacgccgtgcttgcgcatcacctcacacagggtgagggtgctgtccaggttattgcggtagtattcgaggggcttctccacactttcgccgacagccttgtaccccgcaaagtggatgaccgcgtcaaaggaatgggaggcgaacaccttgtccagtccggcggcgtcggttacatccacgttatagcagcacacatgctgcccggtgatggttttcaggcggtcgagcacatgctcgctggcgttgtagaagttatccacgataacggcctcgtggccggctttgagcagctccacataggtgtgggaaccgatgaagcccgcgccgcccgtgagaaggattttcatgaagcgcacgttcctttcctgttcagttaaaacagcttctcgggataggtgccgtcctcgtgcatctttttgagctcggcctgcacatagggcttatcctcgtggtaggtcacgccgaaccacaccgcgtcggtagaaagcacatccaccttcaggccgtcctcgtgcatgagctggtccacgagcacgggcagcacatattcggccttgagctcggtgggggagaggctcttgaggaaagcggtgaagcgctcctcagccttatcaaacagccagggcgtgaagccgaagaagttcatgctgaccaggctttcgggattgagaatgacgccgtttgggtccttctcggtatcgcggatggtgccgtcggggaagggctggatcttgtaggtttcggtcacggaagtcaggtggccgttttcatccacatcgcacacgccacgggtgacatggccatgctcgctgacggtgtttttcagatagtagcccaccatgcaggcgtgtttttcgggagcgagcttttccagatggtccaccatggtcttaaaggcgctggtgccatagtaatcatccgcgttgatgacggcgaagggctcgtggatcaggtccttggccgccagaatagcctgcaccgtgcccaggggtttggtacgctcggcggggatggagcagcccgcaggcaggttgccgagctcctggaaggcgtattccaccttcacagtgcccttgaccacgtcgcccaccagttcgcggaagcggtcctcaaagtcatgcttgatgatgaatacgaccttgttgaaccccgccttcacggcatcgtagatggagtagagcatcagcacctcgttatgaggacccatgccgtcaatctgcttgtttccgccgtaacgcgagcccataccggcggccatgatcactaaggttttatccatgttgatcaatcctttctcccgtatctgtttatgctcgacccgtcttacggcgggggaaagctggcttatagcgccgtgcgcaaaggctgtttgcccttacccctgcgggaaccggtcttttttccccggccgcctgaggccggcccggcaagggaaaccggccggggttccacgcgcatctccgggcagtctacaggcttgtcctcaaagccctctgtgctgtcgcggcggaaaaagaccgtcagggtgcgcagcatgagcttgaagtcgtaggaaagggaaaagttttcgatgtagaggaggtccaaaatcgccttgtccttgggactggtattgtacttgccctcgatttgcgcaaggccggtcagccccgccttcatctgctggcggtaggcgaattcgggtacctcgcgagtgtagcggtccacattttccagcatctccggacgggggcccacgatgctcatgtcgccgcgcagcacgttccacagctggggcagctcgtcaatgcggtacttgcgcaaaaagcggcccaccggggtgacgcgcacatcatccttgcgggcggaaaggcagttttcctcctcgcggttttccggatacatggtgcggaacttgatgatctgaaagatgcgcccattgatggtggcgcgatcctgccggaacagcaccgacccgttgccgctggctttgagcacgatggcggtggccagcatgacgggactggtcagcaccaggccggccatgctgatgacgatgtcgcacgcgcgcttgagaaacatctgcgtaagggtaagctccatgcggtggatgaacagaaagggcgcgtcatccagaatgttttgctgggcggtggagatgaccacatcctccagctcggccaacaggtaaatggttttgttgtgcttgtagcaataggcttccagcagggcttcctccgtatcgggaatgcccgccagaaataccacgtcgtggtcctgaatggtctgctttacgtccgggcattcgtagtggaccacgtcggtcagccggtagcgctggcgaaacgtggccattttggaggctacgtgctcagccagctcctgggaagacgcgacgatgcagcagtccagcggcggattgatgcggaaataataccggtagccgagcgctacaaagagatagatcatgagcagctgcaaaatgaaagccccgaacagcagggccaggtcctcgccccagaaggtaaagctggggttggcatccgggttgttggggttagtgttcatgatctgcagcatcacataggtgatcagatctgtaaaaaacgtggccagcgatatgctggcaaagacggaccgcatttttttgacgccgatctcatagccgccatacaccacgctgaggagcagcatggtcagcacaaacgtagctatcgtggtgccggcggtacggctgatgttcaaaatggcctcgttggtaatcgaaagcatgccaaaaaaggacacgaacagcgatgcatataaaagcgcctggaagcatagcttcatcagctgtgtggcataaaagcgtttgcgttgcatagacgcctccatcagtgcgggccctgtcggggggagaatgacaccgccccgaaaaaagcccatataccttacacagcatagcacggcatttggaatgtgtcaagcgcggtcagggcccagaagccgcccgacggctgcggccagcgcctccacatcggtttcggtgttgtagatgcccacgctggcgcggcaggcgcccgtgtgcagcgtgcccagccactggtgcacggagggagcacagtgcagcccggcgcgcagggcgaagccgtcgtgggccagcgcgtcgcacagctcgccggggtccatggcggtgggcacaaagctgacaacgcccaccttgggcgcggcggggtggcccagcacgcgcacgccgcgcagggcggacaggcgcgtgcgcaggtcgcgcgccagtgaatcctcgtactgctcgatttcctcccggtgagacagcgcgaagcgcgctccaaccagcaggcccgcaatccccggcaggttggcggtgccgctttcgtagcggtcgggaagctgttcgggctgaatcatgctttcgctctgcgagccggtaccgcccaccaccagcggccggggcagcatgccgcggcccagcaccagcacgcccgtgccgtgcggacccagcagtcccttgtgacccggcatggcgatcatgtccgcgcccagcgaggatagcgatacatccagaatgcccgccgtctgtgcggcatccaccagcaggggcacaccgtaaggtttgagcgcgcgggacagctgctgcaccggctgcaccacgcctgtcacgttgctggcgtggcagatcacgcatagtgcggtgcgcggcgtaatggcggcagtcagcgcctccggagcgatcagccccaggctgttgggcgcgagcatgcgcacgcggatggccccctgctcctccagccccttgagcacgcgcatcacggcattatgctcggcgtgggagcagatcacctcgtctccttcgcacagcgtgccgcggatggcggtgttgagcgcctcggtgcagctggggaaaaagatgacgttttcgggcgcgggcgcgtcaaacgcctcggccagcagctcgcggcaccgctgaatgatgcgtcccccacacaacgagagcgcgtgccctgaacgccccggattgccgccgagcttctgcagtgtgcccgccatggcgcgcaccaccatgggcggtttgggaaacgaggtggcggcgttatccagatagatcatcccgaaaacctccttcgaggccccacacacgcgggccgctctacgcatactgtatgagcagggaggggggaaatgaacccatgcagcaggaagttttcgggatcgcgtcgtttcgctcgcggcagcaggtacttaagtttgaaggcgcgctgcgccgcgctggtgtgcgcgtatcggtcatcaccacgccgcgcgatgtgtcggtggggtgcgggctgagcatccgctttgagctgaatgatgcgcggcatgtgatggaggtgtatgagcagctccatccctcaaacctgatcggcttctatcgcgtggagcgcgaaaatggtcagcgcacggtgacaaggccgctgtaaacggcttgccagacggtccccggcaggagtatgcttgccggggaccgcttttttctcgcacgggtgcaaccttcagggctcccggcgcttctaatggaggaaagggggaggaacatggacaagcagaccttttccgaggcggttcagcgaatggagcgcagcctgtaccgtgtggccatgagctataccggaaacgtgccggatgcggccgacgcggtgcaggaggcgctgctgcgcgcgtggaaccggcgtgacaccctgcgcgacgagcgctacttcgatacgtggctcatgcgcgttgtgatcaacgagagcaagacgctgctgcgcaggaggcggcgcgtgctgcccatggcgcagccgcccgaactccgcgcggccgagccacccggcgcggatgtggcgctgtatgaagcactgttcagcctgccgcccaaataccgcgtgccgctcatactgacgtgcctggacggatacaccatgcgcgagaccgcgcacatgctgggcgtgccggaaggcacggtgaaggcgcggttacaccgcgcacgcctacagctcagggagagactgggagaggaggaaacagacgatgcgtgaaaaagatctggaccgcgcctttggcaatacgccgcccgcgttcaccgggcgaatccatcagacacttgcacagctggaggacaaaccccgtcgcattccgcgcctgcgcgcggcgctgatcgtggcggcggtgctggcgctgctgtgcggcattgcctacgcggtaatcatgcaggggcaggcatggtattacaacaaccggttcactgcctatcaggaacacgagccccagaagcaccaggccatcatggataacctacagatcgtgacgcgccaggagcagacggagggaacgcccgtgcgcgtgaccgtgcaggacgcggcatgggtcccgcaggagaagctgctgacggtatcgctgcgtgccgtagaggcggacccgcagacgcaggaactgcatcccatgtggaacctggaccctgacggcagctacgtgggggatgatgcggaggcgctggccgaggacgaggaggcccggagcgagcactggctgctcacggaaaagggcttcggtcccgtgcgggagatgatgaacgatggctcgaaggaactgctgctcttcgaggcggatcgggtactgctgggcaccccggacaatgcggtggaaatagtggggaatggcagcagcatggacagctttgtgggggaggacggcgcggtcatcacggtgcttaagatggagcttccctggatggatgagggctacgaggcgcagatcatggcccttgagggcatggaggaagcgcagaaggagcgcctcgtgacgcaggcccgtgccgcgcgggaagcactgttggtccagaccggcggtgagctgagcctgtgcgtgccctacgaggtgtccacctatgtggagggagacgacgaggccctttactgcggaggggtgaaaggctgggtcagcttccgcatccgggtggaggaaaacgcacagtaaagaaaaagaaaggcagccgtcccaaatccgcacttgcgtgagggtgggacggctgctttcagattgaaaaaagatgtccgaagccggcgggttgcgcttgaggggttcgcgttttttgtgaccgcgtcgcaggcgcaggggaaagcgctgtgacaagcaaacgccccgtgctttccggcacggggcgttcaatgtccaatcggcgatcccatcaggcttccacgttggacttggagggcagcgcacgctgcacgttgccgctgcgcaggcaacgggtgcacacattcagacgcttggcctgaccatcgaccacgacgcggacgcgctgcacgttcggcgcccaaatgcggttggtcttgcggttggagtggctcacgttgtggccgctcatggagcccttcgcacaaacctcacaaaacttgcccatcactacacctcctaacgggagtttgcattcataacagcctgtctattgtatcatggtttgcatgctttgacaagagaaaacatggattttggcgagaaatttcgtgccggatctctcactttatttatcatccatcttgagcacggccagaaacgcttcgctgggcacggaaacggtaccgaactggcgcatgcgcttcttgccttccttctgcttttccagcagctttttctttcgggagatgtcgccgccgtagcacttggccagcacgtccttgcgcatggccttcacggtttcgcgggcgatgatcttgccgccgatggctgcctgaatgggaatttcaaacagctgacggggaatcacatccttgagcttctcggcgatgctgcggccgcgcgcataggccttgtccttgtgaacgatgatggagaaggcgtcgcacagttcgccgttgagcaaaatatccagcttgaccagctcgctctcgcggtatcccttgagctcatagtcgaagctggcgtagccgcggcttcggctcttgacctggtcaaagaactcaaaaatgatttcattcaggggaatttcataaatcagcttgacgcgtccaccctcgtactgcatgtcgatgaagatgccacgcttgtccacacagatgtccatcatcgcgcccacgaactcctggggcgtatagagggtgcaggtgacgtatggctcttccacgcgcgcaatctcgcccgcgggaggaaggttggagggattgtcgatggaaagctccgtcccgtcggttttgaacacatggtagataacgctgggcgcggtggtgaccaggtccaggtcaaactcccgctccagccgctgttggatgatctccatgtgcaatagtcccagaaacccgcagcgaaacccgtatcccagcgcggtcgaggtttccgggtcaaaggagagggaagcgtcgttcatgcgcagcttttccagcgcgtcgcgcaggttgtcataatccgcaccatcagccggatagatgccgcagaacaccatgggggtcacctttcggtagccgggcagaggcttgtccgccgggcgggctgcgtcggtgatggtatcacccacacgggtatcggccacgtccttgatggaggcggaaacatagcccacgtcgccggggtagagcgcatcgcagggcgaatagccgggtcggaaggtgcccacctccaccacgtcaaattcgctgcctgtctgcatcagccgcatgcgcatgcccggcttgacagtgccttgcatcacacgcacaaagcagatggcgccgcggtagttgtcgtagaaggcatcgaagatcagcgcctgcagaggcgcgctttcatcgcccgtgggcgcggggatgtgtttgacgatcgcctccagcacgtcccggcagttttcacccgtcttagccgagaccatcggcgcctcggaggcatccagcccgatgacgtcctcaatttccttttttacctcttcgggctgtgcggaaggaagatcaatcttgttgatgacggggatggtttccagatcgtgctccagcgccatatagacattggccagggtttgcgcctcgatgccctgcgtggcatccaccaccagcagcgcaccctcgcacgcggccagcgcccggctgacctcgtagctgaagtccacatgaccgggagtatcgatcaggttcaaagtgtaggtttcgccgtccagcgccgtgtactgcatgcgcacagccttggatttgatggtgatgccgcgctcgcgctccagctccatggagtcgagaatctgatccaccatctggcgctgttcaaaaacacccgtcatctccaacaggcggtcggccagcgtgctcttgccgtggtcgatgtgggcgatgatgcagaagttgcggatatggctcagccggtctgcgtgcaaaaaaacccctccaaaacaagcggaatccaacatcctctatcatatcggattcaccgggaaaatgcaagcgggaagggctttgtcaaaaatggcgcggcgaggctgccgacgccgcgcatcatgtcataaaatgccgcattttgtcttgacagggcccgtcgggtctgctatcgtagggaaaaaagcaggtaagggcacggtgcgggccatgatcgtcatcggaatctgcggcgccagcgggagcggcaaaagcacgctggcggaggagctttgccgggccattggcaaagggtgcctcgttatcaaccatgactgctattatcgggaccaccccagcctcacctttgaggaacggtctctgctcaactacgacgagccggaaatcttcgatcatgatctgtttctggaggatatcaagcttcttctggatggaaaacctattacccgcaagcgctatgactacacccagcatcgccgcgccgatacggacgagctgatctatccgccggatgtgctcatcatagagggcattcatgtgttctatgacgagcgcctgtgcgaattgatgtttctcaagctatatatgagcgtagagccggatatctgtctgctgcgccgtatcacccgcgacatcaatgagcgtgggcgcagcatcgaaaacatttcggtccaatatctgagcaccgtcaagcccatgtacgacaagcacatccgcaattacatcgaactggcggacgtgatcgtggcgcatgggggacgcaacgcgcgcatcgtggatattctggccggctatgtgcgcgacgaactcaggcttcgcggggtggaggaataaatagaaaccgtcacagaccacttatggaaaatcagctccgtgagggtcggttcaggatatggacaaaggaggggggtgcacagttattcccgcttccctgccgactgcaccctctgcccgtttcgcacgccactttcaggtcgcattaccgcatttggtggcaagtgtctacagggcgcatgcttctctaggtgcttcaaaggcataaaatacagcattctttgcaaacgttgtgaacgcccgaaattcgctagaaacgcgactcttgaaaacatgggttttccaacggcctaaaccgactccattcggggccggttttttattgtgcaaaaaataatcatgacttgaaatatatggatatatatgtataatataaatatcttgcctatcattttgaaaattattaaatgaagggcataattggagggagaaggaaaaatgtacgaaaagaaaagatttctgatctggctgataatgatcacgattgtagcaatgattccagttctttcggctgatgcatcaagtagcgaaatgacctttgaggaattcttgaaggaagttgtggacagaaagggaaattttgacgggggggggggtgctagttcgttggcagcctgacgaaacgaagcggaagattgatcgcatacagagcaataatgcccagtatcagattttcagcgagcttgatgatatcactctctccaatatcaaatttgaatatattcccgctgatatctttgagcatacggatgcgtgggccggacccggcaactggactaaagatcagatccgtaacgcggaatttcaatttctcaacaaaggaaatgtgacactaaagaactgtacatttgaaaaggtcatcgccagtccttttggtgaccagcagaatcgtccaggcgacgcaaaccgcagtctgacggttacgaactgtacgttttcaaatgtttataatgcctatgcgctcaaggatatctatcccgcaaatgcggtaatcaaagacaatcactttgaaaattgcagcggggccatatattttgaaggaaccattcccaggggaacgattgctatctccgaaaaccagtttgggaatattgaccagtatgcggctgccggaaaggaaaatacccgcggtatcattcagctgagcgccggtttcacgaccgcgacttcgacacaaatcatactgaaagacaataccatcaccggcaatctcgtcaaggacgagaatgtcactgggggattggccgttctaaggcagattgccaatctcgatggcagggagatcggcggctggacacccagcaaggcgttttcgatcaaggcggagggagcatacacattgccctccatgccgggtgggacggatggaaaaatcaattaccgatttgctggctgggccgcaacggacgattatctgggtgcgacggatatcaccaacgaatctcgttttctagccgcaggtcaagagacgcaaaatgggatgtactatgctgtgtgggagccaacaagctgtaccgtcatttacagcgacggcgccggcggcgcagtctttgcagatcaagtatttactgttgtgcccggcgatgccacacccaggttcaacgggaccccgcagcgagagggctatcttttcatgggatggcaacccactctcagcgcaacggtaacagagaataccatatatactgctgtgtgggaggcaataaagcccacaccgacacccacgacctccgccgctcctacgtcgatccctaccgcctctcccgctcccacgttgagccccaccgttgcccccgctcctcccaaaacgggggatggaagcgcgctggggacctggattggcctgctgctgcttggcgcaggaggcatggcgggtcttgcgctgcatatgaaaaagagaaaaagctgaggcataaaaacacgggcccggtcccataattggggaccgggtctgtatgtatcttaccgccccatcagccgccggcgtccgtcatcaaggaattgtcccagatcgtgcatgttttccagcgcacgtccacagcccatcaccacgttggtctgcgggtcctcggcgcaggagcagggtaccttgagcgcgtcggcaatggcctcgcacagcccgaacatctccgcgccgccgccggagagcaggattccgtattcaaagatatcggccgccagctccgccggggtgtgctccagcacgccgtgaatgctttcgatcagctgctggagcggctcgtctatggcctcggtgatatcgtcgctggtgatgcgcatggtcttgggcagaccggtaatcaggttgcggccggttacctccatatagagctgctcggagcgcggaatggccgacccgatgttgattttgagctcctcggcggtcctttcgccgatgagcaggttgtgcttgcgccgcaggtgacggataatggcatcgtcaaaccggtcgccgcccgctttggcacagtccgacacgatgaccttgccgaaggagagcaccgcgatatcggtcacgcccgcgctgatgtccacaatcatggtgccgtaggcctcgtccatgggcagacccgcgcccagcgccgccgccagagaacggttgagcagctgcgtgcgccgcatgcctgcgtcaaacatggtagaaatcagcgagcgcttttccatctcgttgatggcagttggcaaagccagaatggcgcgggggcgggcaaacatatgcttgccgatggccttgagcacaaagcccttaagcatgaagctgaccagctcgtaatcggaaatagcaccctcacgcagggggcggatggccaggatattgcccggcgtgcgtccgatcatacgcttggcttcgtcaccaaaggcaagaatatcgcggctgtcgcgatcgatggccaccacggtgggctcgcgcagaatgatgccctttcccttcatatagatcaggatttgcgaagtgcccagatcaatcccgatgtcgctgatgcttgccattcgctcaaactccttttccatttgcaatcaagggcacaacaaagaaagcgcgcacgcccctgacctttatctattcgccaaggaaaaggcaaatcctgcttgcgtgggaaaacccgatcagcggtgaaggtatttccgacgggtggcctctcctccgcgcaggtgacgcacggacttgttatagcttaacacacggcgcacctggcgatacagcgtttgattgatcttgggcaggcgctcgtccatgtccttatgtacggaagatttgctgaccccaaaatgacgtgcggctccgcgcacggttgcgcctgtgtccgcgatatactgcccgatgcggatgcaacgctcctgaatgcgatcatgcaccttacgacccctccaaacgttttggaaaggatatgcatcccccgaaggcaacttgcctgtgggaaacaggcgggcagagggacgcaaaaaaggaccaagacggtttgtcgcgcttttgagactgccaacaaagggctgattccaggaaaaagcagcccctaaaaacacgggcaaagggaaaaaagaaagaacgaaacgccttttccatgcgtttcgtgtcttgaatggcggcggtacggaaggactgcttcatacatgttgcggttacctagcattaaagcatagagcaggacgtgtaatgctatggtttccgcgaaaattcgttccatggtgtccttgcgacaggcgtaggtgcgttttctccggtagactaccaccgcctaaagccctgtaaggcgatttggtgacaggcaggagcgttgggggtatcatgcgtaaagcttcattattgttatgcggcttttccagcctctcttcactggcttttataaatagaggcatgcacaaagctgactattaagtatactttttttgaaaaacagcggatttcaacttttcatcataaaggcgatgtgctatgatgtaaatactcatttttcattaagaggtgtcattttcagaaaggggcagccatgcaaggtctggtatttgatatagaagaatttgccctttatgatggaccgggaattcgaagtgtggtttttctcaaaggatgccctctgcgttgtcagtggtgtcataatcccgaaggactttcctttgagcctcaacaggtacgtaccctttctctatgcaagcattgcggccagtgcaaatgcacacatccctgcacttcgtgcggcgcatgcgtgctacgctgtccggccggatgccttcgaattgcagggacctatatgacggctgaagaggtcgcccagcgaatcagccggcatgccgcgttgctctcagccaacggtgggggaataaccttttcaggcggggaagcgcttagtcaggccaaatttgtcttggctgtgcgcaaactgctgccaggtatgcatgcctgtatcgaaacaagcggttacgctccgtctgaaaactatcagcaagtagcccggcaaatggatctggtgattcaggatatcaaattgttggacccggccgctcacaggtattataccggcgttgacaatgccatgattctgcataatgtttgctggctcgtgcatagcggcattccttttcgcattcgtgttccgctcattcctacggttaacgacaatccggctatgatggagggaatcgtacacctgttggagggggcgcatgcgctggaaaaagtggagctccttccctacaatacggctgcaggggcaaaatacgctggattatccatggactatcaaccgaagttccctgtcagtcgtaaacccaatattcccatagaaccctttaaggaggcaggtattccatgcgacattctttgacaaaagaacgatatgcggcgttggcggcgcaaatccagcgccacgaagatgcattggatatacgggcggcacggagactgaagctgcttttggaagaggaggagattgtgcatcttcccggtgaaacgatttatggctggcggaccgtttccgactttcctgatatctatctgccaggtgaaaaggaagaattgcattcgtctcatttcattcatgagcagggacgggtatgtaacctttccagtgactgggcgggcgtgttgcagggtgggctgctgcgacgccgtggaaccggtgaagccagggacataaccattgatgcggtgattgcctatgcagaccggtatgaagatccggagctttctgaggctgtacgctatggagccaaggatatgaaaacggcgctaaacatgtttcgtatcctgcatatgtgcctgtgggccagcaacgtttaccataataccattggccgttttgaccagtatatgtatcctttttatgaggcggatatacagtcaggaaggctgaccgaacaaacggcgctgcaacttttgcaggagtttttcttgtctttcaaccgggatagcgacatgtataccggcatgcagcagggtgacaacggccagagcctgatgctgggcgggtgtgatcgtgaagggcggtgtgcagtcaatgatctgacctatctttgcattaccgcaagccttaacaaccgccgtattgatcccaagatcaatctaagggtagataaacacacccctctttccctgtatcggcgctgtacagaattgacccggcaggggctgggtttcccgcaatactcgaatgacgatgttgtcatccctgctctgacccggctgggatatcagcttgaggatgcccgggattatacggtggctgcctgctgggaatttatcattccgggcgtgggaatggatattcccaatatcggagcggtttgcctggcaacggttgtgcatgatgtcattgagaaaaagctggcgcagtgctgtgcttttgacgaacttatggaggcggttggtcaggaactggtcgatagggcggataagctggaagccagcttgcggccgatctttatagaaccggcgccttatcagtccgtgctgatgagcgattggtcgcacgatataagtgaaggtgcaaagtacaataattacggcatacatggaacgggcttcgctacggcggtagaccaactgtgcgcagtgcgctggctgatttttgaaaaaaaactgcgtactccgcagcagcttctctctgcactgcaaaacaactttgaaaatgaagtggaattgaaaaatctgcttttgacccgtgcgccgaaactggggcgcgatgcgtcatgcgaatcggttgcggatgcgctgctggaagcctttgcacactcatggtcgcatcgtacgaacgagcggggcgggtgctttagacccggaactgggagcgccatgtattactggtggcacggaagggagcttggcgcaacctgcgatggccgcagcgcgggtcaaatgctcagcgccaatttttcaccgaccttgcagctgcgggacgccgggccgctgtctgtcatttccgccatgacacggcctggcctgctcaaggtgtgcaatggcggtcctctcacactggagctggatgacacggtattcaaaaatgcagagggcatggagaaggtggccatgcttgtgcgatcctttatccagatgggtggacatcagatgcagctcaacgctgtaaaccgcgaaacgcttcttgatgcccagaagaatccccaggaccatcaggatctgattgtgcgcgtatggggatggagcggtcactttgttcagctggacaagggctatcaagaccagattattcagcgtaccagctatcgggaggcatagtttatgataaaagtgccctatcttttgcaagcgcctgtaaagggagtaaaattgctggacggacgctttctgcgcgcattcaacaataatatcgcttttttgaaacgctttgatattgaccggatgctttattggttccgcgtaaatgccggcgtgccagcccctggcgccccttatgccgccggagatggacactttgaaaacaatctgcacggacaaactgtgggcgaatttttgatgggcgctggtacaagcctgctatggcaagaggatctgcagctacgctcaaccgtccgcgcccttctgaatgagcttaagacatatcagcaggatgatggttacctggtaccggttgatcgaaaagcgtttcaaacaaaggaatatcccaattacacgcgtgcctggctgacatttggcctgctggatgccggctacgcgggagaagaaatgggatttcatctggcacggagaatgggcgatcactttaatcaatgtgaagtgttgccctatgtaaaggatatgaacctgggttttcagggcattctggcaaatacgcgactatatgattcccctgtaggacgagaagaggatattcaaacagccatccgttattatcaggaggattggtggctaaaacagcttatagagaggaatcagcgggccatttacgatcatcctggaaaccatccgcactcgacattgctgaccaccctggaaggatactgtgatctatatcgctttaccggcagaacgctgtatctggacgcagtccgcgctgcactgaaaatgtatgaggataaatggcagcacgtgggtggtggtatcaacatgtgcgagaatgatacctattatcccggttgcaactggctctctccggaacatcattataacgaactgtgctctacgaatttctgggtgctgctcaatcagcgcatgcaccgtctggagcccgacaatccccattatgtggatgaaatggaaaactcattgtataatgtgctcctggctgcgcaggtgggcgatatcggctatcactatttgaattatctacagcgcaccaaggactggcgctatctggaccccgctacatgctgcgctgccatgggcacacgcctttgcgcccttcttccgcagtttctctacacctacacgcaggacatggtcagttgtgatatctatgcttccagtgaggcttccttaccaaatggcgtgcgcctgcgcgtggagacggatatgcctgacggcggtcgggtatgtgttcacatacttgaagcacagcgtcctttctgtctgcggctgcgcattccacgctgggcgggagagggcagttcacgatacgagatttaccggcaagtgcgtgccggagcaaagtttacgcttgattttgctatgccgctgcagatgcaccgctattcaggcggcgaagagatccctggaaaaacacgctgggcgctgacacgcgggccgctgctgtatggtgctttgggggctccgaatccgctgacgctgcattttgacgtggaacaaccccaggactggttgacgccgctcccaggtcccaagaactgtctgcgcctgcgtggcgatgacgcccactcctatatggcttacctggatatccatgatgagccgtttgatgtttatcccatcgtggaagcttctggtggaaaggaagagactttgtactgacaaaaaatgcgattttccattgtatactctatttaaaattcatccatagcattttatggctcgcgctggtttttggccgcttgacgaagctgggttggagagagatgatagcgcttcgtaaatagacggctgaaatacagcgcattttcatagccacaagccatggcaacatctttcacgggcatatcgctgcccgataaaagttcgcaggcaagccgcatacgcaaagaaatcaaataggcgtatggtgagacgcccgtgtgttctttgaatacgtgacaaaaccggtcaggagtcatgccgcagcggtccgcatactcctgaaggttctgaacctcctgataatgacagtgcatatgcgctacggcatcccggatcatcttctccgtttagcttggctctttcttgagaatttctctgcggtagcgccctattaaaatcagtacctgagccaacagagcggcgcagttttcttcaaaatagggaagacgcagctgacgctcgttgagaatttgtctcattattttttcaacgtcccgtctttcgccgatatcaaacacggacaatccatccagatcacattgctttaacaggttttcgacgttgtatccggaaaaatgaacccaatgacagattacgggagtattgggaagataagaatagaatttgggctctcccggatggtaaatcaccacgccgcccgccttaacattttgccattttccatccagcatatggtgcgattcgccatactgcacgtacagcagttgataatccagccttcctgctggccgatttatgcgcagttcatcatttaaggtaaaggtgccgcccatggtggtattgcgtccggaactatttacaacgagcgttttatccgtaacgcagaagttagtgacatcgtggtcatttccccaaatatctaaaatcatgtataatggcctccgattcgtgtgtctcaatcataatatttttatgctccgcagtcaacctgactgacaagattgtgcatacgttaatgcaacaaagaaatggcaaagcgcacttcaaccgggccgtgctggaagggatcgcctattccatgaaggattgctatgaactgttgaaaaatctggggattgcacccaaagaagccgcgctcatcggaggaggagcaaaaagcgtcctctggcgacagattctcagcgacatgctgggtattgcattcaaaattgttgacaatgcggatagctcactgggcagcgctatgctggctggtgtggcaacgagggtctttgccagccatcaggaggccgcggcaaaatgcatccgaatcagggacgaggtattgcctgatccacaaggcgttgctttctatgagaagcaattcaagagctataaagaaatacaagcggcgcttgcgccaatctatcatcagctatgaagatcctctgtctcatcaaacaggtgccggattcacttgaagtccatatgaacagcggcctgacgctggaaagagactttgtggcatatgtgctgaacaaggctgatgaatctgccgtcgagttagcgttgcagatgaaggatgcctatggcgctacggtgacggccatgacaatgggacctttgaacgcagaaaatatcttgcgagagcttttgtcacgcggggtagatcatgcgctgctgcttacctctcctcaatttgcaggagcggacactctggccacagcacggacactggcagctgcggctcgccaaaccggacccttcgacctgctgatttttggacgtcgatccgctgatggtgaaacgggacaagtgggacccatgacttgcgcacttctggggataccttgcgttgccaatgtgctctctgcaaagctgatggacagaactgtctgcgcagagcagctcaccgaagaggggatttctcattgggaagcacagctgccggccgcactgaccctgtgcgaatggagctatcctctgcgcctgccggctctcctgggactgaaaacagcccgaagtgcagaaattccgcatttgcggcctgaagacattggcctggtgccggatttgtgcggattgaagggctcgcccacacgagtggtttccatccgggcccattcggcgggtgtccggccgacgcagtggattacggccaaggaggctgcccagatcatcatgcagatgggggtgaagccgtgataacagtagtctattttgaggcagatcacttgcatgcattagaactcattgctaaagccgtgacattttccgagagcgtttatgcattgtgtgaaaatggtggcagttgcgttccggccttgtctgcgggcgcttccaaggcagtggtaattggtctgattgatgatgattgtgcgcagggggaccatatcgcatcggtgattggacgtatgcatgcggacagtgtgctgtttcctgcaacaatccggggacgctttctgtcggcctgggtggccgcccggcttcaaaccggcctaactgcggattgtaccgggctggacgtaaccacggatgacctgcttttgcaaatccgcccggcatttgggggaaatcttacagcaagcattctttgccattcccgcaaaccgcagatcgccagcgttcggccaggcatttttcccatgccggagctgaggtgcaacacatccagcgcgaaagaacggatcgattatcttgaaccagaagttttgggcagttatctaaagcgaaccagcttttcaaaactggaaaacacggtttgtctgcaggaagcaaaagtagttatcacgggtggaaaaggcataggaagcaaaaaagggtttgacaagctgtttcatttggcacatctgctgggaggcgtcgtaggagccacgcgcggtgctgtagatgctggctacatttcctatgatcaccagatagggcaaaccggcgtgattgttcatccggacttatatattggcatgggcgtctcaggctgtattcagcatacaacaggaatgaacggatcaaaaaccgttattgcagttaatcacgacaggcgcgcagccctgtttgctcaagcagactttggtattgtaagtgactgggaagaagcggctgatatccttatagatctgttggaacggacataaaacaaaggagggtttatcatgaatttcaaaaggacgtatgtatcccaaaatggttatacccctatctgcaaagcaggcgaatccacccttaaagacctcgaatttgggataattgaattaggtccagaccaaaagctggattttgacacagagaacaaggaaacagcctttgtaatccttttcgggaccgtagccttttccgctaacggaagagaatatggcaaggtcggtgtacgctccaatgtgtttgccagtcctaaagcagaatgcttctatgcgcctcgcaactgtcatgtccagttaacaagcgtatataactgtaaaattgccgtgtgtgcgacgcccatcgatgtggatacggagccgcaggtgattcaccagagcgatgttcgcgtggtgcgcctgggcgttaaaccgtgggaacgtgataccagctttattatagatggaaataccaacgcgaaaaaactaaccattggcgaggcatatgtcactcccggcaactgggcaggctttccaccgcacaagcatgatgtggataatatgcctgctgaatgcgtcgcggaagaagtatactattttctttttgagccttctcaaggatttggggtgcaatgcgtgtatactgcggacggcagcattgatgaagcatatcgggttaaaagtgatgacctggttgaattcccctttggatatcataccacagtcagcgcgcctggttacaatacctattttctgtggctaatggccggcaggcatcagggcttctgccgtgtaaatgatcccgaacatgcatgggtagccgcagtggaaaacatggtcaaacatatgcagtaacagtagtgcaatggtgaaatctcaagttcatattgtcaccggaattccaaagaaagaatcaagcggcctatatgcatttggcaactgcccatagctgggcgcaaagtctcaactgcttggtcatgatagcaggggcctttatcctgtcttatcgaacaaaaaagagttgcattgccagattgcttgatccctgtttcttttggatatggtttaggggctgtttcctctcggaaacagcccctattgttagttgctcctcagaaaacgatgcggagaatcaggccttcttcgccttgatggcggcatgagcagcagccaagcgcgcgatcggcacgcggaagggcgagcagctcacgtagttgaggcccacgttgtggcagaactcgatggtggagggatcgccgccgtgctcgccgcagatgcccagcttgatgtcggggcgggtctcgcggcccagcttggcagccatcttcaccagcttgcccacgccgtcctgatccagacgggcgaagggatcgctctcgaagatcttgttgtcatagtaggcgcccaggaacttgccggcgtcgtcacggctgaagccgaaggtcatctgggtgaggtcgttggtgccgaaggagaagaactcggcgcactcggcgatctcgtctgcggtgacggcagcgcgcgggatctcaatcatggtgcccacatggtattcgagggtcatgccctgctcctcaaagaccttcttggcggtctcatccacgatcgccttgacgaaggcgagctccttcttggagccaaccagcgggatcatgatttcgggcacgatgtcgtagccgcattccttcttgaccttgatggcagcctgcagcacggcgcgggtctgcatctcggcgatttcgggataggtcacggccagacggcagccacgatggcccatcatggggttggactcatggagggcgttgatcttgtggatgacttcctcggtggtgatgcccaggttcttggccagcgcctcgatctcgtcggtcatgtccgtgtggggcacgaactcatgcagaggcggatccaggtagcggatggtcatgggacggccttccagcgccttgtacatggcctcgaagtcaccctgctgcatgggcaggatcttggccagcgccttttcacgctgttccttggtgtcggagaggatcatctcacgcatggcagcaatacgatccgcttcaaagaacatatgctcggtacggcacaggccgatgccctcggcgccgaaagccacagcctgcttggtatcgcgcggggtgtcggcgttggtgcgcaccttcagggtgcgggccgcgtcagcccagcccatgaaacgggcgaagtcaccggagatggcggcctcaacggtcgcaatctggccgtcgtagacgttgccggtagagccgtccagggagatgaaatcgccctcgtgatagaccttgccagccacggtcagggtcttggcttcctcgtcgatcttcagctcgccgcagcccacgaccgccgcgcggcccatgccgcgggccacaaccgccgcgtgggaggtcatgccgccaaagacggtcaggatgccctgcgagaagtccatgccttcgatgtcctcaggggtggtctcgcggcgcacaaggatgaccttttccttgttcttgccatgctcggccgcctcgtcggcggtgaagtagatgccgccggtggcagcgccgggagaggcgggcagacccttggcgataacggtcgcggccttgagggcagcggtgtcaaaattgggatgcaggaggctgtcaagctgcttgggttcgaccttcaaaacggcctcttcctcgctcagcacgccttcatccaccagatcgacagcgatcttgagggcggcggcagcggtgcgcttgccgttacgggtctggagcatatagagcttgccgcgctcaatggtatactccatgtcctgcatgtcgcggtagtgagcttccagcttgcccgcgatatcgatgaactgctggtacacatcgggcatctgctcctgcagatggctgatgggttcaggggtgcggatgccggccacgacgtcctcgccctgggcgttaagcaggtattcgccgtagagcttcttctcaccggtagaggggttgcgggtgaaagcaacgccggtgccggaggtctcgcccatgttgccaaagaccatggcctgcacgttgacggcggtgccccagtcgccggggatgtcgttcatgcggcggtagtagatggcgcgggggttgtcccagctgcggaacacggccttcacagcttccatcagctgcgtggtggggtcctgcgggaactcggtgcccatgtgcttctgatagatttccttgaagcgcgcgacgacctgcttgaggtcctcggcggtcaggtcgcggtcgaacttgacgttcttcttttccttgaactcgtccagcacggcctcgaactcgctcttggggatctccatgaccacgtcggagaacatggcgatgaagcggcggtaggcgtcataggcgaaatgctcgttgctggtcagcttggccagacccaccacggaacggtcgttgaggcccaggttgaggatggtgtccatcatgccgggcatggaagcgcgagcgccggaacgcacggatacgaggaagggattttcctcatcgccaaacttcttgccagcgattttttccgtctcggccatggctgcaaggatctggtccacgatgtcctgtccgatcaccttgccatcggtataataacgggtgcaggcctcggtggtcacggtgaagccctggggaacgggcatgccaaggttggtcatttcggccaggttggcgcctttgccgccaagcagctcgcgcatgttggcgttaccctctttgaaaaggtatacatactttgtcatggggtttttttctcctcctcgttttcttggtgaggacgaaccaccggcggaatccatccccaatgctcatccttcctctcaactggtccagtatacacgcttacgacagaaatttcaagagcctatttggcatatatacccaaaaggacgcatagaaaaaacgcattgccggggcgaaggggcaacttgcgttgaaaggacgcgcatgctatactgaacacgatcgcttcctgcccgaccattgtgtggaaaatcaggggaacagggacaaaaacgttgattttaaaaaggaagctcaggggaggaaatacgccttgaagcagaaaaagcaagcagcggcgcttctgatatttgccttttgcattccggtgcttctgtttatctgtgtgatgatcctgtgccgcattacgccttttggcgacaaaacgcttctgatttgggacgcggac

SEQ ID NO: 3488 - DNA, 7448 bp, Unknown
  16S sequences of unknown bacteria
cacgagcgcggctgcacctttacggcgttgtcagaggtggcgaaaacgctgcaggaaaacggtgtggaaaccgaaattttccatgttggcaaccatcctgtgcgcggctgcatcgcctgcggccgctgtgccgcgctgggcagatgcgtgtttgaagatgatgcggccaaccagctgcagagcctgatgaagagcgccgacggcgtcgtgatcgggtccccggtctattatgccggccctaacggcgcgctgtgcgctctgttggatcgggtgttttattccagcggcggcgcctttgccaacaaaccggcggcggcggtggtcagcgcccggcgcagcggcaccacggcggcgtttgaccggctgaacaaatatttcaccatcagcagcatgccgattgtttcgtcccagtactggaacggcgttcacggcaacactcctcaggaggtgctgcaggataaggaaggcctgcagaccatgcgcaccctgggccggaacatggcttggatgatcaagtctatccagtcgggctggcagcctttgcctgggaaagaggagcagatcattaccaattttatccgctgatccaaaaagccggcagcagcgctgccggcttttttttgtatggtcagagacaaaacagagcgaagaatgccgcagcgcccagcagtaggccgagagagaccaggctcagcgcgatagcagtgcggcgccgggggcggaacatgggtgggaaaaaggccagacaaaaggaagcggtcagcagcaggtcgctgaacagagtgtcgtacagcctgctgcagcgggtcgccatgcaccagcaggacagccagaacagtgtgaaataggctgaaaagaacagcagggaacgcagtgtgcggccggaccgcggtaaatcaaatttcattgtgcaaacctccccgtaggcccggcataaaaagccgggcaatttaacattcctttcttttctatcataagagccgcgcgtatgcgctgccaccatgcagcggtaaaatcgatgtaaaattttactgcacgattgcggcgcacatacattgacaaagggaaggggcattgttatcatgaaaccaaaaaccgccctgccggggggcggaagagaggacggaacgcaatcatgaaacgcagcagcggtatcttactgccgatttccgccctgcccgcgccttatgggatcggtacattgggcagggcggcgtttgaatttgtggattttctggccgcggcgggacagtcctggtggcaagtgttgcctgtggggcctaccagctacggcgattctccgtatcaaagcctttccacctttgcggggaacccctattttatcgaccttgacatgctggtggaggacggactgctccgtgctgatgaggtgcgcgctgtggactggggtgccgatgaaacgcaggtggactacggtatactttacgaacaccgttttgcgctgctggccaaagcggcggaaaagggtttgaaacgggatgccgcggcggttgcggcctttgcctcggaaaaacgaggatggctggaggactatgcgctgttcatggcgctcaaacgccattttgctatgaagccctggatggagtggcccgaggaggtgcggctgcgcaaagcagaagccctggagaggtaccggacggtcctttcggaggatgtggcgctgtttacctatattcaatatctgttttatcgccagtgggcggcactgcgcgcttatgccagggaacggggcgtgggtatcatcggcgatctgccgatctatgtggctatggacagtgccgacgtgtgggccagtcccgaaagttttcagctggatgaaaaaaacgtgcccattgctgtggccggcgtgccgccggattatttcagcgccgatggccagctgtgggggaatccgctgtatcgctgggaagatatgaaaaaagacggtttcggctggtggatccgccgggtggaaggtgcggcggagctgtttgatgtgctgcgcatcgaccatttccgggggtttgagagttattgggcggttccttacggcgctgccaccgcccgctgcggacagtgggtcaaagggccgggtatggatctggtgaacgttttgacccagtggttttatcatgtggactttattgccgaggatctcggcgttttgacgccggaggtgcgcaggctgctggcagattccggcctgccggggatgaaggttttggagtttgcttttgatcgccgggagcaaagcgattatatgccccatacttatgagcgcaactgcgtttgctatgtgggtacccatgacaatgctcccgtgctggcctggcgggaagaggtagacgcggcggatgtggctgtggcggaacgctacctgggactgaatgacgccgaaggtttccattggggtatgattcgcggaggcatgagttctgtggcaaatctctttgttgctcagctccaggacattttgggcctgggggccgaaagccgtatgaataccccaggggtgagcggcggaaactggcgctggcgtacggtacaaggcgcgctgacactggaactggcggaaaaactcgcttcgatgacccgtctgtatgggcgtgagagcgcatatcaccgggacacgcgtgctcggcggcagaaaacggcggcacccgcgccggcaggcgccggtgcgagcggagcggttgatgaaatcgagggaaaggaatccgtttaaaatttggcggagaatcttcagggatgcgctcgacggcatcgtgaaaatcgataccggccgctgaacgattgccaacgccgctgtttctgccgcttcattccatgaaccggagctgaagaagagcggaacggcgtgtcgcgcaaatggggccgcctccgttgcagcgggtgtgaaatgagcgaaccgggaaaagcgctgaagcttatgcttcggcgcttttccgcgcgcgtgttgcttgtatttcatgagaaaacacagtataataacatcaattgtattttatcacgggaggcttgccatgaaattgatggtgcttgacggaaacagcattgtaaaccgcgcctactacggcgtgcgcaccatgctcaaaacccgcgacggcttgtataccaacgccatttttggctttttgaatattctcacgaaactgctggaggaggagcagcccgaggcggtgtgcgtcacgtttgacctgcatgcgcccacgttccgccacaaggctttcgatggttataaagctggtcggcacccaatgccagaggagctgaagatgcagatccctgtgctcaaggacgtgctggatcagatgaatatcccgcgttacgaaaaagaaggttatgaagctgacgatctgattggtgccatttcccgccgctgtgaagcagaaggatgggaatgcgtcattgtcaccggcgataaagacagtctgcagctcattaccgatcagaccagagttaagctggtgactaccagtatgggcgcaagcaccagccgggatatgacccgggcggtttttgtggaagaatacggtttcgagccgatccacatgattgatctcaaagccctgatgggtgatgcatccgaccgcctgcccggtgtgccgggcattggggaaaagacggcactgagcctggtgcggatgtacggctctattgatcgtttgtatgatgctatgcctgatattgtgattgcgccggagactccggccaaacccggtatggtgaaaaagctggcggcgggggaagaaagtgcgcgggagagctattatctggctaccattgtcaccgatgtgccggacttttcctttacgccgggtgataatctgcgacaggaaccgaaacaggggctttatgatttgtttctgcgcctggagtttacaaaactcatcgaaaagtttggcctggcgccggtgcaaaaaaaatgcgcggaacatcaggccattgcggctgcagtggaacaggtgcggactgcggatcaggtagagcgcctgctggctctgtggcgcggtgcggatcacgtttcgctgcttgcgctgccggacctgaccggcgtagcagtatactgtgcgccgtcggaggatgctgccgttctggcagaattgttttttgaccgttatgaaggcgattggaacgcgctgctgcagacgctgttttctgcagacattaaaaaagtctctcaccatgtgaaagatttgatgcgccttttaagggagaacaatctgccggcggagggatttgtgtttgacacagccctggcagcatacctgctggatgccactgcgggcagttatgaactggagcggttgtttgttgcctattttaacgaagaactgcctcagccattgtaccgggaaaaggacgctttttccatgctgggcgacacggttcaggccgaagcttcgtttgaaagttataccacggcagtggaggctttgtatgagccgctgcgcgaagaactggagcaggcggggatgcacgcgctgttttacgatattgagctgcccctgtgcgcggtgctggcagatatggaacgtgcaggctgccgggtggatgcggtggagctgacaaagttcggggaggagatggctgcgcgtactgcggaaaaggagcagaacatctacgccatggccggggaagcgttcaacatcaattccccaaagcagttgggagcgattctctttgaaaagctgggcattcctccggtgaaaaagaccaaaaccggatactccaccaatgcggaagtgttggacaagctgcgctatttttaccctattgtggatgagatcctggcttaccgccaatacacgaaactgaaatccacctatgccgacggcctgttgaaggaaatccgcacggacggccgcatccacaccaatttccagatgacggttacggcgacgggccgcttgtcctctacagaaccgaatctgcagaacattcccacccggacggagctgggcagtgagctgcgccgcatgtttgtgcctgccgcgggctgcgtgctggtggatgcggactattcgcagatcgagctgcgtcttctggcgcacatttcgggcgatgaggcgatgcaggaggcgtttttgtccggcgaagatattcatgccaccacggccgcccatgtgttcggcgtgccgctggatcaggtgacgcctgccatgcgccgcagcgccaaggcggtgaatttcggtattgtttacggcatttccgccttttccctcagccaggacatcggggtcagcgtggcggaagccaaggcgtatatggacaattatttcgcccgttatcagggcgtgaaacgctatatggaagcagttgttcaaagcgcccgggagaaagggtatgtggaaacgctgtaccaccgccgccgcagtatgccggagttgaaatcctccaattttaacctgcgctcctttggcgagcgggtggcgctgaatatgcccatccagggtaccgcggcagatatcatcaagctggccatggtgcgagtggactgccggctgcgccgggagctgcctggagcccggctggtgcttcagattcacgacgaactgattgtggagtgcccggaggaagcgggcgagcaggcaaaaaccattttgcaggaagaaatgatgcgtgtggcgaagctgaacgttcctctgattgctgacgcgcacatcggcaaaaactggctggacgccaagtgaggaggaaagcaggatgaacgttcggattgttcccatggatgcatcgcatctggatgcgctggcccagattgagcaggagtgcttttcgctgccctggagccgctccatgctggaagaggagctttataacgactgcgcggcctttctggtggccgaggatgaaaagggggctgtgctgggttatgcagggctgcaggtggtcttggacgagggctatattgccaacgtggtggtgcggccgggataccggcgcaggcacatagcgcagcagctgctggatgtctatctccgctttgcgcaggcgcatcatctggcttttttgacgttggaggtgcggccgagcaataaggcggcagtggcgctgtatcgaaaatatggatttatagaggaagggcgtcggcggaattattaccagaagccgaaagaagacgccctgattatgacaaggagatttcatgatggaactgagattgccgacacttgaacaactgcgcacggtttacgacgccgatcttctgaaagcgtttccggcggcggaattaaagccgctgcggaatatggaagagctgtgggaagtggatcgctaccggccctggtgcctctttgacggggacgagatcgtgggcgaatgctttttgtggctgggccatcccggctgggcgctgctggattatctgtgcgtttccccccgccagcgcaacgcggggctgggggcggccatcctgcggaaactgcaggaggtggaaccggacactgtaattttcggggaaagtgaagcgccggaggacgcagacgatcctgccatggcagagcgccggctgggcttttatgcacggaacggcctgcgcacggctggatacgatacggagatgttcggcgtacattataaaacgctgtatctgttccgggaggaagtggacgacgcagcgctgatggaggaacaccgctttgtgtatcagagcaccttttcgccggagaaatatactcagtttgtccgcatcccttatgatcccggcgtcccttccggcccgaaagtggcttgggagcaataacggcgcccaaagagaaagaagggaatgaaatgaaaattttagcggtggaatcctcctgcgatgaaacggcagtggctgtggtggaggatggccggagggtactctccgataaaatagcctcccaggcggatatgcatgccctttacggtggcgtggtgccggagattgcttcgcgcaagcatgtggaagtgattgcggcgctggccgacgaggccctgaaagaagctgacatggctcgcggggacattgacgctgtggctgttacgtatgcgccgggactgattggcgccgtgctggtgggggttaattttgccaaagctgcggcatatgccctgggggttccgttaatcccggtgcaccatgtgcgggggcatattgctgccaattatatcgcctttccggaactggagccgccgtttctggctttggccatttccggcggcaatactctgattgtggacgtaaaagattatacggatctggaagtcattggcgccacgcgggatgacgcggcaggggaatgttttgataaggcggcccgggtgctgggtctgccctatccaggcggcgcacctatggatgcgctggcgcagcagggtacggcgggaacctatgatctgccccgtgcgcatgtcaacggcagcgattttgatatgagtttttcggggctgaaaacagcggtggtgaatttagcccataatgc

SEQ ID NO: 3489 - DNA, 2047 bp, Unknown
  16S sequences of unknown bacteria
gggcgtggggccgggactctcccgcgcgccggggcgggccggggcggtgcgcgccgcgctcgcaagcggccttccggccgtggtggacgcggacgggctctaccacctggccggcgcgcagggctggctcgcgcgcggggcgcagaccgtgctcacgccgcaccccggggagatggcgcgcctgctcggccggcccgtcgcggacccggtgcgcgacgcggcggactacgcgcgggcgcacggctgcacggtgctgctcaagggcgcgctgacggtcatcgccgcgccggacgggcgtctgacgttcaactgcatcggcacgagcggcatggcgaccgccggcagcggcgacgcgctgacgggcatcgtgctggcgctgctggcgcagggcatggacggctacggcgcggcgcgcgcggcggcctatctgcacgcggaggccgggctgcgcgcggaggcggcgttcggcgcggcctccatgaacgcgctggacatggcgcgcagcgttcggctttgacgtttttccgctgcggcgcataggatagcttgcggggacgcgaccccatactgcgcccccgattgagatgatgcaatgctacgcggcgagatctacagagcggcgctggaccccgtgctcggctcggagcagggcggcacgcggccggtggtcgtcgtgcaaaacaacgtcggcaaccgatattcccccacggtcatcgttcttgcggtgacctcgcgcatgaacaaggcgcgcctgcccacgcacatcgaggtgcccagccccatcggcggcctgccccgggactcggtgatcctggccgaacaggtgcggaccctggataagcagcgcctcacggagcgccttggcgcattgccggagagcgtcatggcgcaggcggaccgcgcgctgctgatgagcctgggcatcggcgcgcgcacggactattgacgcaaaggagggctagatttgaaaagatggaactggagagcgtttgactggaagcaggaactccgcctggacgcgtggatggtggcgggccttctgctgatgacggtggcgtacaactacttcttcgtgcccaaccagatcgccccgggcggcgtgacgggcctggccaccatcctctaccacctgtggggcctgccggtgggcctgatgtccgccgtgatcaacgttcccctgttcctcctttcctggaagcagatggggcgcacgttcgccgcgcgctcgctggtcgcgatgatggtgctctccctgtttctggacgccttccccatgttcgccatcaccgaggacctgctgctggcgacgatcctgggcggcggcatcctgggcgtgggccttgcgctggtgctcatgggcaacgccacgaccggcggcacggacctggcctcggccatgatccagcgccttctgccgcacgtgagctttggcatgatcctgctcatcatcgagatcctgatcgtctccttctccgggctggtcttcggcgtgcacctggcgctgtacgcggcggtgtcgctcttcctcacctcgcgcatcgtggacatgctccaggagggcgtggcctcctcgcgcctgttcttcatcatcagcccgcgcgcggagaaaatcgcgcagcgcatcctgacggagctggagcgcggcgtcacggagctggatggccgcggcgtctactccggcgcgcagacgaacgtgctcttttcggtcgtggccaagcaggaggtccacgccgtcaagcagatcatccacgacgaggacccgaacgcctttgtggtgctcaccgtcgcaaacgagaccatgggcgagggcttctcccgcctgctgcccaagtgagacggccaaatcataaccacccgtcaaacgggtggtttgcacaagggctaaaagcccaatgattaccggccagcgtctcaaggcgctggctttcactttttgcaaaagttcaagcccattgcctttgtcacttttgcagccccttaaggggcgttcgtattacttgccacccttaaaagggtcttcgtactctcggacgctcaatttgtccat

SEQ ID NO: 3490 - DNA, 5077 bp, Unknown
  16S sequences of unknown bacteria
accactattttcgagttgaatccgagacgggtcagaaacatcttcatctgctcgggagtggtgttctgagcctcgtcgagaattataaagctgtcgtcaagggtgcgccctctcatgtaggcgagaggagccacctcgatgttgccccgttcctgatattttgtgaagctttcggctccgagcatatcaaaaagcccgtcgtaaagaggccgcagataggggtcgaccttttgctgaagatcgccgggaagaaagcccagcttttctcccgcttcaacggcaggacgggtgagcacaatgcggcttatatcccccgctcggaaggccatgaccgccatggcaaccgcaagataggtcttgcccgttcccgcgggacccaccgcaagagttattgtattatcccttattgcgtcgacatatttctgctgaccgagggtcttgggcttgacgggacgaccctttgaagttatgcaaatacatccgttttccgacagctttgcaagcttatcctcatctccgtcgtccacaagagacagcacatatcccacattctgctcgttaagggtctcacccttgttgagcatgagaagcaagctgttgaccgcccttgccccgcgggaaacgttttcggcgtcgcccgaaattttcatttctccgcccctgaccgtaacggtgaccgaataggcgttctctatttgttttatattggtgtcgaagctcccgaaaagagccgcggcctgttccatacggtcgatattcaaaatctgctctgccacttgatccgcccttcatgtctttcgaaaaattttgtcgtctttcaacaagaaaaaaaataatttttatgtattatatcacaaaatctttgcgttcgtcaagtgtcagaggggaaattcatgtcaattttttgattttcgccgatattttgctcacaaagaaatttaaccgtcaattcggcgccctcaccgtcataattcacctcgtcggtgcgggagaaaatttcgctttgccccgccatttcggcaataatgccgtcggccgtgctttttgcctccgaaagcgcctgctcctcgtttctcaaaaatgtctgctcggccgtttcgaaaacctcggttttgtaaactcccaccggaagcttttccccgaaaaccgtcagcggaacatactcggtctgcttttcgaaattctcaaagccgtaggaaaaataaagcggaatgtccgcaccgaaaaagtgaataagacgttttgtctttttccgacccgttttgaccgtaacggttttttcgaaattttccctgacccgcaccgtgctgctcacctgagccttgacaacaccctcggccgctctgaacacggtggtgccgtccttatatgtaactattccgctgataagcacctgtcccttggtcaccgcctcgccgggctttacaagcgcctctcccgagcttgccagaatttcggttattaccccgtcgcaaagggccgttatgttttgcggctcggccgtttttttgtcggggggagccacccgctccttcacgtccacataaagggtggttcccatggggtttatcgacatccatgaaagctcgggatgatttaaaattataagctgggcggtgttttcctcgtctatgccgtccacacgggttccctcttttatgccggcctcaaaaagcatggcctgcacgtcgctttgcgacagcgttttgtttcccgacaccttaatgctccacaccgagcccgaaagaaaccaaagcagcaggaaaaaaaccgccgccccggtcggcagaccgaagcgtcggcggtatttcctaagcaaaaaaggtaatccgtgtttttcgaccacccgcattttgactcccgttcttttggccgccgaacggagatttttatattcgcttatgccgcagcaaaaagccatgccttccccttcgggtctcacctgccatatatccctgtcggcggtggcgcagagatttaaaaacctttcgggaaatccgccatttatcccgacctttatatagcccttaatatacgaaagaatttttaaaagcataaaggtctcctattcaaactccaccgacgaaaaaatcccgcatatttcggcgcggtttctttcaaactcggttatggtaagcccacgccccttaaacacggttatttttgagccggtgtcaaagcgtattatgtcggagccgtattcgataacgccgcggcacccgtccaccacgccgcggttgtcggaaaaaatttctacgcatgatttctcggtcaagctttcggcggccgatttaagcgcacccttaaagccctttttcttttccatttcatcaccgccaatatattttgatataatatatgcaaaacggcggaaatttattttaatcggctttttatgtctccgaaaatactgtcgcccatagcggtctgttttgtaaaatccatggcctcgacataccgtttttctatttggtcgtgaaccgcctttgcctgtgccaaaattgccgatgccgatttaagcagctcggcagacgcccttttgttaaagcgcagtcttgaagaaaatcgtccgagctcggctgtgttttcaaacctttttgcatgaattattttgttgtcggtgtctatttttattccgggagcggcggtgcagaaagcgatgtccttttcggggatgagaacatggtcgatttttcttgatggattaagggcgcaggggcaaatcaccgcatcaagcccgagacggcgcaccctcgcctcgataaccgacatgatgaccgacgacgctccgccgaaagcgtcctcgatgacaacgacccgtcggcacagcttttggggagtctttgaaaatgtgacaagcccttttggcgttatgcccgaaagaaaggcttttctttgttttccctctccctcgatttttttaccgaggaatttatcgcacagccgttcggcaaattttgcggccttgtcaaaatccacgcaggcacaatccgccgaaaagctgtcgtcggcaagacttcccgcagcccttataaatctcgacgcctttttgtgcagtctcgcgcaggccttgtaaagctcggtaagctcctttcggcttttgccgagcttttcacagtcaaagcagtcgccaagcgcaaccacccgctcacatactccgggataaatcggatccataacatggggcgccgttccgtcggcaattcccgaacgcgccttcaaaaatctcacggcgtcgagtgaatcgggatcggaagagcaataaaaaagctcgggaacctcgcccttgccgtaaagcttttccgaaaggcgtttcataagggtggattttcccgttccggggcctcccttaagtatgtaaaaggaatccttttcgggatcgtaaagagagtcgaagcaggagaaaaagccctcggctgaatttgcaccggcaaaaaattccggcgaaaattcccttatcttttcaaatttttcaagcataaaaaacacccctgaacagttttgataacatactattcaggggtttattcttttgttaccgaagcaaatcagccgccgatggaatacttctcggcataggcattgaattttttgacaaactcgccgttttcctcgtttcgcatttttttgaggaatttatgggaatcaagctttgacgatttaagctgcagggtgtagaccgcgatgtttgagcaatggtcggagaccctttcgaaattggtcagaaggtcggaaaacacaaagcccatctgtatggtacattcgcccctttgcaggcggtcgacatgacgctccatcatttcctttttaagcttgtctataacctgctcaagcggctcgacgtcgcttgcaagctcctcgctgtcctttacaaaggagtctacggttatgcccaaagtctctctgacggccgaaacgataagccgcaaatcctccttggcagggaccgaaaacacgatttttttatcctttatttcctgcgccgcctcgcttatattgcgggcgtggtcgctgattctttcaagatctccgatggtgtgaagcagacgggagaccgaatgggactcgctgtccgaaagctcgcctctcgacagtctgacaagataggtgccgagcttgtcctcatatttatcggtcagcttttcgagagcccgtatgtgctcgaccttttcctcgtcgtaaacctcaataacctccaaagcctcggtcatggccgttcgggtatactcggccatttcgttggtcagcctgtgacattccgaaactgcaagggccgaattttggaaaaggcgctcgtcgagaaacaccgtgtgggtgtttttgtcgccgcttttgaccgtcttttcgcaaagctttatcataggattcttaaagggtacaaaagcaacggtgtttacaaggttgaaaacggtgtgaaccaccgcaacgccgatcatggaaatggggtcggcaaaaatgttcggagaaaaggccatggcaatatacatcaaaatgatacatactattccgccgatggcattggtgtagatgtgcatggcaaccacccgttttgcgtcgcggctggttccgatgctggaaagcagcgccgtcatgcaggttccgatgttggcgccgagcacgagcggaattgcgatctgataggttatgggagagccggttgcggcggcggcaagggtcattgcctgaacaatggctacggtggcggccgacgactgaataacgccggtaaacactgttgacacaaggaaggcaagcatggggcttgtgaaggcggtgagcatgctttggaaggccgggtcctgtctgaaccgctccatggagccgctcatcatgtccattcccgtcatgagaacggcaaagccgatgagtataagaccgagattgcgttttctttccctttttgcaaacattcggagtataactcccacaagggcaagtatgggagcaaaggtcatgggctttaaaagggtcaggaagaaattgtcgccctgtattcccgtcagcgtcagtatccaagaggtgagcgtggttccgacgtgggagcccattatcatgccgaaggctgcttatcattcaa

SEQ ID NO: 3491 - DNA, 2838 bp, Unknown
  16S sequences of unknown bacteria
attgaagcccaggatactctccgccttggtaaagtccttgcgcacatcgtcggacgtggcgaagaatttcttgctctcgtagtcctcccggacgaagctcttgacgacccgcatcgcttggacattctcctggatggagttgttcatccggtcgtactttttaaagacggccttgaacagcggcatcgccttgtagatcatcagcgaaagcccgccgcccaggatggggatcatcagcgcaaagacccatgccagccgcttgcccacggaaatggacatgctgacagcaaagatcagcatcagcggcgcgcgtaccgccgtccggatgatcatcataaaggccatctggacattcgtcacgtccgtcgtcagccgcgtcaccagcgacgaggtcgagaatcgatcaatattagcaaaggaaaagtcctgcacatggtaaaaaaggtcatgccgcaggttccgggcatagcccgccgaggccgtggcacagaacacgccggacagggcgccgaagcccagagagagcagcgccatcgccagcagcgccaggccgtaatttgtgataaattccatcgtgcatccggcttggatgccattgataagcttcgccgtcagcagcgggataatacactcgcacgtgacctccccaaccatgaaaatcggggtcaggattgtcgcgcgcttgtactcccgcaggcattgcagcagtcgtttcagcatgatgtctcctcctgttgttccggacttggcgtgccgctgcacgtgccgatattggccgccgcccgcgccagatagtcgtgaaattgcgccgcctcttccggcgaaaaacccgccagcagctgccgctctaccgcgtccagcccctcggccgcctggcggtgcgcctgcagggccagctccgtgggaataatccggtggcagcgccgatcagcctcatcaacagcaaaagtgataaagcccttggcctccagccgctgcagaatgccgcagatcgtcggatgcttcaaatgcagcacctgctccagcgtcttggcatagattgcctgctccggatgcagcaccacatagctcaccacccaggtctgcacgccggtcagcccggaaaactcgcagctgcggttgacgcactgatgaaacgcattggaaagccgcttaatctgcggcccgatacgtgtcccggcgtccaattgcgcttgttgcttccattgctccaaaaggatccctccaaatgtatagcgtgcgacgcgttttgcgtcgcacgctatataatagcaaacaatttttaaaattgcaagcttaagtttctgaattttgcgctcacagatcagtactgggcgatggccaggccgagtagctccatggcgcgctccagcttatgcccctccagaacataggcaatgcggatctcctgcgtgccgcagcccggggtcgtgtagaagccgatgcccggtgcaaacatgactgtctcgccgttgtcctcaaactcctccaggagccatttctggaacttctccgtgtcgtccaccggcagcttggccatcatatagaaggcgccctccggacactcgcagcagacgccggggatctccatcagctttttatagcagatatcccggcggcggtgatattcctcccgcacctcatcaaaataccccgggtccagctgatacagggccgtcgtggcgatctggtcaagggtggcgactgagaggcggcactgggccagcttcatcatctgagccatgagggcctcatttttcgtcagcagcgcgccgatgcgtgcgccgcaggccgagaaccgcttggacgccgagtcgaccagcaccagatgctgctccaggtccttaaatttcgagaaggactctggcatccgttcgccgtaggcaaactcccggtagacctcgtctgcgatgagatagagatcgttctcaatggcgatatccgccagcagccgcatctcctccggcgaaagaatatagccggtggggttcgacgggttggccagcatgatcgcccgggtctttttattgatgagcggctcgatctgctcccgggtggcgtagcggtagccattttccggccgggtcatgatggggcgcagcgcgccgccggcaataagggcgcaggtctcataattggggtagaacggctccggcgtgatgacctcgctgccagcgtccagaatggcctgcatcagaaacagcagcccctcgctggcgccggtggtgatgaggatgtcctttgtttcaaaggacgcgcccagcttgcagtagtactgccgcaccgcttcgatcatctccggcaggccctgggagggacagtaggccagcacatcctgctggaaattccgcacggccgcgaagaacgcctccggtgttttaatatcaggttgcccgatgttcaggtgatagattttctttccctgctgcgccgctgccgccgcgtacgggtggaatttccgcatgggggaatattcgcacagcagcacattctgagacaggttcatcacgacccctccttctttccattttcgttccaaaaagaaccaatttggattagtataacatattccctctcttttttcaattccttcttttctatttttctgcggcaagcgaaattttatgctgtgcggacatagaaaaaccctccggcgggtctcgccggagggccgggcggaggtagggggacctccgcccgatgcaaagaaaggatcaggaatgaagcttattttttgccggttcgtttcaaatcacttgacgatcttcgtcgcgaaccgctggaggatggctgctgcctgggcgcgggtcgcgttggccgtcggctgcagctggttat

SEQ ID NO: 3492 - DNA, 3833 bp, Unknown
  16S sequences of unknown bacteria
ccgccggggagcagctcgatgccgagcggatatacggcgagctcgtggctccgctcgtgggagaggggtgctagatggcctttatcgtgatgggggcgagctacaagaccgccccgatttcgacgcgcgagaaaattgccgtggcgacgtccgagcaggtgcacgtgctccaggagctctgccggcaagacggcatagaggaagcggcgctgctctcgacgtgcaacagggtcgagctcttcttgaacgcctataccgaccgcatcggcgcagacgccgcgcgggcgttttttgccgagcgcctgggcgaggagcccagtcgcagggagttctacctctaccgcgacatcgatgccgtccagcacgtctttcgcgtcgtgtgctcgcttgactcgcaggtgctgggcgaggcgcagatcctcgggcagatgaagcgctcgtacgagaccgccgtcgaggcgcagacctgccacgacatcatgacgaagctctacaagctcgctctcaacctgggcaagcgcgtgcgctccgagacgggcatcggcgcggattcggtctcgctttccacgacggcgttcaaggcggcgtcgatgaacatcgaggacttctcgagcagctccgtggtcgttttgggggcaggcgagatggccgggctcatctcccattacctcgtcgaggcgcgcgcggcagacatcgtcgtcgtctcgcgcaccatcgctcatgcggagcgcttcgccgagacgatcggggcgcgagcggtcgccttcgaggaccgctacgatgccctggcacgggcagacgtcgtcttttcgatgatgggctccgaggacccgatcgtggcaaaagacgagctcgcgcgggcacgcagtgccgtcggcaggagcaccgcgccgctcgtcatcgtggacgagggcgtcccgcgcaacgtcgaggcgggctgtgacgagctgttcggcgtcgtgctctacgaccaggaggcgctcgccgacatcgtcgacgagggccgtgcgcaccgggcgcaggcggttgccgaggtcgagcgcatggccgatgaggcggtggaggagttcctcacgtggatgcaggagcgcctcgtcagcccgacggtcaaggagatctactccaagggcgacctggtcgtcgaacgcgagctcaagcacgcgcaaaaggagctcaggaaggcatgtgggggcgagcttcccgaaggcgccgcggacgtgctcgaggcctacggcaacgcgatcgtgaaaaagctcctccacgggccggtcatgcgcctgcgcaaggaggcgaagagcgcggactcgttctactacaccgaggcggcgcgctatctgttcgggctggacacgtttccgccgggcacgaggcgcatccccaccgaggtcgcgaacatcatgggtacggggaagctcccgaaaaacctcgacgagctgccggacgaggtcgcgcagctgctggcggcgcacggctactcgggtgcggtcgatagcatcccgaacgagctgcttgagcagctcaaggagacgtttctcgccgagggcagaaacgcccaggacacgaaagggcaacggtagatgacgaagcttcgtatcgcgacgcgcggcagcgcgctcgcgctgtggcaggcgaacacggtaaaagacgcgctttgcgcggcatccccggggctcgaggccgagctcgtcgtgctcaagacgacgggggatgtgacgctcgacaggccgctcgacaagatcggcgacaagggcatgttcaccaaggagctcgagcgcgccttggtggacggcgaggccgacctgtgcgtgcactcgatgaaggacgtcccaagcgagcttgcacctggctgcgccatcggggcgatgctcccgcgcgccgacgtgcgcgacgcgctcgtgtgcggaccgcgtctgacgggcgtggcatcgcttgacgcgctgcctgccggcacgcgcatcgggacgggctctttgcgccgcgccgcgcagctgcgggcaaggtttccgcaggtcgagcccaagggcatacgcggcaacgtggacacgcgcctgcgcaaggcgtacggcgacgaatacgacggcgcggtcctcgcggcggcggggctcgagcgcatgggcgagtccgacaagatcgcctgcctcatccccggcgacgtgatggtgcccgcggcggggcagggcgccgtcggcgtggagatacgcgccgacgacgagcagaccgcgcgcctcgtcgcgctcgtgagcgacgagcccaccgtgcgctgcgtgtccgcggagcgcttcgtgctcgcgtcgctgggtggcagctgcaaggtgccgatgggcgtgtacgcgcgcgaggagcaggggcgtctcgtgatggacgcgatcgtgctctcgctcgacggcacccgcatcgcgcgggcgcactgcgccgcagccgacggcgcctcgccgctcgagctcgcgcagcacgtggtcgacgagctcgtcgctcaggacgcgcggacgatactcgcggacattctcgagaacgaggagctctagatggcagatgcgacgacacccgcgacggtctatctggtgggggcgggcccgggagaccccggccttgccacggtccgagccgtcgagctcatcgagcaggcagacgtggtggtctacgactacctctccaacggcgccctgctcgcccacacgcgccccgacgcgcgcctcgagtacgtgggcaagaagggcttctcgcatcacgtgacgcaagaccagatcaatgcccttctcgtcgagtgcgcgcaggctgacggcgtgcgcagcgtcgtgcgcctgaagggcggcgacccgttcgtgttcggccgcggcggcgaggaggcgctcgtgctgcgggagcacggcatcccgttcgaggtcgtgccgggcgtgacgagcgccatcgcggcatcggcctatgcgggcatcccggtcacacagcgcaaagtcgcctcgtcggtcacgctcatcacggggcacgaggacccgacgcgcgagacgtcgagcatcgactggcgggcgcttgccgcgctcatcgcccagggcaacaccgtgtgcttctacatgggcgtgcgcagcctttcgaagatctccgagcagcttaaagggtgcggcgccgacgctggcatcccggtcgcgctcgtgcgctggggcacctgccccgcgcaggagacgctcgtgggcatgctcggcgatatcgcggaaaaggcacgtcaggcgcagttcgcggcgccggcgatcatcgtcgtcgggcaggtcgtggccttgcgcgacgagctctcctggttcgaggaacgcccgctgttcggcaagcgcatcgtcgtcacgcgctcgcgcagccaggcaagcgtgctcgtcgagcgcctggaagagctcggcgccgagacgctcgaggtcccgacgatcgagtttgcggcgcccgacgacgcggccccgctcgagcgtgcggcacgtgaggtcggcggctacgactgggtcgtgttcacgagcgtgaacggcgtcgcggcgttcttcgatgcgctttctgagcaggggcgcgacgcccgcgcgttcggaggctgccgcatcgcggccatcggccctgcgacggcctctgcgctcgaggcgcacggcatcacggcagacctcgtgccctcggagtacaaggcagaaggcgtgttcgctgcgctgcaggcacaggcgccctcgctcgagggcgcgcgcgtcctcatcccccgcgcgcaggtcgctcgcgagacgctccccgagctgctcgagaaggcgggggcgtcggtcgacgtcgttgcagcctacaagaccgtccttgcagcgggggagcgcgcagccgcg

SEQ ID NO: 3493 - DNA, 7420 bp, Unknown
  16S sequences of unknown bacteria
gatctaaaacttcggggcaaaacccgaagttttttatataatacttgtaatattacttgtctttaagagcctctttaagggtgcgccaacctaaaacggcgcatttaacccttgccggcatatgagaaatatctttcaaagcggcggcctcaccaaggctttcgatttcttcctctgtggcagtgccggagatcatcttcataaaggtttcccccagtttcaaggcttcttcctttgtcttgccgataatcataccaagcataatgtcggccgaggcctgagaaatggcgcagccgtcaccggaaaaagagccgtcgctgattatatccccgtccaatgtgagatttaagaaaatatcgtcgccgcagcttgggtttacaccctccaatgtgatgtccgcatcaggcatatcaaacttaaattccgggcgcatattgtgctcagtcaaaatctcgttgtaaaatgatttattcgtcatagcccattttctcccttactgttgccaaactctttaagaacttttcgccctcccggattgtgttgtagaacataaagctccgtcttgctgtggaattataacccaaagagttaagcagcggctgtgcgcagtgatggcctgcacgaatacagatgccgtcggcaatcaagatttcgtttacatcgtgagggtgaacaccgtcaaccgcaaatgaaacaatgcccaaatgctccttagggtcctgtgagcctaaaatatgaacatgaggtatcttcttcatgccctccattacataccgaataacttcttcttcccgcttttgcatttcctcgtaacctatgctgtcaatatagtccaaagcggcggcaaggcctgcggcaccccgggcatttaccgtgcctgcttcaaatttgtggggcaattccgcataagttgcgccgtcacgccttacgctgtctatcatttcgccacctgtaaggaacggaggcatagcatcaagaagtttttccttgccgtacaaaacgccgatgcccatagggccgaaaatcttgtggccggaaaatacaaagaaatcagcgtccaaatcctgaacatcaactctcatatgaggaatactccgggtgccgtcaacaactataaccgcacctttttcgtgggcaagctttgctatttccttaatggggtttactctgcccaaaacatttgaaacctgtgtaatggcaacaatttttgtattgtctgtaatctgttctttaattctttcaaggtcaacagagccgtcgtcggcacactcgatatattcaagttctgcccctttcatctttgtaaccatctgccaaggcaacatatttgaatggtgttccatgcctgaaaccaaaactttatcgccggggtttacatttgtaagaccatagctgtaagctataaggtttaagctttcggtgctgttgcgtgtaaagataatttcacggtttgaggcggcatttataaacttttgcaccttaattcttgaattttcgtaaatgtcggttgcctcaacgctgagagggtaagaccctctcaaagggttggcattatgctgtgtgtaaaaatcttcttccgctttgattacgcagtccggcttttgggatgtggccgcattgtcaaagtaaataatatctctgtgttctctcaaaagagggaaatctttcttataatctttttccattttacataacctccgtcaaacggttgtttacatattctttggtttcttcatcggctatcatattaagcacacggtcaacaccccgtcttgcaagaatgttttccgcctgttcttttgtaatgccacggctttcaaaatagaagagagtatcttcgtcaagctgaccgattgagccgccgtgggtgcctacaacatcttcttcactgcaaaggataatgggcagtgttttatttacaacatcctcgccgataagcagaaccgtttcaagttcattgcccactgcccctttacagcctgttttaaagtctattgtgcctttaaaggatttttccccgccatcggtaacagagccggaaacatttatatcgcttgcggtatttttgccgtagtggtttaccgccgtatttatatcggtaacattctgggcaaggtaaccgatgttgatttttgcaccgctgttttcaccttttaaattccaagccaggtcaatatatgttttgcccttgcccaaaataattgaggtgtattcaaaattcttgttatcccctgtatcaccgtatatgcggttgtagataaggccgttccgttcggtgaaatatgtggcgataatctttacatttttatccccggaaatctcggtgtctatccacaaatttttatctgcgtaaacatttaagaaaacaacagaatcccggttaccggtgatgttcaacttttcccgggtgtaatccttttcggattttatctctattttgccggaagaaatatttttttcaaccctttccccctctgcccattttatttttacatcgttcagccccagccaataccaggttttaacgggagttgtatttatagttattgtcttttccatttttctcctccttaaccgatactgcctttcatttcaaggcgaatgaggttgttcatttcaactgcgtattcaaggggcaattcctttgaaacattgtccgcaaatccgctaacaatcaaagcccttgcgtcctcctcgctcatacctcttgacataaggtagaaaaccgtatcgtcactgatactgcctattttagcttcgtggcctacggcgcagtccttacatcttatatccattgccggaattgtatccgaacgggaaacagaatccaacataagggattcgcatgaaactgcggattttgccccgtgagcctgtttttgtacaactaccgaactgcggaatgtggatatgccgccgcttttgcttatggattttgtgttgatgtaagaacttgtgtttttacctgtgtgtaccacctttgcgccggtgtcaaggttttgcccctccccggcaaatgttacgccggtaaattccattttggaattatccccttttaaaatcgtcatagggtacaaatagcccacatgagagccgaaagagccggaaacccactcaacggtgccgccctcctctactatggctctctttgtgttaaggttgtacatattctttgaccagttttcaatggtggaatatctcaacttggcatttttcttaacatacaactcaacgcagcctgcgtgtaggtttgcaacattatatttaggtgcggaacagccctcgataaagtgcaggcttgccccctggtcaactataatcaatgtgtgttcaaactgtcctgcgcccttggcatttaatctgaaataggactgcaacggtattgaaacctgtacccccttggggacatacacaaatgaaccacctgaccaaaccgccccatgcaaagcccggaacttgtgatccctcggagtaaccaatttcataaagtactcctgtatcatctgccggtattccccatgcattgcgctttcaaggtcggtgtaaacaacaccctgccgtgcgacttcgtcctttacattgtgataaacaagttcggagtcatactgtgcccctacgccggcaaggctctttctctcggattgaggaatacccaatctctcaaaagtttccttaatgtcctcgggaacatgttcccagtcatttgccatttttgtgttagggcgcacatatgtggcaatgttgtccatgtttaacccctctattgaggggccccagtcgggaacaggcatttcgttatatactttaagggactgcaaacggaaattgcgcatccagtccgggtcgtttttttcctctgaaatctttttgacaacttcttcgctcaaaccgctttcaaggcgaaaagcgtctttttcttcgtctatcacatcgtagatactgcggtcaatatcctttacatatgttttttctttcatatcttactcccgcagactttcaaagcctttttcgttaatttcatctacaagttcgccgccgccgttctttacgataacgcccttttccataacatgagccttatcaaccgtaagggactgcaaaattcttgttgagtgagtaataataatcaaactgccttggcaacgctctttataaaggctgatgccctttgacaccgtgcgaactgcgtcaacatcaaggccggagtcggtttcgtccaaaatagccaaagagggttcaagcataagcatctgcaaaatttccgcctttttcttttcgccgccggaaaagcccacattcaaatctctgtctgcatatgagggatccatattcaaaagttccattgtttcggcaagttttttcttaaactcaaaaaatcttatgcgcttgcctgttttccgttcaagacccgagcgaataaaaccgctgagggtgacacccggaatttcaatgggggtttggaaagagaggaaaataccctttttggctctctcgtttacaggtagctcggtgatgtcctcccccttgaatgtgatactgccgccggtaatctcatactttgggttgcccattacagcgtagcccaatgtggatttacctgtgccgttaggccccatcaaaacatgggtctcattttcatttatagtcaagtcaacgcctttgagaatttccttttccccaacattgacctttaagtccttaatatttaataattcagccatttttttcctccttgcggtatggtgttttataaacatatctttttactatgttttacaagtataatagtaccaccccggcttaaaattgtcaatatacacacccggattttatgtgtgactttgtcacattaaaacatactgagtatataggtataatgtgttgaaattataaaattttccgccgatcaatgttttatcgttgacagtttttcctgccgtggtataattagtagatgaaacaaattacacaaaaggagtatttgatttatgaaaataagcgaaaacatcaaatatgtaggggtaaacgaccaccttgttgacctttttgagggtcagtacgaagtacccggcggtatgtcctacaattcatatattatcacagacgaaaaatgtgttgttatggacaccgttgaccaaaacttcacagaacattggctggacaatatcgaaaatatccttggcggcaaagctccggattatctggtagtacagcacatggagccggatcactctgcaggtatcgcaaaatttcttgcaaagtatccaaatgccacagttgtaggcaacagtaaaacatttacaatgatagctaacttcttcccgaatttaaagattgaaaataagttggaagttaaaaacggcgatgttttaaatatcggctctcacagccttacatttgtctttgcgcctatggttcactggccggaagttatgatgacttacgaaagcggtgaaaaagcacttttctctgccgacggtttcggcaagttcggcgctttggatgttgaggaagactgggcggacgaagcaagaagatattacatcggcattgtaggcaagtacggccggcaggttcaagctgtactgaaaaaggccgccgctttggacattcaaatgatttgccctctccacggccctgttttgaaagaaaatttaggctactatattgacctctatgacaagtggtcatcatacacacctgaaaaagatggggttgtagtggcttatgcctctgtttacggcaacacaaagaacgccgccgaaattttggttgaagaattgagaaaggccggctgccccaatgttgttctttgcgatttggcaagatgcgacaaagccgaggccgtttccgccgctttctgctatccgaaacttgttttggcagcccctacatacaatggggaagtttacccggcaatgagaacttttatcgaagatcttgtcgagcgcaacttccaaaacagaactgtgggtcttatcgaaaacggctcttgggcgcctatggccgcaaaggttatgaagtcaaaacttgaaaactgcaagaacataacatggcttgaaaattcatgtaaaattctctctgccgttaaggaagataatattcggcagttgaaagcaatgtcggaagaactttgcaaataagttttagcaacttaacttttcgttttaaatccgccttaccgggcggatttttctttacaaaaataagtatttgccaaaattttaaagtctaattattttaaatttgaatttttactttacaaggttttaaataacatttataatatacacagatatatttttgcaaaggagaaataaaattatggcaaaaatcaaagccggtgataagtttacaaactacaccgttgacagcgtttacggtaccgatattatcagaggtacaactatcgaaaaaattatggacggcaagcctactatgttctggttccagagatatatcggctgcccgccatgcagacttgatgttcaccttttggttatgaaccacgaaaaattccttgaaaaaggcgtaaacatcgttgttgttatgcagtccaaaccggaaattgttttgagagatatggttgataagacattgcctttccaccttatctgcgacccggaagaaaagctgtacaaagaccttgaaatcggtaatatgtccaaagactttagcgaagaagatatgaaaaagctgggtatgaaaaaagaacttatggctgccgaacctgaaaaatacgcccacggcgattacgagggcaacgaacggcaggcacctgcattcttctatcttgacaaagatatgacggttattgaggcacactatgccaaaacaatcgcagatatgcctttggcagaagaagctcttgcaaaaatcaaataattttaaaattttcggcaaaacccctcttggcaggggttttgtttttttgtcgaagaaaaaatcttaaatctgtgaccatattatttcacctattaaggagaaacaggatttttattttgtttaattggttgtcttacagcggaaaatcattttaaacaacttgcaaagcaggcgaccaatggtcgcccctacgggctatttgtgatttactgtcgtcggttgcagaacaatatttcaaaaaaattaaatgccttgccggtcataaacagtgattacgtaggggcgttcattgaacgcctatgcaaaccgtaggtttgcacataaacaacctgtttacatcgaatttcggcaacaaataacaagcccaaaaatccgcaattttgccgccctttggtaaagggaggtgatttttcgttagaaaaatcggagggattgaccttggtaaaacaatttgatttacagccgaatatcgtatgtaaaaaaatgtttttcaatctctcagtcagctacgctgacagctctctttaccaaagag

SEQ ID NO: 3494 - DNA, 8273 bp, Unknown
  16S sequences of unknown bacteria
aattctcacggttgtggaggaaaacaggattcgcgggacggtcgagagcgtatacaagctgaacaaaaagaccctcgagcaaaacgacagcaccggactgagcgttcaggcgtctcttctgcggctgtgcggggcgttcgcgaagtatttttcggaaggagacgtaaatcccgtgaaagatatgctgctgctgaccgcgtgtacactgaagctgacggatgaggaattcgcggaatttttctcggagataaatcaggttgcgctgaaatacatgagcatgaaaccgcacgaaggaagcaagacgaggcagataacgctgatatcctcccctgttgacggagacgaaacataaatcgtcaaaagatgtaacaaacaacatttttagttaaaaggaacatcactatgaactcactcaaaacaattcaaactctctcaaaaatcggaaaaatactatgtaaaatcgcctttgtctttgcggtaatcggcttctgcggttgtatcgtcggaatgatcagcctgagcgtgggcggaaatatactaaagctcggcggagttacgattcacggaattatatccgaaaacttagactatgcggaaggcagtctcatcgcggtactcatcggctggcttgtcgtttgcgcaggtgaggctgtactcgcaaaatatgcggagctgtacttcaaaaacgagcttgccgcaggaaatccgttcactttcgcgggtgcaaaggagctgctccgtctcggtatcataaccgccgttatccccacagtatgcgcggttgtcggaagcattgtcgagggtatcgcctcgggaattatggacgtagagaaagcggtcgaattaaatatgccctttggcactgaaggaaacatcacgctcggtataatgttcatcattgccgctctgctctgccgttacggtgcggaaatcagagaaggcaggaaaaactgaggggacaaaggagaaataatggaaaacacaagcagcattaccgctctgatgagtgcattcggacgggcatttcacgcggaaaacgaggaacatcccgtattcaaggactgccttgcgaaggagcttatgacggacgaagaatataaagccgtcgggggatatattctgagcggcgcgcagttttttgagccggatataatcccctctatgcaggagccgaaaagccttctccgcaggatagtgaacgtccacatctccccctctcccctgtgccgtgccgcatacaccgagcgtgcattgaaaacggacacactgacgggagcacggcaatacgtaatcctcggcgcgggtcttgacacatttgcgttccgtgagcctgaatttttgtcgaggtacaaggtgttcgaggtggatcatccactgacgcaggcggacaaactcgagaggatatcccgcgcaggatggaatattcccgagaatctgaagttcgtccccgtggattttgcaaatgacagcctctctgaaaagctcacggaaagcggatttgacaggactgtgaagtcgtttttctcttggctcggagttacatattatctctcgcttgaggaaatagagaaaacgctctcttccctctccgaaatatgcgcggacggcagctcggtagtgttcgattatcccgacgagaacttctttagctccgccgaaaaccgcgtgaagaatacaataatgatggcaaaagcgggcggcgaacccatgaaatccgcgttttcctacactgagcttgaaaagctgcttgatgagcacggatttttgatatacgacttgctgacacccgcggatatccagaaaaacatcatagacaaagccggagcggacatgacagcgttcgagcacgtgaactactgccttgccgcgagaaaaagataataaaacaaaagaatgagttagttttcccgccgactcattctttttttgtatagttatatcttccacccaacggctttttcgcgtccgctgatgaaacgacggtatatgccatcctgccgcatcagttcatcatgtgtgccgcgctgagctatttttcctttatcaacgacaaaaatctgctgagcctcgcgcactgttttcaacctgtgagctatcatgataacggttttctccgtcgtcagcttgtgtattgcctccataagctccttttcgttctccgggtcgacatttgccgtggcttcgttgaggattattatcggcgcatccttcatcattgcacgagctattgaaagccgctgtctctcccctcccgacagtgttcctcccgcttcgccgagcacagtctcataaccgttcggcagcttcattataaagtcgtggcaccgtgcctttttcgcagcttccgtcaccttttccataggagcgtcaggctgaccgaaacggatgttgttcgcgacagtgtcatggaacaggtagacgttctggaacacgaagctgaaatttttcataaggctgtccatgctgtattcccgcacgtcatgccctccgagctttacgacaccttcgtccacatcccagaagcgtgagagcagatgacaaagcgtggtttttccgcctcccgatggtcctacaatggcagtggtgctattttcgggaatgtcaagcgtaacgccgtcgattatggtcttctcaccgtaggaaaactttatgccctccgcaccgatgtcgtgtttcttcggctcaagctcttctcccgtgatgtccatagcgggcagagagaggatatcgttcgcctgattaacgcatgtgtccacaactctgagcaggctcgactgagtacccgccgactcaagcccctccgtgagcatgaatgagcatatcgcaagcatgacgcagtttaaaagtgccatgtctccgcagatgtactgtacaatagacaacaccactactcctacgtcaatgagcttgactactaccgagacaagcatgatgcacagcgagaggagtatgctctttgccgtgacgtcggaagacaaaattgcgccgagaatgactcctatagccggaattttcagtgcagaaaacaaagccgccgcaactccgagtgcaatcgagacgtaaaactccatgcgttctcttttgtcgcagaagcggaagaatttctttaaaatctcaagcattattgtctcctccttcgtctgacgaatcgcgggatgagatgtgcgcgttccagagcgttctgtacagcgggcatttttccacaagctccgactgcgtgccgaccgcttctatttttccgccgttcacgagagctatcatgtccgcgtcaactatagtggaaaggcggtgtgcaatgacgatgagcgtttttccacggacaagcttcgccacactctcctgaatgaccgcttcgttttcgggatccgtgtatgcggtggcttcatcgaggataacgacgggggcgtttttcagcatggctctcgctatggagatacgctgtttttcccctcccgagagatgaccgccgccgcttccgactactgtgtcaaagccgttttcaagctccgttatgaagtcatagcatccgcagtcacgcgccgccttctcaacctcttcatccgttgcgtcgggtcttcccattcggatgttctcgcgcaccgtgccggagaagaggaaattatactgcgacacatacgcgacaagcctgttgtaatgctcggctgaaatatttcgtatgtctgcgccgccgatagtaatgcttccgctgttcacatcccagaacgacgctatgagcttggctatggtggattttccgctgcccgacggacctacaagcgcgttcactgttccctctcggaaggtaaggttcacgccgtgcagcacctctgtatcgttgtaaccgaaatgtacgtcgcgcagctctattgtgttgttcttcggcgtctccgtgtctctctcatgtctcggcagctctttcgcggtgagaatatccgtaacctgagagacgacagtgcctaccttagcgagatcatccgtgaacttcatgcagccgattatcggagtgataagccccatagagagtattacaatgatgacgaatttctccggcgtgagcgtcccgttcttcatcagtattccgccgatgggaagcacagtcagaagagtcgagggcattatattcatggcaaaggtgaagtaaaaattgctcttgttcatccagtcgatatagctccgagcgcattctattgcggatgagacgaacttttcatagctgcttttcgccttgccgaagacctttatcacctcaatgccgccgatatattcaacagcggtatcgtcgaggtcagtcgtagccttcacggtgcgggcatagttttcgttgtatcccgccatcatcagcataaaaaacaccatgccgagcgggaatgtgatgagacttgcaagcgccatcctccagtcaagaacgaagaggtacacaagtgtcgcaaaaaccacaaccgcgttgctgctcatctcgggaatcgcgtgggcaagtgtcggctcgatgctgtcaaccctttcgacgaggatgtttttcagctctccagaacctctcgcctgtacgtctcccagaggaattcgagcgagcttttcaagtccctgcttgcggatgttgccgaggactgcgaatgttgcgatatgtgactgtgcagtcgacagtgaatgaaacatcacgcgcaaaagccacagcaccgccataacaacgcaatccgtgagatatccgacgaggtcacgatttccgccgagcagctttcccgtcactctcgccatcacgaaaaacggcagtatctgaaacaccgctccgattaccgcgaaaatcacgcttcttatgtatcccgctctcttctgtccggcaaacgcgaatatctgaccgaacgtctctttttgcattattctcacctcactccaaaaatttcttccgttttgcttgtgttctcttccgtcaagggcaagtcgtcatgtatcgtgccgtctttcaggtgcagtattctcgtgcaggtgcggcagacgaattcataattgtgcgtgacgacgaaaatcaccttttccatgtcagccagtctccgaatgagcgaagatagccgcaccatgctgtcgtagtcaagtccgctcgtcggctcatcgaacacaagaagctccttgccgcagaccattgaagccgccgccgcgagacgctgtttttgtccgccggagagtgtgttcgggtgacgggaacggaactcagcgagtccaagctcgtcaagcgttttctccgcgagtgcaaaatccgggcgctttattccgaatgtgcattctgcttccacgctctcggcaaaaagctgatagttcacgtcctgcattaccatgtacgagagtttcatgcgatcctttggcttctgcggctttcctttccacagatatacgccgctctcttccttgtgaagtccgcatagcgcgcgagagaatgttgtttttcccgctccgttgtgtcctacgactgcgataacctctcccgcctccgctttcagtgaaacagagcgcagtatcggttgctttttgtatgcgagagcgatgttctccacctcaagcactgcaggcttttgctcatgcttttcaaagcgcatcggtctctcttcccacaggctcgtgttgcgcagtcccatgctctgccgctcattctttgtgagtgacataagctgctcaggcgtatagtcccctgcgatttttccgttttcgaggtaaactacgcggtcgactgcgtccatgaggtagtacagcctgtgctccgctatgataaccgtcttgccctgcgctctcatcgtaggaaaagaacacattacgaaattctatcatacagccaccgccttatataaaagctccgccgcgagaaatgccgcgaacaggagaatcacaagccagtccgccgccctcattctaatgctgacaaggcaggtgcgtcttctcggattttctattccgcgcgttaccgaggctatcgacaattcatccgccgctttgcttgccgctgtcagaattggaacgtagatgcagttcaccgtcattgcaggagctttcagaaatcccaaaacggtcggagatacgtcgcgcagtctcatggcgtccttgatgtagtgccagtcctcgcgtatcgtcggcagataacggagcataacggcaagtgggatggttagctttttcggaacgtgcaggcgcgtcattaccgagagaaattctcctacctttgtagtgccgataacgatacccgagagcattccgcaggcgtaaaccttatgcacaagtccgaggaacgccacaaacattgtccgccatgtcccgctcatcacacccatgcaccacacagtgaaagcgcagattacggcataaacggctattccgcgcagtgcgtacagtggctttccgctgacaagagcaagcagagctatgagagacacgagagcgaactggaaatacaagctcggcgagaacattgcgcaaagcacgcacaagagaatgagaaacagcttcgtgcgggggtcaaggtgcagcttcatttagtgatacctgatttttcaaactgtttgcgcagcattttgcatcccacaaacgcactgacagccgccgcgagcaccgttcccacaagcatgatccacacgcttcccgtctcgcgcattgtgtcgatatatgactgctccgtaccgtttccgagcattgtttttgcccatccgtcgggatttgcgaagaacacgagatacgaagccgttcctccgagagagattacaatatacgaaacggaattcatcattttgcttttgtattctcccgcaccggcgacaaaatcagctgcgacacccatgacgaggtatccgagagccattgcccagtgcattcccgtcacgaaccacactatgcagagaatcgcgccgaggattgaaaccgcccatctctttttgactttcgcgagcatcagcaggtatacaggaccgcagagaagcgcgcttccgacaggcatataaaacgtcaggacaggattcggagcgaaggaaattccgccgacaagcgcaaacacaaggaacagcgccgagaaaattcccacagtcacgagatcctttacgccgagtcccttctttatggcagtttgtttgttcatatcaatatctcctttacttcaggcaaacggattgactttatgtccgttgtttgctataattcagttagaggtcgctaaccgaatatatcatacataaaactacggttttccgcaatgctttgcgcttctgtttgtcccatcgttgcaaatcattgtccaatcgtttcaaggagaaaatatgagcagcaatatacttgaaaactactacgacccgcttttacagcagaacaattttatacctgtcaagtgtcccgaaaaattcagtcccgcggggagctgctggaaaatagcgcagtccgtcggagaaggctactactggatatacggcaggcaggaccttttcgatataaagatacacgacttttactttcacgaggatttctgccttgacgttgagatacccgagggcatcaacattcagcgtttcgactccatatccggcgaagagctgaacccgtaccggcggctttctgcgggagacatcgagacaatagtcagcggaaagcaacgttaccgtgcgctgatacacaagagaataccgatacactcagtagggatagagattctgcccgcgtactacgaggaatttctgaaaaagcagtacccgaacgagtatttcgacctgccgtcagcgtttcagtctattgatcagacggcggagtttcccgcaatgtcaaagctgctgttcgagattgaaaactaccgcggagaaggagttgcggcggctctgttttacgaagctaaggtaacggaggcgatcgcgcttgtggtggacaatcaaaaaaagcaggctgcaaagaacgcacacccgctttcaaaggaggataccgagggactgggaaacgtgataagctacattgccgaccattatgcctttgacataccgctgtcccgcctcgccggaatcgcctgcatgagcgaaagcaagctgaaaacctgcttcaagcggtacacgggatgcacggtcacggaatatatcaacaagcagagacggtatcacttacatacttctccgcctgcatattgaacatcgccgcgtacttgccgtcctgcttcatcagctccgcgtgactgccgcattccgctatctcgccgttctcgatgaggtaaatgcagtcggcgtcccgtacagttgacagtcggtgcgatatcataatcgtcgttg

SEQ ID NO: 3495 - DNA, 27366 bp, Unknown
  16S sequences of unknown bacteria
gcgtctatgtgacgaccccgtcggacggcagccagagaccggtttcgaacgcgatacttcttgtcagcacggaggaatccgacggcgtcccggcgcacctgtcgctgagcccgaactcgccttatgtctacaagggcagcacggtgaagtttgaggcgaacgcggtcgaccgcgcgtacaatccgaccggcgcaaagatacccggtgaggagctgaagctcggcttcgcggaacagtacgatgtgaacatcggaagcgtcagggacggcgcgttcacagccggaaacatccccggcgaatacgtcgtgaccgcgaaatacgagcagcaggatgggactgtcctcgacggcaaggtttcagtcttcgtgaccgacatgatagatcagctgaacgtcagcgccccgttcgcgaaggtgtctgacggaacgcgcttcgacctcggcgtctccgcgtcctatcagggcaggaaagtgtacatcgacccgaccgcggtctattacacgctagacggagtgaataccgcgccgaacccgggcgattacgacgacgcgctcgtcatctgcccgaagggatacatcacgaccgacggtcagttcagagtcttcaagggcatggaaggcgaggtcgagataggtgtcaccgtcggcggcataacaaagacgatacttctgagaataggcgacgcgccggacgaggtcgcggacttcgaggatcccgtccagctcggaggtttctcggtttcgacaggcggctcggtcagcgacgttacctacggttacgctcagggcggctacaagtcggacggcgcgctgtcggtcggctatacgctgacgacgcctgagtccgcgagactgttcgacatacgcctgaccgacggtcacagggtctcgccttacgccgagagcgtgagtatgtgggtctccggggacatttccggaaagctgaccgcgaccctgaccgattcggcgggaaagacgcatgagattgagtatcacgttacgaaggattactcgagacagctcggctggagcgagataacggcggacattccgtccgatctcaggaccggaatgatgaccctgacgaacgtcctctcgatcaccgacaagggcaccggaacgagaagtataaagctcgacaacattcgtgtgaactacggcgcgatcgagctcgagcccctgaccggcatcgacggacactgggcgaaggacgcgataacgaagctctacgatatgcaggtgataaccgagtccgactgcgaggtgacggcggacgggctttactgggagcccggaaggaccctgacaaggggcgagttcgcgaagatgctcgtcagatggcgcggcatcgacacggcgccgtacgtgagcgagggaataaccatcggcgacgagaccccggaggacaagataccgtatatccgcgcggcgatagcgaacggtctgatgaacggctacggaaccgagaacggcgtgacgctcttcggcgcgaacgacagtctcacgagggaagccgcgttcaaggtactgggctcgcttcttgacaacgacggtgtcgcgcttaagttcgcggatgttcaggacatatccgactgggcgttcgacggaatatcgaagtgcgtggcggcaggcgcggtcaacggctatgaggacaacacgataaagccgaagaacacgatatcaagatccgagatggcgacgcttctctcgaagctcggctgacagggaagcaaaaaaacggcgggagcgattccgccgtttttcttccggtgattattattcatccgtccctgcgcgtttctgacggcgtcttcccgatgacagacttgaaggttctcgtgaagtatgagaggttctcgtagccgcaggagcgcgctatctcctgaaccggcgcgtcggtctgtttcagcagtctctcagcctctctcgcgcggacgttatttatgtacctgacgactgtgtagccggtctcgcggcggaattcgcggcagaagtagtacttgctcattttgacgtggtcggctatctcgtcgacgctcatcggtttgtcgaggcgggagtttatgtagccgatcgcgcgccttacggtgtcgctcctgtcggcgttctgcggggcggggcgggagaagtttctcgagacgtagacgagcatgtcgagtatccgcgcctttctcgcggcggcggagaagctgtcggacggcttcacgatctcgtcagcggcggcgaggaagagctctttcgcccgctcgtcgcgtatcacagcgtcaaaatcgagcgccgcgcagttgatgtcgttctcgacgcagaacttcatgtcgacgatcaggcagtcgtagctgaccccgcccgtgtacgggacggcgtggagagagttcgagttgaacacggcgaggttcccggcttttgcctcatacctctccctgtcgcggaacacggcgccgtcggtgtagaagaagaggatctcgatattctcgtgccagtgcgggaagcagccgcagttttcgctgtggcggtggaagatatacggctttgacgggtcgttgaccctgagggattcgtatttgtttgtgtatggtcgcggctttgctggatctccgggctttgtcccgggcgggggtgcacagcagctcatacagttcgtgtcgttcatatcgttcatatttttgtcgtctgacctttcgcgtggttttggggtgagggcaatattgtgtcaaataatggcaatatcgactattgaaattgatctcaatatattatataatatttttgaggaaaaatcaagaggaaagcgaaaatttcctccttttccgacccgcccggcggatgtggaattctgcgcgggtatggcaatattgaaacaatcatggtgtcattctatgaattgtgaaaggaatggtgaacagtatgtataagttcccgataggcgctataattgagtcgttcaggcttccgaccctcgaggcggtgaagaaggcggctgagctgaagctcgacggtctccagatgtacgcgacgagcggagagcacgcgccggagaatctctccggaaagaaggcgaaggagctccttcagtatgtgaaggacagcggtctgcgtttctccgcgctctgcggcgacctcggacacggcttcggcgacaaggaactgaatccttcgctgatcgagaagtcgaagagaatactcgatctctcaaaggagcttgagtgcgacatcgtcacgactcatatcggcgtcgttccggagagcccggagcatgagagatataagatcatgcaggcggcgtgcgctgagcttgccgagtacgctgactcggtcgacgcgcatttcgcgattgagacgggaccggagacctcggcgaccctgaagaagttcctcgacagcctcggctcgagaggcgtcggcgtcaacctcgacccggcgaaccttgtgatggtcaccggcgacgatccggtgaaggctgtgcacaaccttaaggattatatcgtccacacccacgcgaaggacggaaagatgctcgcgaagggcaatcccgagtacatctacggtatcgttcacccggtcccggtcgagttccagggtatcaggtatttcgaggaggtgccgctcggaaccggacaggtcgacttcccggcgtatcttgcggctctcgatgagatcggctatcgcggctacctgacgatagagcgcgaggtcggtaattcgcccgagaaggacatcacgacggcggcaaacttcctgcgtgagataataaataagtaaaaataataacgatcgaaaggacataagaaaaatggaaaagcttcgtattggtatggtcggtgccggcaatatctgccacgcgcacctctccgcttacagacaggatccgagagtcgagatcgtcgctatctgcgatataaattttgacagatgcaaccgcaccgccgatgagttcggcattccgaaccgctacaagagcgttcacgagatggtcgccgacaagtcgctgaaccttcaggctggcgacgtctgcgtatggaactgcgcgcacgctgagtgctctatcgcgtgccttgacgcgggtcttgacactctctgcgagaagccgatggctatgaacgctaaggaagccgaggatatgctcgaggcgtcgaagagaaacggcaagctgctgatgctcggatttgtcacgagattcgcgactgactcgaagatcgctaaggatttcatcgacaaggggctgctcggcgatatctactattcgaaggctacctatatccgccgcaacggcaacccgggcggctggttctgcgacaaggagcgctccggcggcggacctctgatcgatatcggcgttcacccgctcgaccttacccgttatctgatgggcaatcctgagcctgtttcggtttacgccgtgacctccgacctgctccacaccgagcgcgcgcagctcaagacctctgtgggctggcatccagaaggagctgacccgaagaaggacaagtgcacggtcgagtctaacgctgtcggcatcatccgctacgctaacggcgcgtccactcttctcgagtgcgcgtacgccctgaacggcgagacccgcaatgagcgctcgctcttcggcacaaagggcggcatctgccttgacacgatgaaggtttactcagagatgaacggcttcatgaccgacgtcaatcttgtcgaccttaacacctattatgacaagaaggatatgttcgtcgcggagatggagcatttcgccgactgctgcctgaacggcacgaagtgcatatccccggctgaggacggcgtcgtcataatgaagatcctcgagggtctctatgagtccgcgaagaccggtaagtctgtcgacataaagtaagtggtttaacgataatcgacaaaacaattaacgattttcgggaaagctattgacaaacctgagcttatagtgtataatatatccgtcgtcgggatcccggcggcggatattttgctataataacggagacgagccatgaaaagaactatcagcgcatttcttcttatcgcgatgctggcgtctgtatcctgcgggagcgctggaactgccgatgtaacgactgatgatacgacagctgtacaggacagtgcagagactactgccgcgggggacgaccgggagtctgtgagcgacgatctccccgcgagggacttcggcggggacaagttcactatgctcgtgcgcaccgagcgcaaatacgagttcgaggcggaggaggagaacggcgatcttctcaacgacgctgtgtacaagcgcaatctcgcggtcgaggacaggttcaacatcaaatttgagaacgtgctgatggacagcgtctggggagatcaggcgacacagttcacgaattcgctcagatcgtcgatacaggcgggagagggcgcgtatgaccttgtggcgtcctatgctgcgacgataccggcgctcgtgtcgcaggggctgttcgcgaactggagcgacatggactatgtcgatttctcgaagccgtggtggtctgagaaggtcaaggacgagatgacgttaaacggcaagtgcttcatggtgacaggcgatatttctctcgctctctgggaggggatgagctgtgtcctgtacaacaagcggctcaccgaaaattacggtctcggcgatatgtattcgctcgtccgggacgggaagtggacgttcgacaagatgctcgacataacgaaggaccgctatcaggatctcgacggcgacggtgaggtctcggagaacgacgctttcggcatgatacacggcacggcgaccgaaatcgacaactataaagaagcattcgagataccggtgacgaagcgcggagacgacggcttcccggagttcgcgctcaagagtgagaagatggtagacgtgatcgagcggctcgacgcgtgggtctggaacgcgaaggacgtctactggggactcaatatagatcgtccggtgcttcaggagatgttcagcaggggcaactctcttctcttcaactcgacgctcggcgcgacgcagaacctgcgcgatatgaaggacgatttcggcatccttccgtatccgaagtatgatgagaaccagaaggactatcacgcgacgtctcttgatgagttctcgatgttcgtaataccggtcgacgcgccggacaccgacaagacggcgttcataaccgaggctctgtgcgccgagagctacaagaaggtcgttccggtcttctacgacgtggtgctcaagacgaagaacgcgcgtgacaacgactcggctcagatgatcgacataatccgtgacggactcgtgttcgactggggctacatatattcggtcacgatgggacatcccggccatcagctctcgatccttctgaatgcgcacaacacgaacatagcgagcgagttcgacaagaatgcgaagacctatgagaagaacctcgagaaggctctgaaggtatacagaggagaagaataaaatggaaaccggaattaatctcgagcatttctataaccgcccggcgggtgagccgaagcgcgattttgaaatggtagcgcagacgatacatgactcgtgattcagaaatctcgatcattcggggaactacacacatagcgattatattgaggacacgaagcggcagagggaatatctcgaccttctcggcatgagggcgcatcagtcgcacgcgccgttcaatcgttaccggacctatccggacgcggagtttccggaactgtatcaccgctcgtttgagtgcgcgtcaatcctcggtgcgaagtatgtggtcgttcacgcggacgagtacaggtctatcgagcgttacgacgagaatgagattgtggagtacacctacgactacctcgcgccggaggtcgagttcgcgaagaagcacgggatgaaagtcgcggtcgagaacctgttcgaggacctgccgtcaggatataagtatttcgacgggaagagccgctttacgtcacgtgtagaggatattatcgcggtcatcgagcgcttcaacgatccggacgtcgtctgctgctgggatttcggtcacggcgcggtgtcctatgggtacgacagggaagcgtcggcgcttgagaaagtggcgaagtacgtcgggtgcactcacgtccacgacaacaacgccgggcacgacctgcatatgctgcctttcaccgggcggattgactggaagcgggacatggatgtcctcgcgagagcgggatatgacggcgttctctcgatagagctcgtttacgaccgcttcccggatgagcttctgccggactggtttgacatgaaccgcgccgccgcggacaggctcgtcacgatgtgctcactgagaaaacgggaactgaaataaaaaagacgctgtcgcgcaaaaacgacagcgtcaattctttttgtcacttcttgtatgtggttttcttaccctttccggtgcgtctcgggggcttcggcgcgtcggttgtgtcctcttcgacctcttcctcctctgtcttttccggctcggctggagtttcttcttttaagaacttgtccttcttcttgaggctgaacttgttctccttgcccttcatcaggcgctttatgttctcgcggtgcagccagatcacgaatgccgcgttgagtatcgagacgatcgccgcgaccgcgccctcgcggtttccgccgtgcgtgtacggatagagccggttcaggaagagcgggtagagaagcatgcctatgatcgagccgagcgacagatacttcgtcgacgccacgatgatcacgaatatgagaaacagtacgaggaaggtcagcgggtcaaggcagagaattgtgaccgccgatacaacgatgccctttccgcccttgaacccataatagatcgggaacgagtgcccgatgacacagcagagcccggcgatgaacgcccccgcctcaccggcgagaagtgttccgataagcaccgagacggcagccttcgccgcgtcgccgagaagagtgaagcccgccgcagccttgccgtaggtgcggagcatattcgtcatgccgccgttgccgctgccgtagcgccttatgtcgtcgtggaacttgtatttcgatatgatgacggcgaagttcatgctcccgaggaaatacgccgcgaccccgccgacaaggcagagcacgactataagccacagcggcgagccggatgagccgttcgcgatcagcatcgggatgagcccgttctgacggatgttattcagtgtcatatgtgtttggcaaggctcagtcctcgccgtctcccttctgtctgactattatctttaccggcgtcccgcggaagccgaagacctcacgtaactggttctcgatatatctctgatacgagaaatggaacagctccgcgtcgttgcagaatatgacaaatgtcggaggctttgtgccgatctcggtcatatagtaaatcttcagccggcgtcccttgtcggacggcggctgtacgcgggttatcgcgtcgttcagcacatcgttgagcataccggtcgtgacgcgcatacagttctggttgtggacgtaggttatcatttcgaagagctttgtgactctctgtccggtcttcgcggagacgtagagcgtcggggcgtacatcatgtaggagagggcggtgtagaccttcttgtcgtactcgaccgtgttcttgtcctcggtttccaccgtgtcccatttgttgatgcagattatcgacgccttgcccgcctcgtgagcgattccggctatcttttcgtcctgttcggtgacgccctcgttcgcgtctatcatgatgatgcagacgtcggcgcgctcaacagccatcttcgcgcggagaaccgagaacttctcgatgcggtcctctaccttcgactgacgtcgtattcccgcggtgtctatgaagacgaatttgccgtactcgttgtcgagccttgtgtcgaccgcgtcgcgcgtggttccggggacgttcgagactatgaggcggtcctcgccgagaatcttgttgatgatcgagctctttccggcgttcggcttgcctatgaccgcgaccttgattatgtctgagtcgtcttccttttcctcgtccgcagggcagatttcgagaaccctgtcgagcaggtcgcccgaaccggttccgtgcaggctcgagagaggaatcgggtcctcgtcaaagccgagctcgtagaactcatagtactccatcggaagctcgccgatcgagtcgaccttgtttacgaccggaatgaccggctttccgctcttcttgagcattgtcgcgatgtcacggtcggcggcggtcagacctacgttcacgtccaccatgaacacgattacgtccgcagtctcgactgcgacctcagcctgtgtcttcatctgtttaagaatcgggtcgtccgagcgcggctcgataccgccggtgtctacgagaagaatcgcgcgtccgttccactcgacctcgaaatatatgcggtcacgggtgacgccggggatatcctcgacaatcgacacgcgcgagcccgcgagcttgttgaacagggtgctcttgccgacattaggtctgccgacgatagctactactggtttggacattttatcatcctttcattgctggtgtttatcagaaaagtactttcgacacgaaatcattgcccgtcgattcgaccggtacgacctctatcccaccgagctgctccgcgagccattccggcgttgtgtcgtcgagaaacacgtcgccctcgctcctgagcgtcacgcgcgggatgaggagtctgtcgccgaggtccttgccctttaactggttcgcgaggtccttgccggtgagcagtccggcgacggttatgttgtgaccgaagaaatcgtttattatcctgtagacgttgcactcgagcgtcgggacctgctcacagagcctgtcggcgagcgactttatgaagtcatacgcggcggcgccggtcgcgaccgagacctttcgcggcttttcgaggtcgtactcgtcgaggaaatcgagctcgtctgtgaactcaccgtccatcgagcgtatcatgccgacgccgttctcaatctgcgggtagccctcgtagtagtcctcgcccggaagctcgcgccccgcctcgatatacagctcgtccgacgagaagaagagcctcgtcccgaactttttcaggcatttctcgccgaacttatcgattgtgtcaatgacctccccggcttcctccgccgtgaacggctcgaggtgacagagcccctcgcggtagttcgtgattcccgccggaacgatggacacgccgacgagggaagggtaaagcgccgcgaggtcggtcatcgaccgctcgagctcctttccgtcgtttatgcccttgcagagcactatctggcagttcagcgatatccccgcgtcggcgaagcgtctgagatacgacagcaccttcccggcgttcttgttcttcatcatcttgactctgagctcggggtttgtagtatgaaccgagacgtttataggcgacgtcttcatctcgattattctgtcgacatcctcctcggacaggttcgtcagtgttatatagttgcccatcaggaaggacagtctcgagtcgtcgtccttgaagtacagcgtgtcgcgcatccccttcgggagctggtctatgaagcagaacacgcacttgttgcggcaggagtgcttcttgtccatcaggtaggtctcgaactcgagccctatgtcggagtactcgtccttctttatcgttatctccttgaggtccggaccgcggtggatgagcagagttatcttcttctcggtgagacggaaacggtaatcgaggacgtcgtttatgtcgtgaccgtttatcgagatgagtatgtccccgggaaggatgccgtgcttcgcggcgggggaggccttctcgaccccggttatcgttaccattcaatcacctttcaagtatcaatctatgtcaacgaataccggctcgtgcccgaccgccgggagaatttttgaaaacaggtcagcagtctttatcttgaggctcgacgtgtttatgcacgggtgacagccgaagtattcccacttttttatgtcgttgtcaacgaggaattgaatattgttcccgtggtcgttcataagcccgagcacactgaccgagccgggggttatgtcgaggtattcctccatcttctcaggcgtgccgaaggagaggcgggtcgagccgatcttcttcgcgaggtcctttgtgacgaggtgcttcccgccggggagcatcagcagatagtactggtcgcccttcgagtttctgaggaacaggttcttgcagatttcaatgtcgagcagcttctcgatctcggcgcagccctcgattgtcccgacggcgtcatggtcgacccgctcaaaggggacgccgagacgttcaagcaggtcgtagacgcactcttccttcggcagacgcttgtctgtcgggcgcgcggtgtatattgtgtggtcgagatggatgtcgaccggttcgcttgtgattatttcttccatatatttggtgcttctttatagtaattggttacacgaagagcggttcttttttcggtctccagagccggactatcgtgagggttatagccatgccgcagaggacgtcggacaggaagtgcgcgccgacgagcacacgcgagagagcgacggttacgagccagaccgtgagacaggaatacatgaccggcttcagatattttctctcgctgaacctgagataatacgtcgacgtgaagatgaccgccgcgttcgacgtgtgtccggacgggaacgaataattgcccgtgaagccctgtggaatgaaccatctcgtgaacagcgagtaatcaccgtccatgctcctgaacctgacccgtccccagacgagcttgaacagccatataacgacaaatgtcgtgacgccgacgaacacgcatctgcaagcggtgtcgaatatcttatcgagcgtttctctcttcatccgcatagcgataacaagcataatcgcggagatgacaacgcatatcaggaccgagaccggcgtcacccatccgggaatgatgagttccgtgccgtttatgtctgcgctccacgcgaaggcatacttgaatgtcgcgtggacggtatagaacgacgtcccgaccatgccgacacaggcgagagcggtcagggcatagtacttcctttttttctcaggctttttcaaaaatcttgcggcaatcagcgcgcagttgaacgccgtgaacagtatcgccggcggctcgccgagtatcccgagcaatcgcccgaaaaccgacatcggatcggcgaccgcgagcgatatgtcaagatcacacacacccgcgaaaacaagagcggcggcgaataccacgagcgcgatgacgaccggaatacactttctcttttcttttgtcatttccataataaaccggcagacggacacctgcctttcggagtgtccgtccgtcagatattcgcgcttatcagagtccgaggacagccgcgccgatgattccggcgtcgtttccgagctcggcgatcttcagggtggtgggctttattgcctcgttgccgtaggtctcttccttgatgatcttctcgagcggatcggtgaggtagtgcttctcgttgcagataccgccgcctataacgaggatctcaggctggaagatattgattatgttcgagagaccgcagccgaggtagccgatgtacatatcgacgacttccttcgccggagcgtcgcccttcttcatagcggcgaaagcggtcttgccgctgaccttgccctcttccttgacgaaatcggtcatgagggtcgggatgccctttgcctcacactcggcgagcttttcctttgtcatgttgatgagaccggtagcggaggaatatgcttcccaacagccctttctgccgcaggaacactgtctgccgttgtactcgatgacgatgtgtccgagctcagcgccggcgtagttgaagccggaatagaccttgtggtcaatgatgatgccgccgccgacaccggttccgagtgtgatcatgacgacatccccgacgccctttgctgcgcccgcgacagcttcgccctttgccgcggcgttagcgtcgttctcgacgaggaccttcttcaccgggatgaacttcttcagcgtgtcagcgatcgggaaacgggagaacgggaggttgttcgcgtagttgacgacaccgcggacagggtcaatggctccgggggaagcgattccgacatactcgatgtcgtcaaaggttagcccggcgtccttaacaagactgtcgcagagcgcgcccatatccttgattatctcttcggcggtacgtcccgccacgtttgtaggaacgctgcccttctttacgatctggaattcagagttgacgataccggcggcaatatttgttccgccgaggtctacaccgatataatacatggttgataccaatcctttccttgatataaaaatcaacatctatattataatgtatttcgcgccgcttgtcaagcttttttctgtgatatccggaagtttttcaaaaatatcttgacttttgtgccggaaggatgtaaaatagtatcataaagccggtccgaccggtgatgacacgaaaggatactgcataaaatgaagcttggagaaatattccgcgaccacatggtcttacaggcgaacaagccggtaagagttttcggagatggaaagggacacgccgaggtcacgttcatgggaaagacgctgacctgtgacaacgacactgacagtaaatgggtacttgagttcccggcgatgccctacggcggaccgtacgagatggacgtcgtctgcggcggggagcacgccgtaatacacgatatcatggttggagaggtgattctcttctcgggtcagtcgaacatacagttcaggatggtcgaggagataaccgacccgaaggactatgtcgacgacgacatgatgcgcattttcgtctcggaaagaccggaggcgggcgagccgctgtccccgcgcgacggctgggtcaagtgcgcgaaggagaacgtcccggagtggtcggcgatcgcatacctcgtgtcgctcgaggcgagaaaagccgggattcccgcggtcggcgcggtcgcgtgctctcagggcgcgtcggtcatacagagctggatcgacgagaagatattcatcggaagcccgctcgacattccgtccgagaagctgcaccacgactggaaacagcccggatatttctggaaccgccccggtatgctgtatcacttcatgctcgagcgtctcatcccgtacagcttcggaaacgtcgtctggtatcagggcgagagcaatacgtcgattgccgagagcgagatttacggcgacctgctcggaatgatgattgacaattggagagctgtattccatgacgataagctgccgtttgccgttgtggtcatcgccgacttccgcgagggcgaggactgggaaggcgtgcagaaggctcaggaggacgcgcagaatcacattgacggcgtcgtcagcgtgaagagcggcgacatttcggaaaagcgcatgattcacccggttacgaagtggcgcctcgcgaagagaatattctccgctatgagagataagcacaccatataattcaaggagagaacatgaaggtactactgataaacggcagtccgcacgagaagggctgcacatacacggcgctcgacgagataagaaaccagctgacacggcgcggcgtcgactcggaaatcctctggctcgggaaggagccgataatgagctgtcagggctgcggcgcctgcgcgaagatggggaagggcagatgcgtctataatgacgttgtcaacacggcaatcgaaaagatggagacctgcgacgggataatcgtcggctcgccggtgcattacgcgggcgcgagcggacaggtgacgagcttcctcgggcggatgttctacagcggctcgaaattccttcgcggcaagccggcgtcggcgatagtgtcatgccggcgcgggggagcttcggcggcttacgcgtcgctctgcaagttctttgagatgtcggatatgccgctcgtcacgtcgcagtactggaaccaggtgcacggcaacaccccggacgaagtgcggcaggacggggaaggactccagaccatgagaaggctcgcggataatatggcgtggctcctcggatgtatcgacgccgggaagaaagcggggattgaaccgttcgcggctgaggagaggatacggactaattttataagataagaagataataagcgaccgctcaccttgccggtgggcggtttttgtgtatgttgttatatgccgcaatcgtctgattttcacgatggtttatatgcaccgcaatcgtttggtcaccacgacacttgtaggggagaccattggtcgcccgcttcaaacaattacgacggaatgcttatttgtgcgatgccttcgtgggcgggcgtcgggtggacgcccctgcaagattctgcctctatcgttaatcacccgatcggcacaaacttattcgccgcgtgaatataggcgagaatactggactcaataatatccgtagaaagcccgcgtccgttataggtctccccgttgcacgaaatcttgactataacctcgccaagcgtatctccgccctgtgacgtcgctcttatcgtgtacttctcaagtgtgtgcggcgggagcttcattatcttgtcaacggcgccgtacgcagcgttgataggtccgtctccgagcgacacttcctcatatacctttccgtcccgcttcagtctcattacgcataccgggcttgtgaagttgcccgtgtggacgtcgaaacggtcgagctcatagactcccgctacgttcttcgagcttatcagcgcctcgaggtcgtgatcgttgacctccttcttcttgtcgcagatccccttgaagcgctcgaaatactcgtcgagttgttccttcgtcaggacgaaaccgagctcagagagacgctcctcaaacgcgtgtctgcccgagtgcttgccgagaacaaccttcgacggctttttgcctatgtcctccggcgagattatctcgtaggtctccttcgcggagaggacgccgtgttgatggattcccgactcgtgcaggaaggcgttctgtcccacaatcgacttgttcagcggcgcggtctgaccgataatgttgtacaccatctggctgacacgccatatcctcgtcgcgtctatccttgtgtcggcgtcgtagagagcctttctcgtccgcagtgccatcacgaactcctcgagcgccgtgtttccggcgcgctcgcctatgccgttcaccgagacctcaacctgtccagcccctccaaggacgcctgcgagggaattcgcggtcgcacagccgagatcatcgtgacagtgcatcgacaaaacggcgttcccgagatcgacatgatttcgcagatactccacacggaagcgcatctcgtcgggcgtagtgtaaccgacagtgtccgggatgtttatcgttgtggctccggatctgaccgccgcctcaatcactcttgcgagaaattcagggtcgcttctcgtcgcgtcctcggctgaaaactccacgtcggagcagaagcccttcgcgtagctgacgcccctcacggcacgctccatgacttcttccggcgtcattttcagcttgtacttcatatgtatcggcgaggtggctatgaatacgtgaatcctcggcgcggcggcgtgctttatcgcgttccacgcggcgtcaatgtcgccgtcgacactcctcgcgagggcgcagaccgacgagtcctttatcgccccggcaatttccgcgaccgaatcgaaatcacccttcgacgagaccggaaaaccagcctcgataacgtccacgcgcattctctcgagcgccttcgcgacctccagcttctcctcggggttcatcgagcatccgggagcctgttcgccgtctctcagcgtcgtgtcgaatatctttattgttcttggcatgcttccatcctctttataagcgagccgctcccgcgctccaccgccacgactccggtccggcacatctcgataatcccgtacggagccacgaaatctatgaacgcgtcgagcttcgtcgggtgaccggtcatctcaatgcacacctcatcgggcgtgaagtcaaccactttgcacctgaacacattcaccgcgtcaagtatctccctgcgtgtctcgcccgaagcgcggagctttatcagcataagctcgcgtatcaccgtcgtgtcggacggcatcgtgtctatacatatcacgtcgtggagcttcgcgagctgctttattatctgcgacctgacggcttcgtcgccgcgggcggttatcgttatgcgcgagctgtccgggtcctcggtctcgctgacggtcaggctgtcaatgttgaatcctcgtctcgcgaaaaggctcgacacccgcatcagcacgccgtatcggttcgcgacgatgactccgagaacgaatttgtccggggtcgcgggagttgttttgttctgttccatttgtctgttcatcctctgtttctgaatgacgttgtgttgtcaagcgcgggtatatgacctgcgcgatgtgcgtctctgttcttccttcacccgagacaagtcggcacaaccttctcctccgggtctatcacgcagtcaatcacgaacggtatcggctttctcttattcacaagctccatcgcttcgttcagcgcttctttcagctcgccccggttcattgccctcatgccctttgcgccgaaggcttttgcgaccttgacgaaatcggtctcgcggtggagctccgactggcttgtgcgcctgtagagcatcttctgccactgcttgaccattccgagcgacgagttgttcatcaccaccactatcagcgggacgttgtagctgaccgccgtggcaagctcgatcaggtccataccgaagctgccgtctcccgtgtaaagcaccgcgggtctcttcccgagggcaaggctcgcgcctatcgccgcacccattccgaagcccatcgtcccgagtccgccgcttgttatgaagcctctctctcccgttatctcacagtactgcgccgcccacatctggtgctgtccgacgtcggttattatcggcattccacttgtcatacggttcacctcgttaatgacgccgcgcggggtcagccagcctccgtcctcggtgattgtcgtgtcagtgctcttttttctctcaagcgctttcgcgtaccattcctcgtcagaagacggtgtgtcgggcagtgtgtcgagaagagcctcgagggacgcgcgcaggtcgcctatcacatatgccgcgtcggtgacgttcttgtctatctcggcggggtcgatgtcgaactggacgattctcgcgcttcccacaagctctccacgcgatccggtggcgcggtcggtgaatctcgctcctatggctattatgacgtcggcgcttctgacggcttcggttgcaaaggagtgtccgtgcattccggtcagtccgaggttcgctgggaacgctgtcggtatcgcggagagacccatcagactgcatcctgccggcgcgtgtattttttccgagagccgcatgacgagctcgccggctccggcgctgactgttccacctccgcagtatattatggggcgtttcgcggattttatgagctttgccgcgtcgtcgattccgtaaagcgactttgtttgcatagggtgatggtggaagcgcgtccggttctgctccccgtccgcgaggtcggacaccgcgatctttgccgactgtatgtctctgggaatgtcaacaagcaccggtccctgtcttccggagcgggctatgtcgaaggcttcatgcaggatgcgcggcagatcttttatatccttgactatatagttgtgctttgtgatcggcatggttatgtccgcgatatcgagctcctggaagctgtctcgtccgatctgggcggtcgggacgttgcctgttatcgcgacgagcggggaagagtcgaggcaggcggtggcgattccggtgacgaggttggcggctccgggaccgcttgtggcgaggaccactcctacctttcctgtcgctctggcgtagccgtcggcggcgtgggcggctccctgctcgtgtgcggtgaggatgtgctttatctgctttctgtgcgcctcgagggcgtcgtaaatggcgagtacctgtccgccggggtagccgaagatcgtgtcgacgttctcgtctatgagggctttgataacgagatcggcgccggtcaggtatttcttgccgttctgttgggtttcctgcattttctgaagattccttcgtgttaatttcgtgttaaataagtaatatggcggtctccgcctttggtgaccgccttgtgctgaaactataagatgtcatttggtcaggattctttccgacgcactatgtttgatgaggcagaaacttcatccgacgcagaaggaagccttgactatcggtccagggctggccctgggcccctggttacatgttgctttctacgtactcgactatgtcgcgtacggtcttgagattcgggatttcgtcgtcggatacggagactccgaagttttcctcgattgccatgaggatttcgactacgtcgagggagtcggcgccgaggtcttccattacgttggtgtcctcggtgatgtccgcctggtcggcacggagctgggacgctatgatttcagcgattttgtcaaacattgttgttcctccaaaaataccggatgtgttaccggatagattattttgatgagcgcgggcgggtgagttctgccgccgcttgtgtctcatatgaatcattatataatatctccgcgactttttcaagaggagacgggaaattttgcaaattattaactttttttgatgattattcgccctattccgcaaaaaaagttctgtgcgctattgacaaatcacaccggatacgatataatacttatatatgcagcggaggtggagataaaaatgacagataattccaactggctcgtttacagggtggtgcgcgacgagaagctgacgtcacgggcgaggatatcggagcttaccggattcagtcttatgacgatcggaaagataaccgacaggcttgagcgcgagcgtatcattgtgcgtgacaggcacaggcagacggggaccgatctcgccggtagacgtccctcgagatataagcttccggatacgccgtacgtgatgctcgcggatatgacgaagcggcccggcagtgtcgggatgtacgacgtcggcggaaacagtgtggggctgactctcacagggaacgcgggcgagtgcgcggcggagctttacagtgagcactatgaggatatagccctgacggcgatgcttgtgccggacgacggatcagatcctgtcggggtgttcccatggaaagagccggatatagtcgtcggggtattcacggcggcggcttgggacgcttacgaggcttccggtgagaagcggacgctgtttgtcaggaaggagccggactctgaatggcgggcgtgcctcattgccgacggaaagctgcgggggctggagcacggcgggatagagacgctgactcaggtcacgggggacatacaaagggcggtcgcgtcgctgattgtcgccctttcgccggagtcggtgacggttgaggcgtcggacattgacggcggggcgattatcggctatatcaccggggcggttccgtgcgcgccggacataagggtgcggagaaacgacgaggcgaggctcgggtacggcgccgccatgctcgctctttataaacacgtgatgtcaataaaaaaactgccatgattttccggaataattctttcccgctccggcaacaataatcaggcggcgagaaccgcgaataacgttgtcaaaagaggaatcgaaaatggaaaacaagacttccaacccgtcgatcgaatgctccgtcaagcagtgcgttaaccacagccagagcgaggactactgcaccctcggcaaggtcagaatcgctactcacgagcctgacccgaaggtctgcgagtgcgttgactgcgagtcgtttgtcaagagagagtgcggatgtcactgacgcttcgcttagtgaaaagtgaataagtaaaagaaagggagattcgctccctttcttttatgcctgtgcacgagttcacaccgttcgcgtgttcatgagccggaaccccaccgcccccttttttacgctacgctgagattaccggggttctcggcgtcgcgagaccgggtttcattcccttgaagcctctcacccgcttgtattggtactgcaccagcgtatatgtcagtccgtactcgtgactgtgcgagcgcatgtagcctatcatctttctctggtcaagcggaggctctgcgttatcctcgcaccacatccggtagatgttgtagagcgccttcgagcttatctcgccttccgggtcgaacgtgaacgaaccctgagagcgcatgaagctcatgacgttgttcgcctcgtccatcgccgttctgacagccgccttcgacctcacgcttattgtgaactggtagttatttcttctcagcctgaagagaccttcgagcgcccagagaaagatcgcgtcgcgctcccggtacagcttgtcggacaggaacgggtcgtcgattctgtcttccggtctcggtttcgtcatgagtatcagctgacgccggaagaaaccccagctgtcgtcgttcgtcgagcggagataaccgttgctgaacgccatgagcctgcaatacatcacgccctgatacgactgtacgcctttcttctcgagatccatcggaccctcagccgtgatgagagccttcaggttgtttgtgctcgggagatgttccagcctcatatcgtcgtcaaccatcaggagcttatgttcgaggtcagccctcgcgaaggcgttagtctcgagcttcgggatgctcccgttattcatgttgttgccgagaagatatcgcatcaccacgcctatcctcgattttccctcgcctccgttgccgattatcaggagcatcttctgcgccttggtcgtaggaacgaggcagtaccccatgtactcctgaagagccgggatatcgtcaggctcaatcaggtcgttcacgaacttaagccaatgcaccggcctcttcccgtcagcgttcaccgtaaccggaagtctgttgcggcagaacttcttctcgtcagtcaggtcttcaggtctcgtaatgtccagagttccgtcccgcaggttgaggatatcctcgcttatcataagctcgtccgtcttagcctcagccttcaggttctcgacgatgtttgccgacgtctgaatcgcgtaattgcggacgtactgcttgatctcgtcgtaaaccgcgtaccggagcttatccgccgggcagtaaccgtccggagtgaagaaagtgccgttgatgctccgcagattatgagttttcagatactcctcacagaagagcgtagtgtcaatcttcttcccgttccaccatatcggatcgtcagggttgcgcacattccccttcttctttcccacaggtcttcccggcgagccgccggtggcattgtcaaggtttctctctgcgccggatgaagtttctgcctcatcaaacatagtgcgtcgcgaaggttcctccatcatcatgcggctgtcgtcagcgtatgtgccgccgtatgttctcgtatcctccggcggttcgtagccgtcgaactcgttcgttaccggtatgtcctttctcagctcagccattgttcgtatcctcctttactgtatttgcggcttcaatagcctttacgatatcctcgcgatacctctcaagcttctcaaagtaagcgagtccggccctgacgagcttcgccttctccttgtcctcagtcactccccagaaggattcgcggatgtggtcgagatagtcgagatgagaagccgcagccatataatagctgacgtttcctccgtcctcgtgcgtcttcgggtcgctctgctccataagagccttgaagcctgtcacccacttatcaaactccttccagaacctgtcggtgtcccgatggaactgcgccgaacgctcgtagggaacgtcgacgaacggcttcactccgttctcaggtatcggagcaatcccgaagtctgcggcgagcctgtccatcgcgtggacgaaatcaagacccgtaagcttcatcgtgagcgagatgacgtccccgctctcctgacagccgaagcagtagtaatggtcgcgatagaccttgaaggacggcgtcttctcaccgtggaacgggcagagagccatgcccgaacggttcagcttcagcccgtagagcttcgcggcttccctcgcgtcgacattctcgcggacagatgttgtggttatgcgtttcatataaaactcctttcgagctcagatgaaattttgggctgttcagcctttctgaactctgtgagtatattatagcataaccgaacgtgtcaccgcttgccagaccataccaaaaagtgtcagcgtattcaacaaagttatgggctgtttgaaaacttgctttgtaagtatatgctaataatgtatgaggcgtacggatatgtgacagaaagcgcggataatcggggagtgaagagtgaagagtgaataaataaatggggcgggggggttccggctcatgaacacgcgaacggtgcgaactcatgcacaaagcgcgacggtttttctcctcaaactgcttgacaaatttcattttctggtgtataatacatacatacgaatccgcacacgaaacttattttcgaaaggaaacctacatatgagagagaaacttgattttaacacgggttggaagttctgccctggcgatcagaatctggaactgccgccgttcaaggacccgatgtatctcggcgcgaagaccgagagggagctgcgcggctacgcttcggcggactacgggaagaaccgggagatgatgttcgggaactggaaggacgtcaccctgccgcacgacttcataatcgaacaggagccgaagaaggagaacaacaataccctcggctatttcacctaccataacggctggtaccgcaagagcttcaaggtcgaggagagcgaccggggacgccggctggcgctgtatttcgagggaatcgcgacgcacgctaccgtgtatttcaacggctgtctgatggctcataatttctgcggcttcactccgtttgaggtcgatatcaccgacatggtgaagtacggacaggagaacgtcgtcgcggtttacgtgaacactaccgatcagcatgagggctggtggtactcgggcggcggcatctaccgcaaggtgtggctcgtgaagaccgagagcgtgtcgatagacctgtggggcgtgtatgtgcacccggagaagctcgacggtatgccgggctggagactgcccgtaactgtgaccttccgcaacgacaccgcgaagagacgcaaggtgaagacgttcatcacgattcacggtcagaactctgattacgagacggacgacgacggcggattgtacggcaccgagatacagccgaaggacaagacaacaggcacgtgggagctcgacatggatcacccgaggctctggagcatcgaggacccgtatctttacacctgtaacgtgcatattttcgacttctacacgaacgaggagctcgattcggtgtccgtgaagttcggcttcagaacgcttaagtttgacgcgaacaaaggcttcttcctgaacggcaggccgacgaagatcaagggcgtctgctgtcacgaggattacggtcttcagggcaaggctatctccaattctgtcaagcgttatcgtctggagctcctcaaagacatgggagcgaacgcctacaggtgctctcactatcagcagagcgagtacacgtttgaatgtctcgcggagctcggttatctcgtgatggctgagacaaggtggtttgagtcgacgaaggaagggcttgaacagctcgaggcgcttataaagtgccaccgcaacaatccggcggtcataatgtggtcgctcggcaacgaggagccgcttcacaacaacgacatcggcaagcgcatattcgtgaccatgcgtgagaaggcaaagcgctgggacgacacgagacccttcacgaccgctgtctcgaacaatccgggcgacgcgcctgtcaacgaggaagcggacattatcggcgtgaactacaatctgtgggactacgacaagctgcacgagaagttcccggaaaagatgatattcgcgtccgagtgctgcgcggtcggctcgacgaggggctggacgtacgacgacaacccgaagcgcgggtatctgcactgctacgacaacaggacgggctggttcatgtcgcgcgaggctacgtggaagttcatatgtgagcgcgagtggctcgcgggcggcttccagtgggcgggaatcgagcaccggggcgagaccgagtggccgagactctgctctcagtcgggagcgcttgatatgtttctccagaagaaggacgcgttctacgagaatcaggcgcactggacaaacaatccggtcgtgcacatctatcctcactggaacctcccggacagaatcggcgagacaataagggtctgggtctacacgaactgcgacgagattgagcttgtacaggacggaaacattatcggcaaggtacaggtagagaagtacggacacgctgagttcgacgtcacatacgcgcccggaaagctcgaggcgaagggttatcgtgacggtaaacaggtaggttcggatattgtagagacaacaggcgcgccggtaaggctcgagctggagcttatgaacaggcatgaactgaagaagggcgacgcggcgatagtgaactgctacgcgcttgacgaggacgggaagagagttccggacgcttccccgttcgtgaagttcgatataaacggcggaacgattgtgggtacagggtcggatatagcggaccatacgccggtgccggcgcaggacaggaagatgagagccgggataatcgccgtgtgcgcgtttccgggggaaaactgcacgatttacgcgaacgcggatgggcttgaacctgctcggataaagataagcgcgaagtgagggggaatatgcccaaagacacgccgtttgagataacgcccgaaatcctgtcatacacagccgatatctcggagatggtcggaaggataagcgccgcgaagaatccgtcgttaaacccgacactgagacgcgaaaaccgcatacgcacaatacacggctcgctcgcgattgagcagaacacgctgacgctcgagcaggtcaccgcggtgataaacggcaggcttgtgatagccccgccgaaggatgtcgccgaggtgaagaacgcctatgaaatctacgagtggatggacaggctggatccgtactcggttgaagacctgctgaaggcgcacggggtgatgatgcgcgggctgatagacgaggccggggagttcaggagccgcccggtcggagtggttgacggcgaggggaggataatacacttcggaaacctgccggattatgttccggggcttgtgaccgatctgcttggctgggcgaagaagagcaggctgccgatgctgataaagagctgtgtgacgcattacgagctcgagctcatacacccgttcgcggacggaaacggaaggacggggcggctctggcacacgctgatgctgtcgaagtggaacccggttttcgcgtggcttccggtcgaatcaattgtgcatgacaggcagaacgagtattatgccgcgattaacaggtcgaatgtcaatggggaatcgaccgagtttatttcgtttatgctgtcggcgatcaaggacgcgattttgcaggcggtcggggagtgagatgtgtcttgacattcaatgtgtggtatcgagaaccatcactcgacgcacatatcatgtagcgcacaaacctgtaggggcgtccatcggacgcccgcctcaaacacataccgcctttcaatattgtgaggatgtatgcaaaagagcgggcgaccaatggtcgcccctacaatggtagtgctatgctttcaatcaggtcatcaaccatcgcgacgccaaatgtgggaaatgaagtatattgcatgatattttatccgcctattgacaaatacaattatatgtgttatactacatacgttacattccggaggtgcatatatttatgaagaaacccgacaactacatctaccccgccgttctgacatatgaggacggatacgatatcgccgtgacattccctgaccttccgggctgtgcgacctgcggctc

SEQ ID NO: 3496 - DNA, 1523 bp, Unknown
  16S sequences of unknown bacteria
agatcgtcaaggcaaagtgccccaaccacgttgaggtcagccacatccgcggcggtcagcccgtttattattatatgatcagcgtggagtaattttcactcctgcgcttgcagaacacagaacaagccccctgcatccatcccggatgcagggggctttgtggttctggaaacctttatttcacgtacatcgcatcatttttcgcgaggaggtaaacgcaatattgattcatgctgatcccctctcgctgcgaatgctcggcaagcgagcgatgcagactgcgcggaagccgcagtttgaactgcccggaatattcctccaggctatccggctcatggatctcgattccctcttccagcgctgcttccagccatgctttttttgcgtcctgtgcatttgcgatcgcgcgttcgaccgtttcgccgcaggtaatgcagcccggcaagtccggataagagaccacaaatcccccctcatccgggtcctccaccaactccatccggtaaggcatcttcaaatactcattcagcgtcttcatcgttcttcgcctcactctccacgatctgccgtaccatttccacgtaaactttcttgataggttcatgtttggggatcgtaatgggcatacagcctgctttccggaaggtgtagtggctgctcccgcttctgggggctgtcatctcgtagccatagctttccaacacttttcgcagttcgtcgaaccgcaggtccttcgataaggcacagatgcgcgcaagcaacttatcccattttgacattccgaatccccctgttcccattatatatggtgtcacatatggtgtcaagtatttttagaaaaaactcacctggctgctctccggcaggtcgccgagggcacgacgaccataccgccggggtgctgggcgggtaggtgccgcgtgggatggatacgccttttctttgggcagatagctgaacggtttcagcatgtcctcggtggtacagtagatggcgtcgttcggttcagcccttttcaattgttctttttcggcagctcttacagccactgtttcagcacgtcgttcagcttattcaggtccagcggtttggcgatatgttcgttcatgccggtgttcttggccagctgcacgtcctcggcgaaggcgttcgccgtcatggcgatgatgggcactttgccccggctgccgggaagggaacggattgcagcagtggcttcgtaaccattcatgataggcatctggatgtccatcaggacgaggctgtaccagttttccggggccgccgcgaccttttcgacggcgatctttccgttttcggccgtttcgaccgtcacgccggtcatgcccaggatctcggtcgcgatctcgcggttcaggtcgttgtcttccaccagcaggagccgcttgcccgtgtagtccgtttttgcaaagtcttccagataattccgggcgtttttctctttcttgccggaggtgaactgccgcagggttgccgtcaggcgggagcggaacagcggtttt

SEQ ID NO: 3497 - DNA, 2149 bp, Unknown
  16S sequences of unknown bacteria
gcacataggttttcagcttgttcatcagtccgatgccccggccctcctgacgcatatacagcagcacgccccggccttcctgttcgatccgtttcatggcggcatggagctggtcgccgcagtcgcagcgcgccgaaccgaacacatccccggtgaggcactcggaatgaacccggcacaaaacgtctttcccgtcgccaatctgtcccttgaccagcgccacatggctttcaccggtcaggtcgtcggtataaccgaagatacgaaaatcgccgtaggctgttgggagtttggcctctgcctcgcggatcacatgtttgtcgtgcaggcggcagtaatcctgcagggccttgatggtaacgaccttgacgccccagcgcccggcgtgctccagcagctctgccgtgcgcatcatggtgccgtcctcgcgcatgatctcgcagcacagcccgcactcagtgaggcccgccagccggcacagatccaccgtggcctctgtgtggccgctgcgcgccagcacgccgccccgccgggccaccaggggaaacacatgccccgggcggcggaagtcctccggccgggcggagggatcggcgcacctgcggcaggtaaggccccgctcttcggcgctgatgccggtggtggtgctgacgtggtcaatggacacggtgaaggcggtgccgtggttgtcggtgttcaccttcaccatctgctccagccccaggcgggcggcaaccgcctcgctcatgggggtacagatcagtcccctggcgtattttgccatgaagttgacgttttccgtagtggcaaactgggcagcgcagatcagatcgccctcgttttcccggtcgggatcgtcaatacatacaatcagttttccggcgcgcagatcttcgatcacttcttccacagtgttttgttccatgtttcgttcctcctttgcggttcgcagtttatggtttctctgtccggaaggcgccgaaccctccagttggttttctttgctgcctgttccgtgaaagcgctcaaaacccattgcggcgcaggaaatcctctgtcaggcggctctccgtgggctgcccctccggcaaagccgccggtgcgcttttgtgcagcagcgcgcgcacatattttccaatgatgtcggtttccaggttgattttgtcgccgggccgtttgcgcagcaatgtggtatccgtctgagtggtgggaatcagggacacggaaaaggtgcgctccgtgcgctccgccacggtcaggctgacgccatccagagtgacggagccttttttcaccactagctccagcacatccggcggggcagagagggtgagccaaagggcgctgccttcctgtttggtgttcacaatttccccaaggttatccacatgcccgctgacaatatggccgccgaagcggccatttgcggccagagcccgctccaggttcaccgcttctcccactttcagcgcacccagattactgcggcgcagggtttcagccatgacatcggcagtaaagccgtcgcggctgagggccgtcactgtcagacacacgccgttgacggcaatgctgtcgccccggcgggtatcttccagcacccgccgggcgccgatggaaaggctgccccattcgccgcccgacaccaccgcgcgcaccgcgccgatttcttccacaattccggtaaacaccgttaaaacgcctccttttcccgtgccagcacatcataggacagcagcacatcgcggccaaaaagttcgatctccggcgcacccagtgcaaatgcctccgccgggtcgggcgcgcccaatccccccacgggggattttgccccggcgccgcccaggagcatggctcccacatagacgtacagccgctgcaccacaccggcgcacagcgcgctgtactgaacctccgcaccgccctcgatcagcacgctgtcgatctcccgcgcgcccaattccctcatcagggcgacccagtccacccggccgtccgcaccgcccagacacaatacctccgcgcccagtgcctgaagctgcgcgcgcttttgcgcgttttccacagcgcatacaaaaatggttttctgcgtctgggctgtccggcatacccgggcggacaaaggagtgcgcaaacggctgtccagcac

SEQ ID NO: 3498 - DNA, 10078 bp, Unknown
  16S sequences of unknown bacteria
cgaattgctccgctgcgaagcagctcccgcaattctgcaaacattcgaaatccgctgatttactacgtaaatcgctactttctcatgtttgaccttttgaccctggcatcatcatcattttatatcagaggcagcactattggcagtctgcgaggagtcgctttctgtctgaatgtgctgtcggattatatgccggatagaatcgtgcagatatgatcggatcgcatcaatcggtacaggctgttcatagagcagaggattgtaaatggagccactgaccagctcgatcagcatgtagatcataatctccgggtctttgaagtcatagccggatgcatgcagaagattcataaagataaggtagacattctgctcattgttgtctgttccggcgatcagattgttgcggaagacgccccagcttaagtgcttggataaaaagccgagcagcgacttgtcccggataaggcgctggatgatgtaatccgtgatatagatgatctgttcttcgatcccggtcaccttctgatcagtcagcgcgtgatatgcatccagaaacaggacaccggctttgtgggcgatcagcttgttacggagatcgtatttgtctgaaaaatacaggtaaaaggttccctttgcgacccctgcattgtctacaatatctgaaatcgaagtcttctggaagcctttggaagtaaagagagagaaggctgtattcagaagagactcttttttctgttttttatttacctcaatctttcccatagtattcctccgaataaaattaaagaagcgttccgcgaaaaggttatttacactattattacaaaaactctaccataaaagaaatgtaaagtcaatgtgaataatgactaaaagtcatttttaaaacatgcagaatttgtatttctttttatgggggttgacggatggaaaagggatggtgtaagatgaatttactattatgcggatacggacaaccgctcataaagcgtcatcaatatccagtctgccggctgctgcaaggcccggtgcgctgcgtattcatggcgctttcctgctatagaatatctccggggcaatgaacggaaggtgtgtggagggtcaaatgaaagaaaagaaaaagaaatggatactggatatcctcacggatatcgccggaggactgcttctgagtattgcaatttacagctttgcggtgccggcagactttccgatgaccggtgtatccggtgtggcactgattttttatcagctctttgggcttccggttggcgtgatgacagtggcacttaatataccgattattttgtgctgctataagacacttggaaagcaattttatctgtcttcgctgaagtcgacactgatcacatcggcggtcatggatcttgtcggcccaaggcttccgctttatcagggtgatctgatactggcggcaatctgtgccggggttctgctgggcatcggctatgcgattatttttatgcgcggatcatcgaccggaggctttgactttattatgatggcgatcaaatactatcatcctcatctttctctggggaagattgcgtttgcaatggatacgcttgttatcgtcatcggcggatttctgctcggcagcggaaatgcggttatctatggcctgttgctgaattatctgtattcgaccgtactggataaggtcatttacgggacaagctccggcaagctgacgctgattatcacggactatgcaccagagatggtgacggcgatcgaccggatatccgggcgcggcgcgacgattctgaatgcatccggcggatattcaggtgagtcgaagccggtcgtcatgtgtgcgagcaacaataaagagatgtacgcgatccggaagtgtgcacatgaggtggatccgaaggcatttgtcatcattgtggagtcaaacgaggtgatcggagaaggctttcgtttgccgggagatacaaatctgatgtgagggatagaagatgaaaattttggtaagtgcctgcctgctcggcgtgtcctgccgatatgatgggagggacaatgggctccggcagcttgaattgattgcgcgcgaagcagaactcattccgttctgcccggaggtgtatggaggtctgccgactccgagggagccgtctgagcgctccggggacggcgtcgtatcaagaagcggacgggacgtgagcttgcagtttgcaaaaggggcaggagaggccgtgcgtctggctgagctgctcggctgtaaggcagctattttgaaggagcgcagtccgtcctgcggtacacaccagatatacgatgggacattttccggggtacggattctgggatacggtgtgactgcagaatggctgcggcgggcaggtctgcagctgttttgcgaagatgagctggaggactgtcagaaatggatacgggagcaaaaggagggaacaggatgttaaaggatctggtaaaggcgaaccgcagctatcgcgggtatgatgagagtcgctgcgtgacaaaggaagaactgctggagatggcagactgcgcaagacttgcggcatccagtgtgaaccggcagccactgcagtactacctcgcatgggagaaggatgaggtggataaaatccaggcactgacaaagtgggcgaagggactgccggagctgacgcttccgcatccgcatatgtgtccgactgcctttattgtcatctgccagaatacaaagcgcggcgagtcgttggtacggtttcagagggatgtcgggattgcggctcagacaattctgcttgcggcgacagagatgggacttggcggctgtatgattggcaattttggcgcaggcagcgtcaaagaagcactttctcttccggagtatctctcaccgatgcttatcgtggcgatcggaaagccggcagagacggtcgtgctcgaagaagttgaggatggtgagagcatcgcgtactaccgggatgaacaggatatacatcatgtgccgaagcggaagcttgcggatgtcgtactggatcgaagtatgctcaggcagcattaaaaatgtataattatataaaaaacacgtggagaaacacggggaaaatacaggaggagcaacgaagatgagaaactggggacgttttatttatcagccggttttgccgatgggcaaggacgggacaagaatcaccggatcaaaagagcatatcgccttgtcgagggaggcggcacgggagggtatggtgcttctgaaaaatgagcacgatgtacttccggttccggctggaaaaaaggtcgcgctgttcggcaaaggcagcacagattatgtaaagggcggcggcggaagcggcgatgtgaccgtagattatgtgcgcagcctgcaggaagggatgaaggtaaaagaagcagaaggaaaggtcgcagtttatgcacctctggcggacttttatgagaaggtgacgaaacagcagtatgccggaggtgtggtgccgggcatgacagaggagccggagattccgcaggagctgctcgcaggggcgaaggcatttaccgatacggcgattatctcgatctgccggttttccggggagaactgggaccggactgtgaaagcgggcgagctgcatatttcagaataccagggggaagaggagcgccagctgctgtcacgcgcagaacaggtatttgagcgtggtgatttttacctctcaaatgcggaacagcgtatggttgatgtggtaaagcagaattttaaaaaggtcatcgttgtgatgaacgttggtggtatggtcgatacctcatggttctgtgcggatccggatattcaggcggtgcttatggcatggcagggcggtatggaaggcggtcttgcggcggcagatcttctgtgcggggatgcatgtccgtccggaaagctggtcgacagctttgcgggatgtctggaggattatccgtcctcagagggcttccatgattcagaatattatgtaaattatacagatgatatttatgtcgggtaccgttattttgagaccgtaccgggggcgcaggagaagatcatctatccgtttggcttcggactttcctacacgaagtttctggtaaaagagcgggatgtgcagatggatgcggatggcatctgtgtacgtgcagaggtgacaaacattggtgactgtgcgggaaaagaagtggtacagctttatgtgtcagcaccgcagggactgctcggaaagccggctaaggaactgaaagcatatgtgaagacacgccttctgcagccgggcgagcgtcagatcgtaagtctgaaggtgacgccgtatcagattgcatcctacgatgatctcggaaaggttcaggcgtttgcatatgtgctggaaaggggagactatcagttctggctcggaacgagtgtgcgtgatgtcagggaagtgtccgcggtgtataccgtagcggagacaatcgttgtggagcagctggaaagccgctgtgcatcgaacctgttaagagaacgtctgcgtccggatggaacgatggaagagctgccggttgatgaggcaaaggtgcgcatttcagactgggatccgaagcagactccggcaaaggatccggatgtacgggcagcacatggctcactgcttggtgtatcggagagatcggtgcgcctgatcgatgtcgcagaaggaagagctacgctggaagcctttatggagcagctttccgtggatgatctgatctccttactgtgtggacagccgaacactggcgtggcgaacacgtatggttttggtaatcttccggagtatggtgtaccgaatattatgacggcagatggtccggccggtctgcgtatccgtccggaagtcggcgtacacacgactgcattcccgtgtgcgacgctgctcgcttcgacgtggaatgaagcactggtagagcaggtaggcgcagcaggtgcggcagaggtactggaaaataatattgctgtctggctgaccccggcgatgaatattcacagaagtccgctgtgcggaagaaactttgagtattattcagaggatccgctgatcgcaggaaagaccggtgcagcgatggtgcgcggcattcagtcccgcaatgtggcagcatctgtaaagcatttttgctgcaacaacaaagagacctgccgctttgagagtgattcccgtgtctctgagcgtgcgctgcgtgagatttatctgaagggttttgagatcgtcgtaaaagaggcagatccgtggacgattatgtcttcttataatattgtaaacggacagcgcgattcagagaataaagatctgctgaccggtatcctgcgggatgagtggggctttggtggtcttgtgacgacggactggtggaaccatgcggagcaatatctggagattcaggccggaaatgacgtcaagatgggatgtggctatccggagcgtctgaagaaggattacgaagctggaagaattacaagggatgagctggtagtgagtgcgaagcgcgtgctggagctgattctgaaggtggactgaagcacggactgtgacaggatgtgatcacagagtgcgagaaatttgaggagtgacatggaacagacaataaaacaaacacgtacgaaacatatgacagatggaagtccgttgcgcctgctctttctgttttctctgccgttgatggcgggaaatctctgtcagcagctctacacggtagtagatacagcggttgtcggaaagcagctcggtgtggacgccctggcagcgctgggagcagtggactggctgaactggctggtgctctctgtgatccagggctttgcacaaggctttgcgatcctgatggcgcagcagtttggcgcgggcaattaccacagactgcggcaggttgtgacaaattcgatcgtgctggcagtgatttgcgcaatcggaatgacagcagtagggcagggatgtgccctggcagtgctggagcttttacatacgccgatagaaattcagccggtatcgatagcatatctcagggttctgtttgcgggcacgccggtcgtaatggcttataatttctgtgccagcgtgctgcgctcattaggagacggaaagaatccgctacttgcgatggtgattgcttccgttgtgaatatttcgctggattttctgtttgtcatgggatttggctggggcgtacagggagcggccgcggcgacggtgctggcacagctgatttccgtcggcttctgcctgatgcagctgaaaaagattgcggtactgcatctttcaaaagaggactggaaaatggagcgcccgctgatggggcatctgctcatgctcggcatcccgatggccttccagaatatggtcatttcggtcggtggcatgattgtgcagaccgtaatcaatggatttggagttgtatttatcgctggatttacggcgacgaataagctgtacggactgctggagacggcagcaacctcctacggatatgcgatggtgacttatgcgggacagaatctgggcgccaggagaaaagaccggatttcacaggggatgcgggccggtttatttatttcctttgtgacatcgctggtgattacagttctgatgctcgtgcttggaccgcagattctgagcctgtttattgcagacagtgcaaaaaacggaggtgaggtgcttgcgattgcgtaccggtatctgaaaatcatgagcatttgtcttgcaattctgtatgtgctgcatgtgacgcgcagctgtattcagggcatgggtaatacggtgttgccgatggtatccggcattgcagaatttgtcatgcgtaccggcgcggccctgattcttccgcgactgctcggtgaggacgggatcttttatgcggagatattagcgtggcttggtgcggatctggtgctggtgccgagttatttctatatgatgcggaagcttcacagaacgcgggaataaagaaatcaaacagggataaaagaggagagagaccaatgacttatcaggatattatggagcaggcaagagggactatgggcgtttactgcaaggtctgtccggtctgtaacggaagagcgtgcaaaaatcagcttccggggcctggggcaaaaggtgtcggtgatacggcgatgcgcaattatgaaaaatggcaggagatccgtgtgaatatggatacaatcagcgagaaccggccggtggatacgtcactttccctgtttggaaaaaaatttcggtatccgttttttgcaggaccggtcggtgcggtgaatctgcattatggtgagaaatacaatgatatggaatacaaccagattttggtgaaggcatgcagtgagaacgggattgcagcatttaccggggatgggacaaatccggcggtcatggaagcggcatcgaaggcaatcgcagcagagcacggcaacggaattccgacgatcaagccgtggaatgtggatacgctccgggaaaaatatgaactggtaaaaatgtccggtagctttgcagtagccatggatgtggatggagctggacttccgtttctgaaaaatcttgatccgcccgcaggaagcaaaacagttgaagagctgcgtgtgatcgctaaggctgtgggggttccgttcattgtcaagggtgtaatgacggttcgcggcgcacgcaaagcgcaggaggccggggcggcagcgatcgttgtcagcaatcacggcggccgcgtgctcgatcagtgtccggcgacggcagaggtgctcggtgagattgcggatgcgatgcggggcagcggtatgaagattttcgtcgacggaggcattcgcagcggcgttgatgtactgaaagcactggctctcggcgcagatgctgccgtgatcgcgcgtccatttgtgacggccgtctatggcggtgcagaggaaggggtaaagatatatatcgagaagatcggagcagagcttgcagatgcgatggaaatgtgcggtgtgcatgacctcaaatcaattacacgcgagatgatccggctgccgcgataaatgcagataagcatttcctcgctttccgtgcgggaagtactaggcgatgggcggggatgcgactgcgaatgtgcgctttacttaaagaaaggaacaggcatggaatatcgggaagaccgaaaggggcagagactgtccattttaggatatggctgtatgcgttttacgaaaaacgggtcagcagtggatctggataaagcagaacaggagctgatgtatgcaattcgtcacggtgtcaattatctggatactgcctatgtatacgcaggaaatgaagaagcagtcgggacaattctggagcggaatcactgcagaagggacatttttctggcgacgaagcttccgcattatctcattaagtcaagagccggtgctcagaaaaaatttgaggaagagctgcgacgccttcggactgattacattgatttttacctcatgcacatgctcaacgatgtgaagacctgggagagtctggtcaggatcggcattgcagactggatcgcagaaaagaaagtgtcaggagagatccgcagcataggattttcctatcatggcaattctgaaaatttcagggcgctgctcgacgcatatgactgggatttctgtcagattcagtataactatctggatgagcattcccaggctggacgggaaggactggagtatgcggcaaagaaaggaattccggtcattattatggagccactgcgcggtgggaggctcgtacagcaccttccgcagacggcaaaggaacagatcgcatcatccggtctgtttcagacatcggcagagatggcgcttaaatggctgtgggatcagccgggtgtgacctgcgtgctctccggtatgaattcgatggagatggtacaggaaaatatccggatagcggaagaatcccatgtgagcatgctcacggacgtgcaccgggcgctgatcgggcaggtaaaagcagagattcaaaaatatatgaaagtaccgtgtaccggatgtgcttactgtatgccatgcccgcagcatgtcgacattccgatggcatttcattgctacaacgtaaaatattctgagggtaaaaaatccggcatgtgggagtatgtgcagtcgaccgcgatgcgccgggagacgtccagtgcgtcacagtgtgtgggatgcggaaaatgtgagaagcactgtccgcagggaattccgatccggacgatgctgaaggaggccgtaagagagctggagacaccgaaataccgggtgctcaagtgggcggtaaagacattccggatttattgaacgcagataagcattccctcgctttaaggaagaaaacagatgaaaataaaagaaaggagcatttcaaaatgaacgaaatcattcagtgcttaaaggatcgcagaagtgtgcggaagtacaaaaaggagcaggtaaaagaggagcagttggcccagatccttgaggctggcacatatgcgccgaccggaatgggtatgcagtccccgatcatggtcgtggtacaggacgcggagacgatcgcgaagctgtcaaagctgaatgcggcagtgatgggcgtgacctccgatccgttttacggagctccgaccgttattgttgtgctggcagaccagagtcgtggcacctgtgtggaggatggcagccttgtgatgggcaatctgatgaatgccgcgtatgcggtaggcgtagattcctgctggattcaccgtgcaagagaagtgttcgcatcggaggaaggaaaagcgctgctggcacagtggggcattgagggagactatattggcattggccactgtattttaggctatcgtgactgcgagcttccgcaggcaaagccgagaaaagaaaactatatttaccgtgtctaaagaagtgtttgccacatcccgttgaattgtataaaattgttttgaaaatttgtaaaaaaaggtattgacaacttcaaaacattatattataattcttcttgcgtcaagcgaagggcgttcgagataccttgataacggggtgtggctcagtttggctagagcgcctggtttgggaccaggaggtcgcaggttcgaatcctgtcac

SEQ ID NO: 3499 - DNA, 18027 bp, Unknown
  16S sequences of unknown bacteria
ggggcgggccgcaagagtcgccgtgccgctggctttctttggtactttctttcgcctcgaaagaaagtactacccctctcggggcggcagccccaccgtccgcgccgtagtcggcgcgtcaagcccccggcaggggctcacatacaacaaagttgacttttcccgctgcttgcagggggctttccgctagccccctgcaccccttcgggccgtatcatcgagatacccactcaacagaataaacataggctttcctcgaaaaaaacatcgacgcgacccgcactaccgcgctccgcttgttgtttgtctgccttccttcacccccaaaaagcgaatgcaagccccgcgccaaaaccaccttctcactctattggcattccaacacgcagccgctcctccaaaacattcccgtaccgctgaacctcgtcccccaactgcgccgcccgccggcgtacctccgcgtcggtatgaaaagcctccggacagcgccgtaccgccagtgcttcccgcagtgtccccggcacagggcaaagcccccgttccagcgcccagtctccggcggcggttttggcgataatgccgcctgtttccagcgtgtatagacagcgggaaatgtccagcagccatccgtaggaatacagactctctcccgttgaggaaccgtactgccgaatggaacgcaaatgctcctccacgccccggcgaagctcctcccggctgggacggtgcatcatggggcgcacctcctccccggccagtaaaatgccgaagtccagcagctccaccatggaaaagcagtcgaaatggtactgttccgtcacccgctgaccgctggttccccagtaaaccgccggttccggctttcccgtcagaaaagcgtccagcgaaagcatcccgccctcaaaggaacgataataaggattccccggctccgtcttcagcagcgtctgccgaagcggaaccagttcctcccgttgggccggagaaatcggccgcttcgtcagacacagaaaatcaatgtcgctccatcccaaatgaaaatcatccatggtcacggaaccgaacaagtaaagagacggctcctgcccgtccaaaatttgaaggatttcccgtgtcatgacctgaatcgcctgtttcatgaaaattcctttctgcgccctcgtgcagcgcatctttccccgccaaggcgcataggctgacctcagcaacaggaaaggagccctgctatggcggcaagcatcattacctccgtcaaaggagacgtgacctatgacggcattcccgatacggtttctctcatcggcgtacagtttggagattccaacgcatggcagcagatgagcctggtcatccagaacggcgccacaggccggatcacggccatcgccctgccggaggacgcggcctacgccccgtccattgcgctggtcagcctgaccagcaaggataaacgtgatattctgctgtccctccccaccggcggaagcggcgggatcactaattatatcatttatacctgcgatgacggagccttccggcaaattttttccagcgatgattataacgctgcctatccttatcagattcagtatctggacggctacgcggtcaaggccgccagcctgcagaaccggcaggagtacttcattgatctgaccgggaagggcagcgcctatctcacccagctctacaacgccgacggcagcctgcgggagccgatggaaggcttcgtcaatcccctcagcggcctttaccccatcgactttgacggcgacgggcagttctccctgatggcgtggcagcggatcgccgggctgtataacgccgattcgctgggatattttctcaatacgctggactggcgggatggagccttcgtgctcaccgaccagatggtgggcattctgggcagcgaaagttaacagcaaaaaaacccgcattcgccttttttgacgaatgcggggttttccttattatttgcccagatattccagattttttcggatcagttcgcagcgctggcgcacgcagtccggggaacgcagggaatcggcgggcgtgtggaacacatagtcgcacaggcgatccacggtggtctcggccacgtgcatccgggtatcggacgaggcgtagtaaaggaacacgcgcccgtcctcatccgcaatcgcgccgttggtgaacaccacgttgctcacatcgcccgcccgttcccggcccagcgggcccagcagcatcccgccgggctcggcaatgaccttggacgggtcttccagcgaagtggcgaaggcatacagcacgtaccgcagcccggcggcggtgttgcgcacgccgtgggcgatatggatccagcccttgttggtcttgatgggcaccgcgcctgcgccgttcttgctttcggtgatggtatgataccgccgcagactgatgatcttctcctcatcgataacagcgttcgtgatgtcgtcgcacaggccgaagccgatgcccccgccggagccggtctcgatgaaatcatccatgggccgagtgtagaaggcatactttccctccacaaattccgggtgaagcaccacgttgcgctgctgaggcgaacgcagggtgcgcaagttcggcagccgctcccacgttttcagatccttggtgcggacgatgcccgcagccgccacggcggcactgagatcgttcacactggtgtccttgctttccgagcagaacacgccgtagatccagccgtcctcatgctgggtcaggcgcatatcatacacattggtctcctcgggctgcgtgtccggcagcaccacgggataatcccagaaacggaagccctcggtggggctgctgctttcagccacggcgaagaagctcttgcgatccatgccctccacccgaaccaccagataatatttgccgttcagcttgatcgcgccgctgttcagcgcggcgttcacgccaagacgctgcatcatgtagggattggtctccgggtcggcgtcgtacatccagaagggcgggaggtgctcccgggtcaggacggggttctgatagcggtcgaagattccgcagctaatcgttaagttaacaattgggtttcatataattctttgcctgttctctgtcaatatcgttccttttgattcaaaaaccttctttttatagtgaacagtgctcaaaaaatacttttcttctttttcagaacagggtataatggttcaggttcactaaaaggcgatgctacttggaggagggattttcccatgaaatcattttccatccgcaatcatccgatgatccgtctctccggccgtttcgacccggcgcaggagggttttcccatgctttggagcgcttcttcggcggaaatgaacgtccgcggctcctcactggaagtgcagatcgactgtgcctatcgtacccacaagccctatctttccttcgaggtggacgggcttcgggcgcagaccttcgcgccgctgcccggaaagcactggtacagcgtctttcttcatctgaagcccgacaccgttcacaccgtccgtattctcaaggaaagtcaggccttcgaaaacgacccgtctgccggatgcgtgctgctcaaaggacgcacagacggcggactggatccgctgccgccccgcaagcgcaaaatagagttcatcggcgacagcctgaccagcggtgagggcggccgaggcccgcaatcctttatggaatgggtgcctatgtgcttcagcgcgtccgataactacacccgcttcgtcgctgaccgactgaacgctcaatatcagctggtttcccaaagcggctggggcgttcactgcggttggaacaacgacccccactgcaacctgccccggatctacgaccagctctgcgggccgcaggccggtcaaaccccggaggaaaactggggttcgggcaagctttatgatttttccttccagcccgacgatgtggtcatcgcactgggagccaacgacaacggcgctacgaagcagccgccctttaccgaccctgtcacgggccgcgaattcaagcttcacgacacgtcggaggacttggcggtattcgagcacgaagccttggatttcctgcgccaccttcaccagcggaaccccggcgcgcggctcacgtggttctcctacttccgggagaatcccatcgttcaggctaccaggcgggccgtggaaagagccgctgcggaagggattcccgtccagttcggctcggtggatggggaaagtctgcccgcctcctggcagggaagccgcaatcatccgggcgttcgggcggagcagtacatggcccgcgcgctggttcggctgctgaaaaaataactttcttttcttccgatatttgcaaccttacggaggttttttggacttgctgacccgatattttggccccatcaaacaggccgtggtggttttccctctgatcgccggtttcttcaccctgccctatcttctgcacgagtaccgcaagtacggcgcgattctctttctgcgcacattgatggtctattcctttattctatacatgatgtgcgcctattttctcattatccttcccctcccgccggtggaggaagtggcggaatacacctcgccatggcttcagctgaaacccttcaacgaactgctggacgtttttcgggaattgaaagatgatctggccgatttcgcctctatcaaacaaattctcaaaaaatccgcgctgttccagattattttcaacattctgctgaccgtgcccttcggcgtctatctgcggtattttttcaaggccagccgaaaacagaccgtcattctttcgctggccctgagcctgttttacgagctgacccagctcagcggcctgtatttcatctatccccgaccctaccggctagcggatgtggacgacgttatcaccaatactctgggcggctatcttggctatctgatcgccccgaagctcacctgcttcctgccttcggccgaccgaatgaaggaagttgcctatcagcgcagcgaacacgtgtccattctgcgccgactgtttgcggcggcgctggactgcatgattctgctgattttgttcttcgtcgtgatgatcaacgttctgccccttcttccctccgcaggtgaaagccagctttccgtttttctggcagtgctgatgccgttcggcttctatacgctgtttgtaatgctatatttcggcgtactggaatggctcatgggcgggcgttcccccggcaagctgttcttccacctgaagctggtggacacccgcaccggcggacgacccaagctgtggcagtatctggtgcggtacggcttcttctatctgctggtggtgccccttccgtttctggcgctgctgatgttctttgtgcaggatgacgggctggcgctggtgctgggcatcgtcctcggcgcgctgttcctggtcttctgcatcgccgcggtggtgcagtccggtctcaagggcaaccagcttccccacggctatttcagcaagaccaaggacgtgagcactctcaacgcctcccgccgcaaaaaggccgggaaagccgcaaacatttcttcggacttgcccaaagaaaactaaaaaatgcccgttcctccgaagcgatgctgcttacgaagaaacgggtattttttattcagtttcctgaccgtcgtagcggggcttctcgccggaaagcacgtcgcgcacatatcccgccagaatgctgacgatccgggcgtttttgccgccgtgggccacgatcacatccgccaggtcgatgtaattgcggatgtgcttgtcgtacatgggtttcaccgtggtcaggtactgcacggagatattctcgatggtgcgtccccgctcgttaatgtcccgggtgatacgccgcagcaggcagatatccggctccacgctcatgtacagcttcaaaaacatcagctcgcacaggcgctcgtcgtagaacacgtggataccctcgatgatcagcacttccgtgggatagatcagctcgtccgtatcagcccggcggtgattggtgtaatcgtaacgcttgcgggtaatgggcttgcccgccatgagggtcttcatgtcctccagaaagaggtcatggtcgaaaatttccggttcatcgtaattgagctgctggcgttcctccagcgtcaggctgggatgatcgcgatagtagcaatcatggttgatgaccgtggcgcatgggccgatggcgctgctgagttcctgtgccagagtgctttttccgctgccgcttgcgccgcagatgccgatgaccagcataatttcgtccccctccgtgcttttgtggtgccttacagtcgaatcagctcgtagtcccgcgtgcccagcccgatcttctccgcatggctcaggcagctctgccattccgattccggggtggaattggtgaaatggtcgtgatgatccacgaaatggggatcccgcatatgctcgcccagctgactgttgggcaggggctcgcacttcatgcacgcgtccacgcaggcctgatccagcgccagcgggtcgaaggaggcgaacatgcccacatccggcaggatgggcgcgtcgttttccacgtggcagtcgcagttgggggaaatatccatcaccagcgaaatatggaactggggccgcccgtccaccaccgccttggcgtactcggcgatgcggtagttcagcatctggttggagttggggtcttcaaagtcgatcgcatcgaagttgcacgcacccacgcaacggccgcagcccacgcagtgttccttgtccacgtgcatcttgcgggtctccgggtcgaataccagaccgttgttggcgcactcccgcatacagcggcggcagccccggcagatttcctgctgtacataggccttgccgttgttgtgctgttccttcttgcctgcccgggagccgcagcccatgcccagattcttcagcgctccgccgaagccggtggtctcgtggcccttgaagtgggtcatgctgatgatcacgtccgcatccatcaccgcccggccgatcttggcgttcttcacgtattcgccgccccgaaccggcacttcaatatcgtcggtgcccttcaggccgtcgccgatcaggatgggacagcccaccgtcagcggggtgaatccgttctcccacgcgcagtacaggtgttccagcgcattcttccggctgccggggtacagcgtgttgcagtccgtcaggaagggcttgccgcccagctccttcaccacgtccaccacggcgcgggcgtagttgggccgcagatagctcacgttgcccagctcgccaaaatgaatcttgatcgccacaaactgcccttccagatttaactgggcgatccccgctttgcgaatcagctttttcagctttccgggcatggtgtccccgccgtagggcgttcgaaaatccgtaaaatatactttggccttctccatggaagacgcctccttcgtgtgatacggtcagcgctgctggcccagaatatcctgatatttctgatagctttccgtccagtcccgccggggttcgtccgccagaccgtcaggcaggctctcgccctcccgaagcacatagcccagcttgaaggtcgtgtaaacagacccgctctccacctgaaacgcttcgctgctggcctgctttccatcgccggtagtcaggcagctggagatcatccgcagtccttctacgctttgggcaatgtccagttccgggtaggcctctgcctgcaaagtgtaagttcccggatagacctgatcgaacagataatatcccgccgcgtccgtctcggtctcgtaggctttcgcgccgtccatccacagggagaccttcacgccgggcagcagccgttcgccgccgtcgatcagcccgttgccgtttccatccagccacgcctgatcgcttaccttggccggttcgatgaaccagatgttttccttcaggcggtgtttggccatttccagcaccaaaacgccgctgcggcccgtagtctcgttcgagctttccacgatggtcgcgccgttttcaaaattggggtcgttctgccgcacgaagatcatgccttcgggcaaatcgctttcaatctcatattctcccggccacaggccgtcaaaacggtaggaaccatcctcgccggtggtcacggtctgcagggcgctttcgcttccggcctgatacagccgaatattcacgcccgctaccggggtatcgccgttttccagatgcagcgtcagtttgccgccgatgctggtcttggataccagaccggcgctgatgcctgtgacgttctcgccttcctgaacggtcaaattcgtcatttccataaagcttccgctctggcggaacgaagcgccgctttctcccgccgcttccgcctgtgcaggcagttcaaaccgcagtagatacgttccgggccgcacattttcgaaacggaacccgtcctccgtgctggtggcggccgccgcccggttgcccgtcgcagggttgaccagttccagcgtcacgccgctcaggcgttgttcttccgtctgccgggcgccgtccttgttctcgtccagccagaggtcgccgctgacagtcgcgggcttaaccgcgccgagctccagtttttcccggctgaccagcgcctgccagccaatggagagcgtctgctgctgcgccgcggcaaaggtcagctccatgccggactttccgctgaagatccagccctccggcagctctaccgtcagccggtactgcgcgggccgcaggttttccagccggaagctgccgtccgcgccggtctgcaccgttgcttcctcggcagatgcccggtcgggagtcagcgtcaccgtcgcacccgccaacgcctgtccgtttccgtctgccgtgatcgtcccttccaatgtgcccagttccaccgcgcccgccagcggcagctggctgctggtgcccatttctactttgaacgtgggcgtttccgcctcgctccgggtattgccgttttcagccacccgcgccatgacggtatgctctggcagctgatatgtcacctgataggttccgggcatcacgccgtcaaaaagaaaatcgctgttttcgtccacgttccgcgtccagtcggtttctccgtcctcggacagcagccgcaccgtcgccccggccatgccggtctctccttcgtcccacaggccgttgtcgttcgcgtcatggaacagctggcccgtcaccgtcgatgcgggcagcatcccggcattgatctggtcgatcagcgcccccatggtcacttccatgggagctgttttgccaaagccgtccagcagttccacaacccagctgccgccgtccagttccggccgcagacgggtgaagcccatgccggaaacccgcttaaattctaccgtatacgttccaggcatcaggccgtccagcgcatacttgccgtcggcgttggtcgtcgtggtcgccgcaatcgcgccgttttcgtccacggcctgcacctgcacgccggagattcgcttttccttttgatccagctggccgttatagtccgcgtcctgaaacaccgtgccgcggatcttcgcgcccatggccacgcccaccaatgcggaagcctctcccccgctctgcagggtcaggggctcaatagcgctttcccggcgggaatagcgctgagcggctccattggcgttctctccgccgttttccggcacgatggtgaaaatgctgccgtcgtccggcaaaatgatccgcagccggtagtccccgccccgcagcccttccagtcggaagctgccatcgtcatccgtctctgtttttcccatggattcgccgttgctgatcttaatggcctccatggtcacatgggcatagccgggctcgccctcgtcataatagccgttgtagttcaaatccaaaaaagccttgcccgtcagcgcgcccttctggatcacgcccacgtttttatccttgaccgcttcgccttgccccacggaaaattcccgttccagcgtttcaccggagaacacgctgcgcaggtcgccgcccgttctggaataccgggcatacaaaagcccgtccggcagttcggcggtgaacacatagcgatctttcggcaggtcggtaaaagtgaacaggcccgtttcatccgtcaccagttcaaaggtctgtcccgtctttttcccggccagccgcagcgtcacgcccaccacgcccgggtcgttttcgtccataatgccgtcgttgttcaggtcctcaaaaacctttccgctgaaagaacccatttccgctccctgagcctgcgaaagccaaaagcaaagcgccgcgcagatcagaacgatcaacactccatatttttttgcgtgcttccaatggttcattcttccgcctccattgagccatcaacattcgaatcctattctatagtaaatcatcccttcttctttgtcaatgcgcatggcacttggcgcagacggtgtgaaaccttattgaccgaaccaaaaccatcctacgtataaatgttagcaatttaaaaagccccgtccgaaacggacggggcgcaggggagaaacccatcaacgcatttaaccctttacggcgcccgaaacgatgccgctgataaaatagcgctgcataaaaacgaagaaaatcgtaatcggcaggatagccagcgtcagagaagccagcccataatcccatctcgtgtaatatgaagagaagaaagcatagaccgccgaagtcagcgtcctcatattgttggaacgaaggatcaaactggggaacgtgtagtcgttccacacccacagggcaaacaacaccacaatgctggctgtcgaggtcttcatcagcgggaatacgatggaaaagaatacacggaagggcccacagccgtcaataatggccgattcctccagcgccacaggaacagacttgataaatccgtgatatacaaacacggcgaagggcgcatataggggaatcagcacgatcacatatccgatcaggctatccccgaagccaagtctgtaggcaatcttataaaccggcagcatgatgctctgaaaaggaatgatcatagagaccagcagcaagttcaaaatccacttgctcttcttatcgtctgctcgggacagcttgtagccgcacatggcgctgagtatgactgccagacacaccacggcgattacacaaaaaatggtattcagcagaatgcggccgtagttcatctgcgtccagacgtaggtcaggttgtcgataaagaaactttgcggaaggctgaaagtacgcgtcagaatttccttgtacggcttgaaggcattgaccagcacgatgtagaccggcaccagcataatgataccagccaatacgctcagcacctccgccgccagcctgccgggatggatacggcgctttttcatcacatttccacctccttgcgtttcgtaaaccagacctgccccacggtaatcagcatcaccacgaccagcagcaccacggccttagccgatccgtagcccattttgttgttgctgaacaaatctttgtatacgtccagagccagaccgactgtcgaccggcccggccctccgttggtcagcgtcacattcatgtcgaacaatcggaacgcacccgccagcgtcaaaaacagattgatggtaatagagggcatcagcaaaggcagcgtcacatgacggaaacgctggaacgcgttggctccgtcaatggcagcggcctccagatacatccgatcgatgctgttcagaccggaaatatagatcagcatataatatcccacactctgccacaggctgacgataatggtcgcccaaaagctgttggtcggatcagacagccacttgattttgaagatagaaagccctgtcagggagtacagcgtcttggaagcctgattgaacaaaaatgcccatacaaagcccaccacgataccgctgataatattgggcaggaaaaagcaggtgcggacaaaattctgcgttttcagcttggatgtcacccaaagcgccactaaaatggccagcgcgttggacaggatcaccgttaccacggcatagcgggtactgaaccagaaggcattcaggtagtcccggtcctgaaacaaccgcacataattgttaaggcccacaaaagtggagttcttccctacgccggtccagtccagcagggagtaggaaaagcacattcccaccggaatgatgaagaagatgacataaagaatcaaaaccggaaggacaaacatccagtagacgtattttttttctttcatcgggatttcctttccgaaaaggtctcacttaaattcctttttggttaagtggtgccgttcgaagcccttgaatggatatagaaagggagccgccgaaaaagcggctccccagcgccgcaggcgcttagttcagcaccagcttcgcccacagagtatccatttcttccagaacctgctcagcagtcatattgcccagcagatattcctgatagagctttccggcttcggggcggaagctttccggccaagtgggccacggccaggaatagacgttattcttggtcatttctacataaccgtcatctgccaggggattggaagaaacatattcccagccttggaacacaggggtcacatggtagacgttcagcaggatgtttttcgcaccttcatcggtggccatccagttcaggatgtcaattgccacttcctgtgcttcgctgcccttgcctacgtgccacacaccgttgacatcggtagcaatcttgttttcagaagccgtctcgctgacaggcacggcgaacataccaacgctcagcgtgggatcgatgccttccagtgtgctccagatccattcaccttcaaagatcatggccgcttcccccagtgcaaaggcggtgcaggcctcgttccagccatagctcagcgggtcttccatgccgtatttcaccatcagatccaccatttcaaaggtgcgcagcatttcctcattgccggcgaactttgcttcgcctgcatagagcttctgagtaaattcgctggtgttgggaatcatggcgtagccggagatggccatcagttgccccagcagccagtcgtccttgaattcgttcacaaagggggtcacgccgttttcctgcagcttttcacacacggcgaccagttcagaataggtggtgggcacttcaatgccgtattgttcaaagatggctttgttgtagcagatgccctcgctctggaaggtcaccggcagaccgacgatcgctccgtccgcagtggtgatgcagggcttggccgcctccaccagtttgtccacaaaaggctgctcggacaaatccgtcaggtagtcttcgtacatcagcatattattgtagccttcggtcataaaaatctccggcacgtcgccggaagagaacatggccttcagaacctcagacaggttcgtgccgttcacatccgcagtgattttcacgtcgggatgctgctcctgatacagcgccaccagctgcgccactgcgtcggcagcttcaatctggaactgctcccagacgacttccgtctccgccacagcgccaacgccggccatgcagaataccagaaccatgaagagtgcgatcaaccgttttttcatttggaaccctccagttctcaagtgttttgtatgattctattatacttatggcggcattttacaaaaggtacgctattgatctgttgccacgcctatattgacccgttggaaccgtttccgttccgctgccggtactcgctgggcgtcagcccgtaacgccttttgaataccttccgcagataattgctgcaattaaagccgcagcggacgctgatttcctccagcgacagatgggaagccgtcagcaggcggcagacacattccagccggtagttattcagatattcaaacagcgtgatcccatagcactttttgaacgaacgggaaatatgctccttggaaacaaagaactgcccggccagcagatccagcgtaatattctcagcataattctgggagacatactggtggatcttttcggcaacagacggttccgtttcctcctggtaaagctcctctcccacatcagcctttctgctttccagccggttgaatacttcctgcaggtttcgattcagctccagcggattcacgggtttgagcaaatagttctgtacgcgggacacaatagcctgatgggtgtattcgaaatccgtgtatccgctgaccaccagcacgaatggctcgtaattttcccgggcaatgctctgtaaaagctccacgccgcttttttcgggcatgctcatatccgttacgataatatccggggaatgctcctcgatggtctttacagcctcatccaccgaagaagcctcatacagccgatccacctggatctccttccagcagcccagcatccggagcgccttgcgggataacgcctcgtcgtccacgatcaatgcggaatacattcggcttcctccttccattccatcacggcaaagctcatttccacctgagttccttccatcaaccggctttcgacgctcatgttcatctgctcgccaaaggtcagatacaggcgcagatagacgtttttcagaccgatatgctccccaaaggaatcaatgttccgggtctggctcaactcttcgcggattttttccaattgctccggctgcatgcctcgtccatcgtccgttaccagcagatgcagccagccgtcccttcgaaatgcccgaagacagatgttcagttcccggacgccggcccgaaagccgtagttgatggcattttcaatcagcggctgcaggatcatgttcggcaccggcacgctcatcaatgcaggctcgatttccgtccgataacgcagcgcatccccgaaacgaatcttctgtacggcgatatagcgttccatatattccagctccgtatccagcggaaccgtcttcaaatcgccgcggtaggtgtaatgcatcaattcggacaacatggtgattgcagtataaacgtccatgtttccgttttccagcgccagtgttccaatggactgcagcagattgttcatgaagtgaggattaacctgtgcccgcagggcggctacctgtgcatttttcaccatcagtcggttggtgtagtccgcattgatcagctgctcgatgttctccgacatttcattgtaggttctggccaacagtccgatttcatctccgcgattggccgccaatctgggaaaatgctgcgccccctttgcaccgaccatcacatctgccattttctgcaatgggcgtatcacgctttgttccatgacggcgattaatgtcagcgtcaaaagcagcatacacgccatcagcagaggaatatacgctgtcacacttcgcctggccgcctgagagaacgtatccagcgggattgccttatacaggctcatgtccccatatgttttttcctgaagcaccagatactggatcccgttcatgcgcagtgtctggtcgccgcacacagtttccattttcatcggttctgaggtgtagaaagttttcccgtccgcgtcgacgattgccaccgcctcccggctttcctcagggatggacaaaagcgagatcagtcgatcggggttcacctgcagactcagcatggcctggcattccgttcccgatgcgttgcgcatcgttcgggtcatggtgaaaaattccgttgtctggaggttctttacccccggcggataaaaattccgttttcctaccggcagcagcgttgtcagatttttgttttccatcccccgttgataccaatccgccgtttctgcctcaggatcggcgcgcaccagactgagactgacccgcggaacggtatacagcaactgcattttgggaatgtacagatagatcagttcaatttctttgtggcccagacaaagctgccgcagcagcccttccgtatatctctgtgcggtcagcgtgttccgctcaaattgaatataagaagaaaggctgctgtccagaaacgtggcctgacaaagagattgcaattcccgcagatagtcgtttacattatttgcatcctttttcaaaagctgctgtgccgtttcccgataagcgtccatctggctttgagaaatatagcaatatagaaaaacgctggaaaccgttccaaccaggaccgtgcacagcagggtcagcagaatgattctggttttgatacttttcatggcttcacagtttgatttccgccgcatccaatctgacggagacatttctttccacgccatccgcctccacaatcagtccggcctttccaaagtgcgtaccatccccatcgtattgaaccgtcagcagttttccgcgcaacggcagtttttccagccgaaaccagtcgttttccccgcacagcggctggatcttgaccctgccattttccagcggaacgactccgcaatagcctgtaatgatcaagtcgcaaaattcggagtgattgtaatccttgccccgctcataaccgccaatgttttcaggccaacccgcttcttccagtattttccggctgatccattctcccgtatagggatcctgatcctcgtcgatccatgggattactcggccttccttcgtttcccggcgatggctgcgcgcataagtttccagcagttccagataattttcccgactaaagtgtccgttggcctttccatcctgcaaaagattggcggccgccagcagtgtctgactagtggcaaagggccagaccgggccgttccacaggcattcatgatcgaccggatacataaagcgcggatggctttggtctgctgtcgtcgggccatagggggccttaaagcacttttcatccttcagccgttcaaacgccgacgcatacgcttcatcgggaagatgaaactgccacgggatcagcccgatttcctctatcgcattccgttcctccggcacatcctcaaaagaatgaaatctcaattcatcccgcacggaattcagtgggatcaccttgaaaaattggtccttgggatcccacaggtaccgcagtatccgttcccgcagccgaactaccttttcatcgtatttctgtgccagttcctcctgtccgtccttccatgcgatcgctgcgatggctctggcgttggcgtacatatagctgttcagcgtcggccggagtcctttcccgctgatggaaaactccatggcgtcccggtcatcgtcagaccaaaacagaccgcatccatgcagatgggttttctcccgctgctcataaaactccgtcagcggctgaagcagttttcccggcagcgtttcatttccaagcacgttgcacacgtccagaaccgtttgggcgatccaacagctgtaggactgtacatccccgcttccttccagccagaagcgcaggtaattttccgtcgtgtcgcgctcatttcgaagccatcgcgcctcccgaagatgaaatccaagagcgcagttaatggtgttgtattttcccgcccaaggcaccttcggcagaaattcgctgatcagcttgccttccggcgtgctgaacagatgtttgcgaaatgtccaccagcggtaataataaatcctctccagttccttcctggagcagctgaacaacggaatgttcctctctgcccatccggctgcggcagcattgtccacctctcccacgtataattcctcgtcatttttcgcaaaatccgtaaaatattctcttgtcaactgctcgtccattcggcttgtcctccgcaccttttccgtattttcagtacttttgtgccattgctggtgagaaaaaaattctctttgatgttattataaacgggaattttttgaaaggcaagcattgtttttaaaacagtcaattgtaggactacaatacatcttggacaaacacaaaaaaggaaagagagatagggtctcatatgctaaagttgagttaccacatcacaactcggcgaaaggagaccatatccctcatgagcaagagtataacacaagacatggcgtatcggcaatcgctg

SEQ ID NO: 3500 - DNA, 32759 bp, Unknown
  16S sequences of unknown bacteria
aactttttctccgaaaaagtttccccccgcatatcttatttacgttccagtatcttcttgaatgccgggactttgctgagggcgaaggtgccgatcattgtgaagacgcattcggggagcatataggagccgttgtagaggagggagtagacgtagggattcatgtcgacggatctccagatggttacgccggagatgtagtggcatacgaaacggaggaagacggcgaggaaggtgccgatgaggatgcctttggtgcctttgtttttgaagagtccggttatgccgaggacggtgaaggcgaagatgtagtcggcgaggatgcagacgatgaggacgacgggcgagagaccccagctgaagactcttccggagaagaggcagaggatggagtagacgaaggctgaaccgaagccccatttgggtccgtggaggaagcctatgaggcagacggggaccatgctgaggggggtgattgagccgccgttggggagttcgatgattgtgaattggctgaggacgaaggagagtgcgatgaggattgcgcattcgacgagtgtccggacgtttcttgatgccgcggatctggttttggcggcgttctggttttccatttgaaaaactccttttgtgaaaaaaatcgccccggtatagccgaccggggcgatgaaaaaagcatagtggcgtcggcacgttgaggtgctttcgcgtatcatcccttcgccggaattacccgtacaggttcatagggttcgcctgactggcgtctcagccgctttcgcagcaccccctgaggttagttatttcggagcgttacatatattataccgcagaaacgcgggcttgtcaagtggggcgggatggtcagtcctgacaaacttttccggggatgatgtagttaatgcgggcaatttgcgagacgccgagtttttttgcgatttgctctgatttgtcgagatttttttcggcgttgaagccggggatgatggggagttttacgcgtattttcccgggcacgatggcggcgagggttccgaggttccggagaacgagcgagatgtcgccgcctgtgtatgagcggtatattgtcgggtcggtgtcttttatgtcgactatgaagaggtcgatgttttcggcgagggcagtcagagtcgcgtcgtcgagcgtgaccgcgaggctggtttcgatggtgaatttccagtcggcgcggggctttgcgtagttaatgaagtcgagtatgaagtctgtccatatgagcggttcaccgccgccgaaggttattccgccgccggtcgcgatgaaatagaggttgtcgattctgactttttcatataattcatcggctgtgaggcgttcgcttttcgcggctttgcattgcggattcagacagtatttgcaggcgagcggacagcctttcagaccgacgagggtggtcactccgtcgccgtcggtggggattctgtggcggattatcgcgaagatgtccgctgtttttttgtctgccatgggccgcaggtcagccgccgtctgtttttgagggcgctccggatgtttcctcgggagcgatgatattgccttctaaagcgtgggtatctgttaccgacgattcatcgtccgcgccggtgctgtcatctgaggtgtgtaccgccggaacatcgccttcgagctgatcgtccgggagaggcgagcaggagctgaccccggcgattgtccccacgacaagcccggcggagataccggcgatcaacagctttttgccggtttttttccggtcgttcagggctttttcgagggctctcgtttcagcctcgcaccgcgggcaggtgccaggacacctgacgtcctctccgtgcgggcagtcgcggatcgggatattgatatcatttttcttcgcgatatcgcggcggatctgtttcaggatatcgcaggtctgttttccggtcatggctgtgtacctttcctttctgtggtttcggttgaggctccccatcaccgcattagacgtcaggaatccggaaaagttccgtgttacgcggtttttcagctgttctgcctgagaacctcgtatccggcgatcgccgcggcggacgcggcggacagagcctgcgggaaaactcttccgtattcaagccggacgatcgattcggacgcgtcgagaatttcgcgcgagagcccgcgcttttcgccgccgaccgctaaaagcagcggctttttcagatccgcgtcgccgatcggaatcgagtttttgatgtcgcagctgacgattttcacgccgagagcgcgcattgtcgggacgatcgtgtgctcctcgccctcgacaaacatcgggcagatttcggacgctcccgccgacgcgcggcagacgacaccggcggcgctcatccagttccgtttcgataaaatgagcgcgtttattccctcagcccatagcgagcggatcgcgtaaccgaagttgtacgggtcctcgatgccctcgatgagcgcgaagaatctgtcgttttcggatggacaaaacgaaactatattttccgtcgataataccgggattgtgcgcggcgtcgtttcgcatattatgccgccgtgggtggttccgagcgccatttcggaaatggcgtcggcggaggtttcgatgagcggaaatttgtgtttgaacgacattgccttaaggtatgaaagttcgcccgcgcgggactttttcttgtcccggtcgtagcatattttcaggattttccggtcggacatcccggattcgatcgccgcgaaaacggcgcggatcgaggtcattccctcaaagaggttttcgcttttctgcttctcggcttcggtcattatctcagttccttccgcacctctgccgccctgccgcaggagtacgcgccctcggagcaggcgccgtaaaggcaggcgggacctgccttcgcgaacaacagcggacatacttcgcggcactgcttcagcatctcgaccgcgagcgcgcgtatctcccactgggcgcggtagcagcagcgcagtctgaaaaagttctgaagcgagcgcacgttcatcgtcatgattatccgtgtgtcgcaggcattcggcaggacaaaacgcgcgtcctcattcgctttcttttcggcggctttttttgcttccgcttcgctcattccggcggcgatatttgtgttatagtgacgcgcgacgagcttttcgcggagcgattcgtagtgtgcggcgtcctcttccatcgcctttatgaattcctctttcgcctcgggaatcgcctcgatttccggcggcataatatatgaaaaatcgcatttagagacgtacctctggctctgaaccgagaaggacgcgatgcggtggcgcgtgatctgcgcgagaagcgccctcgagacgccctcgatcgcgaaagtgaaggacgcgtgctcgaccggagactcatgcccgaggtcaccgagcattttgagaaatgactcgaccttgtccggggtaagatttttgtcaagcgtgtcgatgtcgctcttcgcgtagcagagcttcgcggcttcggcgacgagcttttcagcgtccggcgtatgtgttatcagcttgcatttcatgagatttcttcttccttttatgactttttcttcgcttttccgctgagcttgtagatgatcgttccgaacacgaatttcggtaatttcatcatccgaccgagccttgacggctggcagatcagacgataaaaccactcgagattcattttaatgaagaattccggcgcgcgtttcacgttttcggaatacccgtcaagactgccgcccagagcgaggaaaagccgcacggaaccgagcttttcccgattcgccgcgacccatttttcctgcgccgggacgccgaaacagacgtagaggacgtcaggtttcgcgttttttatgagtgatatgacagcgtcattttcggttccgtcttttttgaaatatccgtgataagtcccgacgatattgacgccggggaagcgctcgcggagcttttctgccgcctgatcagcgatggaatcggcgttttccgacgcgggtttcccgccgagcagaaatatccggcatcccttcgccgcggacagcttcgcgacctcgagcccgagatcgtagcccgcggtcttgcctttcagcggcgtgccgagaatcttcgacgcgagaacgactcccgcgccgtctggagtcacgaggtccgcggagttgatgagatcgcgcagcgacgcgtcctcgacgcacgcctgaatgatctcggcgttcggtgtatagacagaatgaccataacttctgtcggattcgacgttattgtatatataagattcacaaatagcggtggcttccgacaacgatacattgtcgatgttcacgccgcgcacgttgattttttcagacatgatctgatcctttcgcgatgggtttatactattataccacaccgcgggcgtttcgtcaagtgtccgcccggaatttcatccagcgtctgacgataagcgccgtgacgacgcagccgatcgcgcagagtatcatgaaaatcatgaagacaacgttccagtcaaacgccttcgcgagaacgccgacgatgaacgacgacagcccgccgcctatgcaggcgacagaattcagaacgcccgtcatggtcgccgcgcgtccgtattttccgaatctcagcggaacgaggctgatgaaaatcgtgttgacgccgagcagaaacgcgattatcgcggacagcattattatggtcgtgaaaatattcaattttccggcgatgaaaacgaggagaagcgtcaatgaagagaatccgaacagcgcagatgccgccttcatctcgtcgtgaaacagcttatccatcatgattttcgcgatggcggcgccgaatatcgaaataaatggcaaaatcgttgaagcaaatgtcgcgaagctcgggtccgcgttgaaaatttcggtgattatggtcggagtccatgtcgaaattccctcttttacaacggaaaaaagaccgatcggaatcagcatgaacagggctccggaggcgataaggagcttcatgagaggagtatccgccgcctgattatcgttgattttcgaggacgctttctgagctgcgttttcttcctgattttccggaacaattgcgatcttttcaatcgttttccggctgaatccgcgtgtcagaacgaaccacgcggcggagagaatcacgagaattatcgacgggaaaagaaagcactttttccagtcggtaaaacgtatgattgccgaggacaatatgtaggaaatcacgcttccgacggcagtcgtcgcgagcattgagacgcccgcggtcacgcgtaatttctccggaagagccctcgaaagtatacgaatcagggtcggccagattatcgattgaatcacgccgttcagaatccatatcgcgatgtagaccggaagaccgagattattcgacatcgcgaaatacatacagatattacaggttgccgcgccgagaatgctgaccgagaccgtgccgaacggaggcagcttgtcggctatgaacccgctgacgaactggcagcagccgtacgtgacgttgaacgccgtcgcgatgagcccggcgacgtccttttcgaggaacccggtcgagatcaccttcgcgaggaccgacgcgtaatttagcctgccgcagagtgcgaccgagtagagcatgaagcacatcacgaaaagcgtccgtcctgaacgcgtatcgtcgaggctcttcatcataatttttgaattcatccgaaaatgcctttcatttgcgaaaaaatgttacatacaattatagcacggcccgggatttttttcaatagtttccggaaggattctcggaaatctatatctgtgtttgcttttttgaaatttgtttgtcaaagtcgccggagttaacacggtgttaataaaaatggtgtataataatctgatatgttccgcgaggcgtcgacactatataaacgtcatatccgctggagcagaatcgtgatttcataatctgtgaaatagtacgaaatctatctgtgaaaattaatgagagcaggtgtctgatggaagccggaaatatggatttttcagtctcggtcagggaggttgtcgactttctctgccggtcgggaagccttgattcgcgcgccggtgtgaaccggatggtcgaggggacgagactgcacaatattataatgtcccgcgccggtgaagagtatatcaaagaggtcccgctcgaggtgaaagttgacgtggatggtcttattatcggactttccgggcgcgccgacgggataatcgacgaggaggacgggtacacaatcgacgagatcaagacgacgaccctgccgctgaaattcatcggcgaaaacgattatccggctcattgggcgcaggtcgggtgctatgctttcatgttctgcgagctgcacaatattgactttatcagaacgcggataacctacgcgaacgtcgagactgaatcgtgcatatatttctatcgcgacttcacgagggacgagctgcgggaaaaggtcaccgctcttctgcgcgaatataagaagtggctggagctccgacgcgattttacgtttgagctccaagcctctgcggcaaaactgaaatttccgttcccggagttccgcgaggggcagagcgacatgattctcgccgcctaccgcgccgcgaaaaaaagcgagcgtctcatctgcgaggcgccgaccggaatcggaaagacaatttcgacaatttatccgtcggtaaaagcgctcggggacggcatcggaaagcggattttctacctgacagcgaagacaccgctgcgcattgccgcgaaaaacgccgtcgatatcctcagaaaaaaggggctcaggatgcgctcaataatcctgaccgcgaaggaaaaatgctgtctctgccgcgacgccgtgagggactgcgaccagatgaaatgcccgtattccgagaaccattttaactcggtgaacgacgcgatgtgggagcttctgaacggctttgagagcttcgacgaggcgctgatacgacaattcgcggagaaatacaaggtgtgcccgtacgaattgtcgctcgatatttcgctgtggtgcgggatcattatctgcgattacaattatctgttcgacccgcgcgtctcgctgaggagatttttcggaacatttgacgacatctcgggtgtgaatcctgaggacaatattctgcttattgacgaggcgcacaacctgccggatcgggcgcgggatatgtactccgccgaggtgagactcgcgccttttcttgagttctacaagaagataaaggagacggatatcattctttattcgccgctccgcgccctctgcaaggagtttctgcgggtcggaaaagcggctgagaaaaacggcggatttctcatcgacaagaccgacgacggcgtcgacaactcggacttttttgaggacttttcggaagcggttgaacgatttattcccgccgcgcgcgagtggataagatacaaccgcgatatagatgaaaatgatccgtctctgccgtcgcccgacagactcctcgagcttctcggggacgccagaaaggtgcagttcgccgccgctcacaccgaaaaaggatacgcgagatatgccacgtttgaaaacaccgaaaccccgccgaaaaagacccgcgccattgacgccggatcggacaaaaattatccttctataacaataaaatacttctgcatcgacccgtcggagctgctttccgagagattattctgcgccagatcggcggtcatgttttcggcgacgctctcgccgaccggctattttgctgaacaattcggcgcggggaagggcgcggtatgccggaagctcgcgctgaaatcgccgtttccgcgagagaatctgttcgttggagttatggacaaaatatctactcgacttaacgacagaaaccgtacggtcgaggtcatcgcggagcttatcaaaaccattgtcagaaccaaaaacgggaattatatcgtgtattttccgtcgtatcggttgatgcttgaaacctgcacggttttcacaagagtcgacccgtcaaccgaagtgatttcacagaagcgggatatgtccgaagccgaccggaacaggttcgtctcggcgttccgggagcggaaaaacgatgaaaataaagcggaaaaaagcctcgtcggtttcgcggttctcggcggcatattttcggagggaatcgaccttgtcggcgagcggctgatcggaagcatcatcgtcggcgtcgggctcgggaacccgacgaccgagtcgaatctgctcgcggaatactaccagaaaaagtgcgaaaaaggcttcgaatacgcctacgcctgcccgggaatgggacgtgtgatgcaggcagccggacgcgtcatccgaaccgacaccgacaagggaatcgtcatcctcattgacgaccgctataccacccagccttacgtgaatctgctcccgaaaaactggaaggggctcagcctgatcggcgatgtttattcgctgaaacgctcgctcgagagattctgggacagggcggataatgaacagtgacaatagtttaacaagataccgataatacaagcactgtgcatctcaaaacaccgccggattttgtcgcaatccacaaaaacaccgcacggaatttgtacagtatcaacatgatttccggctctctattgacagcggaaaatttatagtgtaaaatagttacatcaataattttccgcaaaaaggagacacgaaaatggatttcaatgttaaagaagacataatcgcgctgacgccgcagtggaagggcgaacgcttcccggacgggcgtccgagggttccggaccgctatctcgaggcgctccgcggcatgacgctcgaggaggtctggaagccgatcttcgtcaagggctatgagtcacagtttgagggcaggcttcacacactgcacgacgacggcagaaagctcgtcggacgcgccgtcaccgcgaccttcgcgccgacccgccccgacctgcacgaggtcatgttcggcatcggcatgaaggaaggcagaaagggcaactacaaccagtgggtcgtcgattcgctcgtcgacggcgacgttcttgtcatcgatatgtacgacaagatttataagggaactttcctcggcggcaacctcacgacggccgtcaagacgaagacgaagaccggcggcgcggtcatctggggcggcgtccgcgacgtcgagcagatgaagcaggtcgagggtgttcaggtctactaccgcggaatcgacccgaccccgatacgcgacttcctgatgaccggcttcaacacgccgacaaggctcggaaacgcgattgtccttccgggcgacatcgtgttcggcgcgggcggcggcgtgctgttcatcccggcgcatctcgttccggaggtcgtcgacggcgcggcgaagacccatgtcaaggacattttcggcttcgagatgatcacgcagaacgtcttcacgacggcgcagatcgacaagaacacctggaccgaggatatgctcgacctgctcgtgaaattcataaaagaggacccgcgcggcgaggagtaccgcgacctcgactggtcgaaggaatacgacctcgcgagaaacggcgacccgaacgatacccaaacggcattataatcctatgaagaaaaacatctacatcgccgcctgcgacgcaaacggcggcatatatcactacacgcttgaggacgggaagctgtccttcgtcaggaaatacgacgtcgaccgcccgatgtggctgacgatcgacgggaaccggatgtttgtgctgctgcgcgagctgaccggcaatctgaattccggcgtcatggcgttcgatattctgtctgacggaagcctcgcgaatccgaccgcgccggtgctctccggcgggcgctgcgcgtgccactcgtgcgtttcgggggacaggctgtatgtcgtgaattatctctccggaaacatctgcgcgttcgacaagaacgacctcggaaagggcattatcgctgaggatacgcacaccggtcacggcgtccacccgaagcgtcaggaagcgccgcacacgcacttcacgcgcgagacgccggacggaaagtatgtcttctgcgtcgacctcgggctcgatactatatttgtctatgacaaggacctgaaaaaggttggcgagggcaaagtcccggcgggcgagggttgccggcatctcgattattcgccggacgggagatacgtctactgcgcgaacgagctcggctcatccgtctcggtcttcgcgtatgaggacggaaagcttgatctcgtcgacactttcgcggctctcccggcgggctttgacgggcagaacaccgcggcggctatacgcgtttccgcggacgggaagacgctttacgtgtcgcaccgcggggacgactcggtctgcgctttcgatatcaccgacggcgggaagcggctcgcaaatcctgtctggacaaaggtcggcggggtctcgccgcgcgacattaatttcaccgacggcttcatggtctcggcgaacgagaagtcggctgtcaccgtgttccgggctgacggcaagaagctcgaaaagctcggctggtcgctcgatatgcccggcgcgctctgcgtcgcggtgaaataaacgcgaaaaatacacaaaaaaacgacctctccgatgggactgtatgttccttcgggaggtctttttgtcagtatatgtttacaggtagaaaaattaacaatttagtgctataatttagtgaagcccatccggaaaagggatcggcttttgtaacatcaaagaaacgaaggtaaggaaaagtgaaacacaatcaggtaagacaggtggtcttcccgctgctcgcggcgctcatctggggcacggcgttcgtcgcccaggacgtctgcgcggacaatatcggggcgttcacgttcaacgctatcagattcttcatcgccgccatcgcgctcggagtaatggtcttcataaaggacgccgtcggcggcaaaaagccggaggtcagcgcggaagagaagaaagcggcgacaaagcgtctctggctcggcggtctctgctgcggagccgcgctcgcggtcgcgtcgaacttccagcagttaggaatcacggccggaaccgacgccgggaaggcgggcttcctgacagctctctacgttgtgctcgtgccggtgttcgggctgtttttcggacggaaggtcagcgttccggtctggatcgccgtgggactgtcggtcgtttcgctttatcttctctgcataaagggcagtttcagcctcgcgccgggagatattctgattctcgtctgcgcgctctgcttcgcggtgcatatcctcgtcatcgacagggtcggcgcggggtgcgacgggttcaggctcagctttgtgcagttcctgttttcgggtattatatcgaccatattcatgttcatctttgacacgatagatatttcggcgatcctgtcctgcgctctgccgctgctttacgtcggcatattctcctgcggggtcggctacacgctccagattctcgcgcagaaggactcaaacccgaccgtcgtcacgatacttctcagcatggagagcgtcttcgcggtcatcgccggggtcataatcctgaatcagcggatgagcgtgagggaatacgcgggctgcgttctgatgttcgccgccgtcatcctcgcgcagataaagctgccggagaaaaagacagacaaaaaaggcgtggaagcacgctgaaatcagggacgcgccggacatttccgcgaaagcggcgctgatccggcgtatctcgtcttcagaaaaaaatcattaggaggaaaagatcatgtggttcgttttcgcgcttctgtccgcggttttcgcggcgctgacgtcgattcttgccaaggtcgggattgagggggtaagctcaaacctcgccaccgccattcggacggttgtagtgctcatcatggcgtggggtatggtcttcctgacaaacacgcagggcgggatatccgatatcagcaaaaagagctggatattcctgatactgtccggactcgcgaccggcgcgtcgtggctctgctactaccgcgcgcttcagatcggagaggcgtcgaaggtcgtgccggtagacaagctgagcgtcgtcataactctcgttatggcgttcgttttcctgcacgagaaattcacggcaaagtcgctcctcggctgcgtgctgatcggcgcgggcacgctcgtcatggtgctctgaaaaagaaaacggtgtgagagaatcacacctttttctttattgaaaaattgtcgacaggtcagcgctccagcattttctctatgaaatcgacagcgggagcgggttcggatatcgagtgcgggtggtggtcgcagtcgggcttcaggatgagcttgtagtccgcgccgagcttttcgagcttttcgacgaggattttgccgttcttttcccacggtactgtcttgtcggcggcgccggctattatgagtatcggcttgtccgcgatggcttccgccttgtcgagcggatttccgtcaaaggtcttcagcgtttcgggcgtcagcttgtaccagtagaggcactcgaccgcctcatggctgttttcgtaccagcagggccacgtgcggatgtcgagcaccggcgcgtcaaggtagagcccgcggacgcgctccgggtatttcgcggcgtagttgacagcgtacagccctccgcggctcagcccctcgagcaccgcctccttcgcgagaccgaaagtctcgttcgtgaagtcctgaaattcgcgcagcatctcaagcgactccgggcagccgtacatatcgctcgcggaatggtaagcgaggtgccagcccttctcgagcagcgccttgtcgacccagtcgaagcagccgaagaactcggtgcgccagatgacgggatttcccgggagcggtctgtcggggcggacgacgagggagtttctgccgttcagcttgaaattgatctgttcgcgaccgtgatattcagtagttgaaatatattcgtagagcattttttcctccgaaaataattgatataagaattataccaccacagaggaaaaatgtcaatgggtggcgagtatttttccgcgaaaaatattgacatatcgttatttttgtgctataattataaaaacaacctcgggaggcagattatggaagagcttctgaaacggcttatgagctacgcgcgggtcgcgatactgctgatcatctcgctgattctgatggtatgcgggacaattgatcatctcggcgtgctgtttattatcgggcttgtcgtcgcgattgtcaccgccgtgcggttcgcctggatggcgatctgggatattgtctggagcaaataagagaagatgccgcttgcggcatcttctgctgttttccggggggtttttctacgcatggaatgaatctgtttttttcagctcggctgctatatctcgcccaccatatatgacgcggacaatcgaaaccgtaagattcttttcgttgcagctgtagaacactacgtaattttttaccgtgaaatagtggattttctctgttttcaccggccagtcccggtagacaggatagcgcacgggcattgtttcaagctttgatatccgtgctgttatcgcattgacgacagacagagccgcctgcggctcgaaaagggcatagctgatataatcgagaatgcatcgtatatcccgggttgccggcggcgtgtagctgatgctgtatatcatagcccgtagtctcttcgcagctcttcaagaaactcgtgttcggggatagtgttcccggcgcgcacttccgccatgcccttttcgagctcagcattcagttcttctttcgtcatgtttccgagcatcaaaggtgcgttttcgttcagcttgacctcaaacggtatgccacgctgtattacgacctgtctcagaaacataccgatggcgttcgacatcggtatcccaagtctggtgagaatgacctccgcctgttcctttacttctggctcgactctcgcgaaaacatttgaagttcttgacatcatgacacctccaagtaatagtgtatttatattataacacgcttgcttgctaaacgcaagcaatacgcaatcgtttttacaaattgtttaccaatcaaactgcgataaatctttttttccatatctcaagcccgttcaccgagcacagttcctgcaaataatccgcccgtaccgcccgctcgaactgctccctcgcctctcccggcagccttttataatcgctcggacgtgaaatcgccggtatcgtgattccggacaccatcccgcgcccgacctcgttcgccgcgaggagggaagtgtagagcggcttttccgcgaggtcagccatcgtatagccgagcatagatccgaaaatcgcccgtctcagtctcgagcgcgaatacctccgctccgacgcgaggtcgaggattccctcgatatcccgacgcttcttcgcagcctcgtgcagacggttctcgatgccgcccgagacctccatcttcccgcgcatttcccgctgggacaggcgcaggaacgcgctcaccgcctcgtcgagcggttttatacacagccgtccggcgtccctatcgcgcttcaggatttcagccgatgcggcgggcaggaaccccgacgggtcctcgccgcgccggagcatatcccgcaccgccgtcgccgacgcgaaagcgcacttatccgcgctgttgtaatcgccgccctcgcgctttatcgtgacggcttccatcctgacgccaagtgaggctgtcgcgcggagatattcaatcgcgagaatatcgttcgagccggtcggaacagaaccgagatttttttcgagcacaagattccggagcgcccccgcttgaaggtgcgggttttcgtctctcgccgccgcgatcgcagatttataatcctcagacgacaaaaattccgcggtctcccggagaacgccgatgtccccgcactcgctcccgaacgccagcgtatccgcgccgaccgccgccgcgagactcacgcccgccctcgcgaaaaactccgcacccgccatcgaccacggcgccggaagctcgacgacgaggtcacagccgcagctcaccgccgcctccgcgcgggaatatttatcgagaatcgccggctctccgcgctcggtcatcgcgccgctcatcaccccgacgacgcggcaatcgccgaaacggcgccggatttccattaactggtattcgtgccctctgtggaatgggttatattcacatatgacggctactgttttcatcattatttgtaatatcctcaaaattttcgtttatccacttgtaatcggtgaaaaaaaggtttataatatagggtataatgattataccacaaaaatctgaaataatcaatgttatccggaggaattttcaaaatgaaagtattagtcgtcaacgccggcagctcgtcgctcaagtatcagctcttcgacaccgctacatacgaagtagtggcaaagggcatctgcgagcgcatcggtatcgacggtaagatcacccacaaaatgcccggcagagaaaactacgtcgccgagctccctatgccgaaccactcagtcgcgaccaagatcctcatcgacaccctgacgtccgccgaccacggctgcatcaagtctatggacgaaatcgaagccgtcggacacagaatagtccacggcggcgcgttcttctccgagtcggtcaaggtcacccccgaagtcatcgaaaagctcgaacagtgccgcgacctcgcgccccttcacaccggcgctcacctcatgggcatcaagggcatcaccgacgctctcccgggcgtcccgcaggtcctcgtcttcgacaccgccttccaccagaccatgcccgactacgcgtggatgtacccgatcccgtacgaaatgtacgaaaagtactcgataagacgctacggcgctcacggcacctcccaccgctacgtagccggtgaaatgtgcaaaatcctcggcaaaaccgaaggcaccaaaatcataacctgccacatcggcaacggctcctccatctccgctgtcaaagacggcaaagtaatcgacacctcgatgggcttcacccccctcgacggcgttgaaatgggcacccgctgcggctccatcgaccccgcgatcgtaaccttcataatggaacacgaaggctacacccccgcaaaaatgtccgacttcatgaacaaagaatgcggtatgctcggcgtctccggcatctcgtccgactcccgcgacatcgaagccgcgatcctcaagggcgacaagagagccaccctcgccgccaacatcctcgcataccagatcaaaaaatacatcggcagctacaccgcagccatgaacggactcgacgccatagtcttcaccgccggcatgggcgaaaacaacaccgaactccgcgaacgcgtctgccgtgatatggaatacttcggaatcaaactcgacaacgaactcaacgccagaatgcaccaccagccaaacaccgtaaaactctccaccgacgactccaaagttcaggtctggctcatcccgaccaacgaagaactcgtcatcgcgtccgataccgaaagactcgttaaagaataatatttaagcgggggagagaaacctcctttgaaaaggaggtttctctcccccgcaccccctctcttccctcaaacttcaaacaaatgaaacacgaaaggtactgctgaaatatgaaaaaagtcgccgttatcatgggcagcgacagcgatctgcccgttgttcagaaatgcctcgatcaactgaaaaagttcgggattccgtttgaggctcacgtcttcagcgcacaccgcacacccgcgctcgtcgaaaaattcgcgtcctccgccaaggacaacggcttcggtgtcatcatcgccgccgccggaaaagccgcccacctcggaggcgtaatcgccgcgtacaccaccctcccagtaatcggaataccgatcaaatcctcgacaatggacggtctcgactccctcctctcgatggttcagatgcccggcggcatccccgtcgccacggtcgccatcgacggagcgcagaacgccgcgatactcgccgcgcagattctcgccctctctgatgataccctcgccgcgaagctcgacgatttcaagaaggacatggaagccggagttgaagcgaaggacaggaagctccaggagacgctcaacgcgtaaacgcaagacccccttgtcaagtattttctccgtaaacgttcaaaacaaacagatttgaaaggaataaaaaaatgcaggacaacaaactctttgaaggcaaagtaagaaagatattcgatgcgggcgagggaaagctcctcatcgtcaccaccgaccgcatctccgcctacgacgtaataatgcccaccccgatcgacggcaagggcaaaatcctcaacggactctctatgttctggttcggtctcacgaaggacatcgtgaagaaccacgtcatcaccaccgacataaacgaataccccgaacccttcaagggcgacagggaactcgagggacgctcgatgctcgtcaagaagctgaagatgatcccgttcgagtgcattgtccgcggctacataaccggctccgcgtgggagagctacgagaaggacggcaccgtctgcggtcacaaggtcgcggagggtctcgtcgaatccgacaagttcccggagccgatcttcaccccgtccaccaaggcggcggaaggtcacgacatcaacgtcgactacgaatacatggcaaacgagatcggcgaggaactcgcgtcgaaggtacgcgacaccacaatcgccgtctacaacctctgcgccgactacgcgcgcgagagagggattatcatcgccgacacgaagctcgagttcggtctcgatgagaacggcgagctcgtcctcggcgacgaggttctgacccccgactccagccgcttctggagcgtgaaggactatgttccgggcaagtcacagtcgagctacgacaagcagtacctgcgcgactggctgaccgcgaacggactcagaggaaagacccccgcgcccgagctccccgccgatgttgtcgccgcgacgaaggcaaagtatgtcgaggcgtacgagatgatcaccggcgagaagttcgaaggctgatcagctatatacagcgagaagataacttatggctaacgaaaagaaaaaggtcgccgtcctcgtgtccggcggcggaaccaatcttcaggcgatactcgacgccgaaaagagcgggatcataaagagcggcgaggtctcggtcgtcgtctcgtcgaaggacggcgcctacgccctcgagcgcgcgaaggcgcataatgtcgagggaatcgtcatcccgagaaaggacttcgcggacagaaagagctattccgaggctctcgccgcggagcttgagagacgggagattgacctcgtcgttctcgccgggttcatgataatcctcgacccggcgttcatccggaagtttgagaacaggataataaatgtccacccggcgctgataccgagcttctgcggcgacggcttctacgggcttcacgtccatgaggcggctctcgcgaagggagtcaaggtcagcggcgcgaccgttcatttcgtgaacgaggtctgcgacggaggtccgatcatcctccagagagccgttgaggtagaggagggcgacacccccgaaaccctccagagacgtatcatggagagggcagagtggaagattcttccagaagccgtggagcttttctgcgcggggaagctgaaggttgaagggaatatcgtgcatatcgcgcggtgaatcaccgtgaaaaaaaaagactgccccggcagtctttttttcatacggattgctttctcgggtaattctcaagaatatccgaaagcgtcttataccccttgtaagtatactcataattcttcatcgccgggacgagaaccgcgccgccgttctcctcgggcgtcttcgacgtgtcgtagtccgggatctccgcgagggcggggaagtacggcagcatttcgtccgggtctgatacgcgcacaggcatcatgtatactttcccgacctcgagagtcggcagatcgtccgcgacgagggtcagacccttcatctcgccccagagaccgcagactgtcagctcgccgccctcttcgggatcgcctttgaagcattttatcactctcaccgtgtatggagtgcgtatgccttcccagtgttctctgatgtagtcctcatcggggtcttcgcctttctttcccgacataaagctgtttccgacgcctgtcacttcgcataataccacgtaatccgacactgcgtactcctcgtcgagagtattcacgtcgccgaacgctcccgaccagtggaggatatcgggatcgctgtcttcgtggtcatgggattcgtcggtgatatcgatagaggtcatcacatccggcgtctcgtccggcgcgtcagaggcgcaggagaacgtcaggctcaccgcgagcgctgtcagcagaagcgggatttttcgcctcatattctcattcctcgccggcgaatttcccgtcgagtatttccatcagcaccgagagatcgtctacaccgtcatagaagccgttcccgccgagcggggtgagtgtgccctcgtcctcgcggtctatagcgccgttgccgttcatgtcgcggaaataagataccgcggcgcccgcgtcggttaatggaatgaccttgtccccgtcgcgcctgaccggcaggacgtacaggtcgtaatactcgtccgagccctcgatcggtgtcacgccgaagtcgagcgaaaagtacccgaagaccccgccggggagcgtgaagccgaagttcgggctgtccgccttctcgccggatgtccactcctcgattatgtacgccgtgtagtcggtgacggcggatttttcgtgctctctcaggaacttgattgtgttaagcgtccgctcctcgccctcgacacggctgccgccctttgtcaccgtgcagagaagtatggcgtccgacgccgcgattacgtcgtcaagggctgccgcgtccccgacgcagtacggcgccgagaccgtgtcgcgtatcgcgggcgcgaccggcagggctatcggcgctaaaagcgagatcaggactatcccggaaataatgttgttcatctattcgttgtccgcgaagaccgtctcgcgcgggacgacgtcgcgcagctcatacgccgccatgccgtatttcatgaacagattcccgcgaaccgatatcctctccggaggcggatactccccggcgccctgcgtcgtcacgcaggagtcgtatatctgcctgaagaagcagtcctcgacccggatatcccgcgcgccgcgccagaactcgaccgcgttcccgaagcggatcttcctgtccgccgaccatacacagccgccgatgccctcgaacgagcagcggatcagcgaaatcctctccgagtcggctgccgcgaagccgtgaacgccgcagcccatgaagcggatgtccgtgaagataacatcatgcgtcgcgtgcgccagctgtcttccgccccacacgcagagctcgatgctgtcatatatcgtccctggattgtcggcagcgcagacgatgagtctcggctcctcgccgtccggaatgcccttcccgccgctcatgacgccgtagtgcgagaaccagaagtcgccgtactcgcacaggtcgtctgtcgaccagcgcagggttccgtaccttctgccgccgtcgatcatgatattcccgacctcgtcgcgcgggagatccttcgcctcccagagactgtcgccgatatatttccatttgtccgggtcggtgtaatcgagcgagccgaggacgaccggcttccggttttccatgaacatcccgatgtcgtcgatatcctcctcgtcgtcgatttcttcctcgtcaaggcaattcccgaggtcgccgtacgcgccccagattataggcgcgtccggcgtgccgtccggcgagaacagcggctcgcggaggatagttccgcggcgcaggagtatcctgtcgcccggctccggcgatatctgccgcggggaggtcacagccgactccggcgagagcccgtcgttttccgcggaaccgtcatatgggtctatgtagtatgtgctcattgtatatttctccttttcccggttatcatcaataaccattctactatatataaacgacggaagtcaagcgtttactacagcaaaaacgaaatttcagcgtgatgcacaaaaacgcgattcattattgtatataacgacagaacagcgataccaaaaaaacgctgatttactttaccgtttgtgcgtcaagttccgtcaaagagtaaaattttcggatatcgaaagaaacgcttgatttccccggaaatatgtggtataatataagtaacgttattacttacaaaagaggtaatcaaaatgaaaaaacgcgcaataatcagtctcaccgacaagaccggtgtcgaggaattcgcacgcgggctttccgacctcggctacgagattctctcgaccggcggaaccttcaaggtcatccacgcggcgggcatcccggtcactcaggtttcggacgtcaccggcttcccggagtgtcttgacggtcgtgtcaagacccttcacccgatgattcacgccggaatcctcgccatccgctcgaaccccgagcacatggcgcagctcgagaagcttggcgtcaccccgatcgacattgtcgcgataaacctctacccgttcaagcagaccatcctgaagcccggcgtcacaagagccgaagccatcgagaacatcgacatcggcggtccgacgatgctccgcgcggcggcgaagaactatcaggacgtctcggtcatagtcgaccccgccgactacggcactgtcctctccgagctccgcgagaacggaaaagtctcggtcgacacgaacctgaagctcgcctacaaggtcttcaaccacaccgcggcgtacgacgcgctcatccagtcctacctcagggaagagaccggcagcgacatcttcccggaaaagctcaccctcacctacgaaaaggcgcaggatatgcgctacggcgagaacccgcaccagcgcggcgccttctaccgcgagatcggcaaccagttcaccggcaccctcgcggcggcggaacagctccacggcaaggaactttcctacaataatataaatgacgcaaacggcgcgctcgactgcctcaaggaattcggcgacaagaccccgtgcgtcgtcgccgtcaagcacgcgaacccctgcggagtgggcgtcggagaaaccatccacgaagcctacatgaaggcatacaaagccgaccccgtctcgatcttcggcggaatcatcgccgcgaacaagaagatcgacgccgcgacagcagaggaaatctcgaagatcttcgtcgagatcgtgatagctcccgactacgacgccgacgctctcgaaatcctcgagagaaagaagaacatccgcgtcctcagactccccgacatcacgaagccgaacacaaaggatatgctcgacatgaagaaggtcgcgggcggtctcctcatccaggagcgcgacgtcggagtatatgacgaggcaaacctgaaggtcgtcaccaaaaaagccccgaccgcgaaggaaatggaagacctcagattcgcgatgacggttgtcaagcacaccaaatcgaacggcatagtcctcgccaaggacggcgccaccaccggcgtcggacccggtcagaccaacagaatcaccgccctcgagctcgccgtcaagtacgcgaacaccacagaaggcgctgaccccgaccgcgcgaagggctcagtcatggcgtccgacgcgttcttcccgttctccgactgcgtcgagtgcgcggcgaagtccggtatcaccgctataatccagcccggaggatccatcagagatcaggattccatcgacgcctgcgacaagtacggcatcgctatggtattcaccggagagagacacttcaaacactaaagtaatgtgggggaaaactttttggaaaaaagttttcccccacaccccttttcaaaaacttcaaaactataggtctttacggatgcgctcgagcgctcctttttctatgcgcgagacctgcgcctgagatatgcctatctcaccggctatctccgtctgcgtgcgacctctgaaaaaacgcagctctattatgcgcttctcgcggggggacagacgcttcatcgcctccttcagcgccagatcctccgtccagctctcgtccgtattctcggtgtcgcttatctgatccatcacataaatcgaatccccgctgtccgaccacaccggctcatacagactcaccgggtcgacaatagcgtcaagcgccgccaccacctcagagcgcggctcaccgagctttctcgcgatatcgtccgccgtcggctcccggtcaagcgtatgcgaaagctcctcacgcgccgtcagcgcacgataagccagatcacgcgtggaacgcgacacccgtacaagcgaattatcacgcagaaaacggcgtatctcgccgattatcatcggtaccgcgtatgtcgaaaacttcacatcctgcccaaggtcaaaattatcaatcgacttaataagcccgacgcaccccacctgaaacaggtcgtccgggtcctcacccctcgaagaaaacctctgcacaatcgaaagaaccaaccgcagatttcccgctatcagctcatcccgcgccgccttatcgccgttatgcgaccgctcgagcagctcgcgcttctccttgtcggtcagggttttcagcttcgaggtattaacaccacatatttcaactttattcagacgcatttttgttccgtcctttgggaaataacttctgaataaagtattgccggaaagggcggagacttatacagtccccgccctgtgattatatggaagtttcagatatcactttatatttatagcgaccccgttgaccgtaacatcctcgtccgcgcgtatcagcagatacttcacgccgtcgatcaccctcgtctcgacgaggtcgcccctgtccggattcaccttgaccgtcgtgtcgggcgtctttatctcgaacttcttcggctcaatcaggtttatcggcgcgaggtccgccccggcgccgtactcctcgtcgaacgactttccgaacgcctcgagcttctcctccgacacgccgcagctctcaagcacattcacgacgtcgcgcttagtcaccacaagcggctccgggtcgcgcgtcttcttatgctcgtcgattctctcggcgaactcatcgtgcagagcgtgcactacctctatagagcactcattctcaagcgtctcggcgagcatcgtctcgaacttctccttctgctcgtcagccggaaccggcggctcaacgccgaacaccgcgccgaggaacccctctcccgaatctcccggatccttcgtataataaagcgcgttataaatattagtctgccggttatcaaacgccgggaacaaaaaaccgcgctccggcgcaccgacgttccaatcgcaggaacgcaccctgaaatccttctccgccgggtcatatgtcagcgttgactttgcctccttgaccggacaaacggcagacaatatataactgtacatcgaatccgaactcccgtcgccgccctcgtcccgccgcttcaccggcacgtcatatgtctcagccgcgagcaatatcagcgtattcccctccgactgcaccgaccccgccgcgcggtcaaaaaaccgcttcgccgtctcgtcgtcctgaagccccgtcttacgcagcaactgaaggtccgcgtgctcctccccgtgctccacctgccccatcgaaaacccgatgtccacaagattccgcccgtttgtccccgaaagcacacggcgcagcacaccaaggtacttctcgataacgtcctcagtcagaagaccgaacgacgacttaaactcgcatatcgtctcacggttcgcgtttatgtaacgaccgcggataaattcgatgttattcttttccggcgagatacggcggcgtatctcggatatttccttatcgatcatgactacaaactccttcgcttgtcaggagggggaaacctttcgagaaaggtttccccctcccgacaccctctcctttctcaagcttcatacaaacaaaattcgtgaaaagtattgaaaaataagacagactgtgttataatatcaaaagtacaaaaatatgaaaggagactcacatatgaatctcaacaaatacttagccgacccggctgaaaagcccctcgaacgcatcgtcgacgacggcggcttcacctccatcttccgcaccatcggctgcataggcgactccctctcctccggcgaattcgaatccaccaaccccgaaggcacccaaaaaggctaccacgactacttcgaatactcctggggccaatacatagcccgcgccgccggctgcaaagtcatcaacttctcccgcggcggcatgacagccatagaatacatgcagaccttcgccgacgcgaacgacttctggaaccccgacaaactctgccaggcatacataatcgccctcggcgtaaacgacctctacggcagaaaaatgccggtcggctctgttgaagacataaacgccgaagaccccgaaaagaacgccgacaccttctgcggctggtacgcgaaaatcatccagcgcctcaagaccatgcagcccaaagcgagattcttcctcatgaccatgccgcgcggcagaaaagagggcgacgagcagatactcgcgcaccgtaatctccttcacgacctcgagaaattcttcgactacacctatgtactcgacttcacggaatacgcgccggtctacgacgacgaattcaagaagaaattctacctcggcgggcacatgaaccccgcgggatacatcctcaccgcgaagatgacaatgagctacatcgactacatcatccgccacaacatggaggattttgcgcaggtcggcttcatcggcaaggatgttcacaactacaccgccaagtggtaaacaagcctatatactgacatttccgggagcattccgctcccggccttttatttcgcggtatggacatccgtgactttattcgcggacctcccgcggatgatcgtcagcagcacgaacgccgcagcagggaagatcaccgccgacagaatgccgccgttcagcgcaaaatcgccgcttatcctgcccgagacgaacccgatcagcccgggtccgctcgcgcacccgatatccccggcgagcgccagcaccgcgaacatcgacgtcccgccctgcggcagagcgcgcgtcgcgaggctcagtgttcccggccagtaaacgccgacgcacagcccgacgatcccgcacccgacaaggctcagcaccggaacctgcgagaagacagtcagcagaaacccgccgatcatcccgaccgcgccgatccgcatgaccttagacaggtcaagtctcgcgccaaacgcgccgtaaagcgtcctcgttatcgccatcatgagcccgaacaggcagggacccatcaggtcgccgaccgtcttcgacaccccgagccccttctcggcgaagagcgacgcccactgcgcgattgcctgctcgcacgctcccgcgcagatcatgaggagcaggaagaggcggaagtcgaagattccgaacagtccgccgaccgactcggtctcgcgtccctccgagtagctgtttatcggcacgaagaagaagaaaacgcagttgacgagcggaattatcgcccacagacaggtgagcaagcgccagttcacggtcccgaagagcgcgaagaagccggtcgaaagcaggacgatcgcgatgtgtccccagcagtagaacgagtggagaaggctcatcgcggagctcttttcctcggtcggcagcgcctcgacgatcgggctcgcgaggacctcgatgaagccgcttccgagcgcgcagaagacggtcgcggtgaggagtccggcgtagggcggcattatgtacgggaagacgccgagcccggcgattccgacgacagaaaaggcgtgcgcgatgatgattccgcgccggtagccgattttgtccgcgaatctggcgccgagcatgtcgaccatcatctgcacgatgaagttgaagctgacgaggaacgcgatctggtcgagcgagacgccgaaggtgtccgagtatgtgacgaacagaagcggcgataagttgttgacgatcgcctgaattatgaagcagatgtagcaggcgatgagggtcattctgaagttctttttcattttggtctccgaaagacaggcgcggacgtgccgcgcctatatataatattgaaggttattttccgcggatgtcggggcggaagttgttttttgcgctgtcgacgctggtctgtgggactggctcgacttttgtcagggcttctgcctcgtcgtgggtctgtgggacggtgaccgagatgccggtgcagtcgttggcgctggcggcgggggcggagtcgagggcggaggcggcgagcgaggaggcgtcggggtcgatgaggatgccgtcgaaagcgccgttcgaggcgcggaggatggaaatttcgggtattttgtggtttttcatgatctttctcctttccgtatttaaaaatagtctgcgcgggaagcggagaaagatgcgcggcgccacaaagaatattataccacatccggacggattttgcaaccccgggctgaaaaaaagcataaaaaaacagttagtcaacctacagttcatcctgcgaacacaagccaacgaaaaaaactttgtaaaatcgcggaaaaaaggaattttgttattgacaatcgtgagaaaatatggtataatggactcaggaatgaacagacagagtgtcactggaatcggtttgcctgtttcaccgaaaattttagaaaaatgaggcgttttttctatgaaaatgagaagagtgctggcgctcgttatggccgtactgatggtcatcgggctgatgcccgcggtggcggcggttgatactgatgccggtgccactacacttggtcctgttgtcgcgacaaaggatctcgtctgtgacgaagacgggaatccggtcaaggacagagaaggatggtacacgcttactctttctgtcaagggtgatatgaaagagatgcagaagcattcgagcgcagatgttatccttgttgtggataattctggctcgatggctgatactgttaatggcgatgtttattgctattcgacagacttcacctggaaccctaatggctgggatcgtggattctgggaatgcgataaatgcggcgaaagatactatgggtactttaatgagccggcgttttgcacgaaagttctagtccatgggaaaaggatgtctaagcttgaaatcgctaaggatgttctttcggcttttgcagattcgttgctcacagatggttctgacattcgtctcggcgttgtcgggtttaatatgccagaaggaaagtacgataatggaataacagtgtctactgttacaagtaataataggagcggtttgctcggatatagtgaggacaacatcaacactataaagaatgcaattaacagcttgactgcggaatatggaactgactatactgctgctctgaaatttgttcagaatatgctcaatcagagagatggagctgacaagaccagattaacatatatcatctttattactgatggtgaacctggtgcaacaacgtctaatccgactggtggaatagataaggaaagttgtaacggtactattcaagctaaagagctcaagaaagataagggcgctatcaagggtactaccatctttacgattggtattggaattggaagcaaggaaggtaaggaattacttaatgacaagattgcttcccctggaatgcataaggacattgatgtcaaccaggatgtttccgaacagctttcttcaactctgaatacttggaagactgaaatcatccagtatgcaggaactaatggcaaactggttgatgaaataagcgataatttcactacgaatattgagtctctcgctcttccggaggggatgacatatgccgatggtaagatcacctgggatattggcaacatcggaagcgaagagaagtcgttctctttcaagattaagccgaatgaaggtcttgaacctggagtatatgagaccaactccgcatatttactgacttatgatgatccagacggaaacggacagaaggttgaactcaagtctccgactgttactattaaccctgttgtgaagtttgtcattgccgaagatgacaaagcgatagcaaactttgggacggataaatacgagaattcggttgaagttacatataacgaacttctttccgaagatgaggttattgaaccgacaatcattaattccgacaagtatgagtttgcaggctggactgacgagcagggaaatgatgttgaagttgattttgcaagcaaaattacttcgaatatcacttacatagctaagttcagtgaaaagactgttgaaactcctgcattcagagtaaaattcaacgcaaacggcggatactggactgatgattctgaagcaacttatcctaagactgttgatattttcgaagacactgaaaacataatcgttcctggtgtttacaaagataacgctgatttcttaggttggtatatcaaagacgaaagtgataatattcacgagatagatttcgacaggggattcggatatggcacagcatcggcttttgctgaaatgtatccggtctacgagatcgacggtgtgaagacacttatcgttttcgcgcagtatgaggacaagcaggtagttgaaactcctgcattcagagtggaattcaacgcaaacggtggatactggactgacggttccgaagcaactgatcctaagactgttgatattttcgaagacactgaaaacataatcgttcctggtgttgacaaagataacgctgatttcttaggttggtatatcaaagacgaaagtaacaatattcacaagatagatttcgacaagggattcggatatgatacagcatcggcttttgctgaagtatatccggtctacgagatcgatggtgtgaagacacttatcgttttcgctcagtataaggacaacgacgaacagacctacacagtaacctacaagttcgagagcggcacagaaggcgcggttttaccgtggaacgttaatgaacagcttccggtcaacaactatacctatagcattggtcaggaagttaccgttgcagctaagccgaatgatgtagtcttcggtgagtatacatggaagttccagggttggaaacttggcgaaacagatatcactccgaattcgaaggtaccgatggtagaaggcggactgacatttgttggtatttggacctccgaaataatcactcctgaacctccggtaacatactacactgtaacttacacggatggcgtggaaaacgaagaagtttttgcggatcagattttcagaggtctgaagtctggtgcagcgacccctgcttatgttggagatctcatccgcgatggctatacgttcgccggttggaatccgactgtttctgcaactgtaactgaaaacgttacttacaccgcacagtggaaacttaatagtgacacccccatcgatcctcctttcatcgttatcttcccgactctcgagatctccaacaaggttatcgctccgaagaacttcgagaagacctcgtttgagtatgacatcatcaacgttaagaccggcgatgtcgaaaagtcggtcactctcaaggctgactcctccgtcagagtcatggtcaacggcggcacagagtacatggtcgttccgaagaacctcgacgttcccggatacatcgtcaccactacctccactcctgactccgcgactgtaacctccgacaagatcggcaacgtctcggtcgatttcactcacatctacgtcgttggtctcaacaccgaggatcactacgcgtacatccgcggatatgaagacggcacaatcagacccgagggcaacatcacccgcgctgaagtcgccaccatcttctatcgtctcctcagttccgaggctctcgcggcgttcaagaccactgagaataccttcactgacgtcgattccgacgcgtggtacaacctggctgtctccactctcgccaaggcgggtgtgatcagcggttatccggacggatccttcaacccgaacggcaagatcacccgcgccgagctcgtctcgatcgctaccagattcttcaccacaatcgaggtcggagactccaagttcagcgatatcgcaggtcactgggcagctaaggctattgacgaggcttacataaaaggcatcatcaagggctacagcgacggtaccttcagaccggatcaggctgtcacccgcgccgaagccatgaagatagtcaacggtatcctcggcagaccgattgatacctgcgtacttatcgaaggcatcaagctctggccggacgtcgcatccgacgcttggtactactacgtggtggcagaggctaccaacgctcacaggtatgaactgactacccctgagaagtggaccgctatcatcattgacgagattgagtattaagtcatagttttgcagggggaggtgtttttcgagaaaaacacctccccctgcacccccaccaaaaagctttatacaaacaaagaccacgcgataccagtgaaggttgtcgcgtggtctttttttgaagctttttgaaaaagggggtgcaggggggagaaactttttctccgaaaaagtttctcccccctgcaaatcttagagtcctctcttaacgtaagaggtatgcagaatttcgtgagcgcgatggcttccgggatgttcgaggtactcgtcgtaaattttcttaacggcggagttctcgtgagatttgcggaggtccatgtttgcgtctgctttgtagaggacggctgcgcggagagcgcggaggtcgactgtgttgcggacagacgcgggctggaggggctgaccgccgccgttcacgcagccgccggggcacgccatgatttcgatgaaatcgactttttcttcaccgttctggactttggtgaggagttctttggcgttcttggtgccgcttgcgacggcgactttgatttccatatcgccgagcttgtaggtggcgcgcttgatgggagcggtgccgcgaacgtcgtcgaaatcgagcttttcgaggggcttgccgaggatgacttccgccgcggttctgagagcggcttccataacgccgccggtagcgccgaagattgcgccagcgccggagccgatgtcgaagggctggtcgaatttctcatccgggagggctttgaaattgatgccggctttttcgatgaggcgagcgagttcgcgggtcgtgatagcgacgtcgacgtccggaacacctgcggcgttctggtgatcgcggccgacctcgaatttcttcgcggtgcaggggatgcaggagacgaagacgatgtccttcgggtcgagtccggctttttcggcgtagtaggtcttgtacatcgcgccgaacatctgctggggcgacttgcaggaggagaggttctcggtcatatccgggaagtagtgctcgcagtacttgatccat

SEQ ID NO: 3501 - DNA, 32759 bp, Unknown
  16S sequences of unknown bacteria
gctcccgtacagagcagacccgcagccgcaggcgccgcgggtgcgggtctgctctgtacgggagcaggcgtcgctttcggcgcttcgggcttttccgatttttcggatttctctaatttttccgtcttttccgatttttccgttctttcggttttttccgccttttcctctttcacgggggcatcggcagacgccttttcgggagcttcggcggccgatttttcgggaagcggaacggaaggcgcgctttcggaaggctccttcttttcttcgtttgaggaaacgtcggttttttccgccttggccgcgggctcggtctgccgcttggcaggcttttccgccttggccgcaggcgcgggcgcttcgggcgccttttcggcgggacggggagcttcggcttcgggcgcagaaacttcagccgacggcgtttcgtcccgcagggcttcctcccttgcgagttcggcgtctctttccgatttgtcggcttccagcgcggaaagctttctcaggatctccgcaaggctcttttctgtggaatagatacgtttttgcagctgccccaactgcttttcgtccaataattccgttactttttccacattttcgtatttttttgccataggttcagttgtttcctcccgaatataatttatattgcgcgtcgcttgccgaggcggtaagaatcgccgaagcgagatttttgtctttgacggccgccgcttttacggcgggccgatgtaaaagttcgcttaaggagacgccttccgtcacgaggagcggacaggaaaatttctctttcaatttgacgagtaccttcatcgagttttccgacagggttgaatccgcaatcaaaagatgcacgccctttttcaaggcttccgcgcgatctacgccgaagacgatttttcccgaacggatacaaaaccccagatatgccgaaattttatcgttttgcaaaaaattcctcctctatccccgcatagacctccaaagggacgtcggcggaaaacgctttgttgagaagcctttgctttttcagccttaagatacattcctctttgttgcagatgtacgcgcccctgccgggcgccttgcccgaaaaatccagcctgatctccccttcggcgttcttcaccgcgcggagcatatcctttttcggcatcatctcgcggcaggcgatacacattctcaaagggacggattttgtctttgccattattctttttcaggctcctccgctccgctttcggccgtctccgcgccctcgaggggcgcctcgtcgtttatattcccgacgtcctcgatgtccgcgggactgtcggccgcttcgtcggcgaagtcgtccccgaagccctcgtccgagtagtcctcgtcgtctccgtcgcggttttccgtcgtgttcaggttcattttctcggcggcggaaaggctcttgacgtcgatcttccagcccgtcagcctcgccgcaaggcgggcgttttggccgtcgcggccgatcgccagcgaaagcttgtcgtcgggaaccacggcgatggcgctcttttcccccgtctgcgtcacggaaatgaccgaagcgggcgaaagcgcttttgcgataaattccagagggttttcgctccagaggataatgtctatcttttccccgccgagctcttctacgacggcgttgaccctcgagcctttatttcccacgcaggcgcccacggcatcgacgcgcgtatcgttggaacagatcgccattttcgtacggtggccgggttcgcgggagacggccttgatctccacgatcccctgcgcgatttcgggcacctgctcctcaaacagtttcttgacgaggccggggaccgcgcgcgaaacgaggatctgcgaattttttccgctgtttttgacgcgcttgacaaataccttgagccgatcgcccatcacgtaccgttcggcaggcgtctgatcctgaggaagcattaccccctcgatttttttctcgcccagctcgacggaaatgtttttatcgtccaccttgcggataaacccttccatcagctcgccctccttatcggaaaacgcggagaaggtattgtcgcgctcggtttcgtgcagcttttgcaggattacctgcttggcggtctgcgcggcgatacggccgaaatccttgggcacgaagcttctgacgatttcgtccccctccttatacgcgggatcgagctcctgcgcttcttcgagcgagatttccttatccctgtccgtcacctccgccacgacgtgctgaatcgccttgaattcgatggtgccgctttcgggatccagctcgacggaaacctccgcgccgccgtcgtactgttttttatacgcggacgcaagcgcgttttgcagcgtttctataaacgcttcttcgctgattcccttttcttttaccagatcggcaagcgccgcaaaaaactccttattaaccattttattcaattctcctgtttgatttcttgatttattcccgccgtccgtcattccccgtcgaaatcgatcgcgcggctgatcttcgcgatgcgattgagctcgagcttcatttcctcgccgccgtccgtcaaaacgacgcagttgccgtcgtagcccgccagcgtcgcctcgaaaaacttctttcccttaaggggcgcaaacagtttgacttccaccttttcgcccatgcacttttcaaaatcccgcgcggtctttaacggcctatccagcccggggctggacacgttgagcgtataggccgcgccgaacgtcgggtcgagttcgtccagaagctcgtctatcgcgcggtgaaatttttcgcagagcttcagatccacgcccccgtctgtgtcgataaagacggtgagcgcgggcgaacggccctgcttaaactccacatctacgatctcgatattcatttcgtcggcgacgggctgcaaaaaggcccgtatctcctctaaaggcttcactttcatgcgacgttctcctttcccgcttcgggcaaagtacccttacatagcaatattgagagtggcgaaccactctcaatactcagtatctgattattaagtaaccttattataccattattttgcccgatttgcaactatttttacatactgtttacggtttttttgattttttcttttcgtgacaactttacattttttccaaaaagtattgacagtaccccccccccgtgatataataatgaaaatggataattatacttaaaggcattattgttatttaatattttccttttcctatcgtggggacgacacggagcatttttttgctttgcggctgtctcaaactttctgattaaggatagtcgatgaacataaacaacgaatttataaaatacgtgcaaacgtttacggacaggataaaacccgttttagaatcttcgcccgaagggtgggagcattttattttttgcgtggatatcttcgggtttcgcaatatcaaccgcctatacggccacgaagcgggaaaccgtctcctgagcgcgatcgacgcgtttatggaacgcaacgacgatattctgttgcatacgcggttttattccgatcattttctctatttcgtccgctatgaaaaggggacgtcggacgaagaaatcatcgcggacaggcaatcccgcgtaaagggctttctcctctcccaacagcagaaatatcccgcgtgcaggctcaatttcccctgcggcttcagccgtatcgaaaatgccgacgtagagcgggcgatcgaggaggcgaactttgcccgcaaggaggccaagcggacgggagagggaaagacgctctccttcaacagtgagcttatcaaagatatttctttgcagcggcagctggaggaaagcctgaacctcgccctgcgggacgagcaattttgttttttttcttcaaccgaaagtcgatctcaccacgggtgaaatctgcggcgcggaggcgctggtacggaggataggcagggacgacgccattatcccgcccgacgcttttttaccggccatggaagcgagcggagccgtcacggagctcgacctgctcgtctgccgccaggtgtgccgctttttggcggaacggatcgccaaggggttgcccgtcgtgcgcacctccgtcaatctctcccgcctgcatacccaaaaccccgatgtagcggacgcctttcacagcatcgtttcgcagtattccctttcgcccgagctcattcagttcgagctgacggagacgatctttctcaacgacttttcgggcgcaaaaaaattgatcgacaggctgcgcttcttcggatacagcgtcgccatcgacgatttcggctccggctatgcggggatcaatatctggcaggaattggatttcgacgtacttaaattggataaaaggtttctcaacgaaaatcccgaacgcgcgctcagaaacgaggcgatcctgcccaacgtcatcaatatctcccaaaggctgaaaataggcgtgctctgcgagggcgtggagacggccgagcaatgccgccacctgctgcggttgggctgcaggcgggtgcaggggtattatttttccaagcccgtcccgcccgaagaattttacgagtcctacgaaaaattgcaggggagatattccttaagctttcccgagcagaaaaaactgacgggcgaggagcgcaagcaaaagcacgatcttctctcgtataaaaagtccgcccgccgcccccgctttttcttctatgccctcacgtttctgtttctcgctatattcgtctccacctccgtggccgtcacgttttctttttacagaaaatccacgcagcagcagtttcaggagatgacgacggaaaccctcaacgcctacgcctccgaacagaaaagcagcgttctcgccggcattgtcaacgaagtggatacgctgaaggcgctttccgtcatcatcggagaaaatcccgaaaagacgtacatcgacgcctatctcaaggcgttgaattcgagttctgcctccaacgtatttcaatatacttccgcttcggagccggaaattcttgtttccaaatatcccgaaaacgcgcagcccgtcgccgcgctgaagaaaagggggagactgtcatttccgacgtgtattattccacttcgcggaaggtttggactttctctatcgccgtgcccgtgtttaacagctcaaacgcctttacgggcgggatcagggggctgatccccgcagacgtcctcacttctctttccccctatccgcccgcgcagggcaaggtgacggcctgctatctgaccaagggaacgggcgagatcgtctccgtcgcggacggcatgccgggcggcagcgtattcgagctttgcgaaacggactacgaacggaaaaatctacaatgcctctattcgatttcaggcgcctgcgacggaattttcgacgtaaacagcattcgtctcgaacaggaaaacacttctcctatctacgtttcgctcgcctcgctcgattataacgactggcatctcgccatcttcctgactgcggacgcggcggccgcgcgctcccgcgcgatcgtccggaattccttcgtggcgacgggaattttgctcggcgcgacggctgtggcgtgtatttcctttatccttctttttaatcatcagcaaaaacgcctttcctcggaagaacggcgttatttgctcctggagcagttctccgataccgtgctgttcgattacgatatcgccaaagataccatacgctttacctccaatgcggaaaagctgtttttaattcatgacctcgttcagtcctccttcctcaaaaactttgaccaaagctatatttatgccgcggacgcgatggctttccggcagatgctttcgggcgattactcgcaaagagaagcgcggatacggttgctcaatcccgaaagcaggcaatatttctggtgactcgtgcggtttctttacgtccgcacaaaaggggtcccgacttcggtcgtgggcaaaatagttgatatcgacaacctcaagcagcgggaggacaaactgctggagatcgccgaaacggacggactgacgggctttttcaacaaagtctccgtcgcgaaacaggtacgggagcagctcgaaagcgtccctgcggggtcacttttcatgatcgacatcgacgatttcaagaaagtaaacgatacctacgggcactttacgggcgacaagacgctgcggctgctggccgaagaaatacgaagcgccttcggggaaaacggcgttttcggccgcgtgggcggagacgagctgatcgtattttcctccgattgcaaggaccgatcggccgccaaagccaggggcgacaaattgttgaaacgtatcgccaaggtagcggaaaaggactcggccttccccttcgtcagcatcgggatcgcggtgtgccccgccgacggcacaacgtttgaggagctgttcctcgccgccgaccgcgccatgtacgaggccaagcgccagggaaaaaaccgttgcagcttcgacgccaatcgataagcttgtaaaaaacggccccggaaaaattttccgaggccgttttttgtacccgtcgggcaatttaccgacgtttttttatatctatgcgacaatcatctttttattttgtcaaagcggtcttccttgcattaaggaagcttttttctttttttaatcagctcgataaaaattttcgccgtcgtcaacgcgtcgtcgaaggcgcggtgatgattgaatacaaatccgtaataatccgcgatggtattcagtttgtaattgctcagctctccccgcagcagctcctgcgccagcgtcagcgtgtcgtactgcttctggtcgaacatatagcgattttcctcgccgtaataacggacgaaacgatagtcgaactgtacgttgtgccccacgaggaaacagccgtcgcagaatttataaaaatcgggcagaaccttgtcgatgggcggcgcgccgacgagatcctcgtcgcggattcccgtcagattgattatttcgggggaaagccgatcgggacacgccacaaacgaggaaaacttttccgcgacgtctccgttgacgagcttcaccgcgccgatttcgatgatccgatccatttttcccatggagggctgattgttcaggcccgtggtttcgaggtcgaaaacgacgaaggtattatttttgaggtcgtcgggcttttccagacggtcgaaaaatcccgcctgcgtataatcgacgtaaggctcgggaaatacggtgcggtaaacggcgggaacgggctttcccttgcggggttcgggtacaaaattttcgggcgcggtaccgtaattgatctttttcgccgtataggaaacactgccgttgaaggcctcgttcgcgccgctgagcaccacccagtcgcccaccttcagctcgcggattttttccactgtggcctttttgggaaaataggtgacgcgcatgctgcccgttccgtcggaaacggtcagcgaaaaacgcactttttccacttcctcgcccgtcttttcgttctttttggtataagctctttcctgtaaataggtaatcgcgccgcagagggtgaggtcgtcgttttcctcgctgccgcagtccgcgatataggcggcatatttcggtacggcgtctgcgccgtccagacgcctgaagttgcagacggggaaaaatcgggtcgtctgtacgtattcttcgccgtcgtccgcgggcaattcgtctaaagatatctcctcgcgttccttttccacaatgcgcacgttgccgtaaaacgcgccgcagaaaaccgaacggaggtacgcgctgacctcgtcgaggatcttccccgaggtgaaaagagactgttcccccgaggccacgtcgaagcaaaagctggcgccgctggagagcagctcgatggagatatcctcttccttcagaaaggccgccgccgcgggaaaacgcgaattcataaattcgtatatccgctttttcaatatttccgcgtcgggcacccgcttggtgattttcacgcgcggggagaaggcggcgggcagatattttcccgcaatccgccgcgcggcttcctcctcggcaggcgcatatgtcttgtccgtaatcagcgaaaattccgccgtcatgtcccgcttggagacggaaattcccgtcagtatagcgttttgcaggccgcccagcgcgcggatctcgtttaagtattcttccgttttattcgtttccatcttgtaacagtgtctttaactcctcgaaaaattcttcttctgcattttccgcgcttatctttttatacggcaccccttttcggaacaacaggcagaagccctttccgcccgcgatcccgaggtctgcgtccctcgcttcgccggggccgtttaccacgcagcccatgacggccactttggcttttttcttaaacggccgcacaaattccgtcaccttttttgccagccccatgctttcccacgcgcatctgccgcaggtgggacaggagaccacctccacaaacgcctcgtccagcccgcacgcgcgcaaaatatttttcgccgcatatacctcctgcacgggatcgtccgtcaaagagacgcggatcgtgtccccgatgccttgcaacagcagcgaaccgatccccaccgcgctcttgacgattcccgcttccgtcgtccccgcctccgtcacccccacgtgcaggggatacgccgtcctttccgccagcagggtataggcgcgcacggtcagcggaacgtcggacgccttgacggaaatcacgatattttccacgccgaatttttccaaaagcccgacgttatacagcgcgctttcgacaagcgcatgttcgcttcggccgtatttttcgaaaaaatgcggttcgatactgcccgtattggaaccgacgcggacgggaatacgatgcgccctgatgcagtccgccacgtattttatttccttttccccgccgatattgccgggatttatgcgcaccttgtcggcgccgttttcgatggcggccaccgccagagagggcgaaaaatgaatatccgccacgagcggcagagaaatgcgctcctttacggcccgcaccgccgccgcgtccgcctcgtcggataccgccgcgcgcacgatttcgcagcccgccttttccagcgcgtcgatctgccgtacggtagcctcgacgtccgccgtcttcgtcgtcgtcatcgattggatcttcacgcgggagccgccgccgacctctaccccgccgataagtacccgtttcgcgcttccgctcattttccgccttcctttttgccgtccgacggcgcaagctgccccgcgtcgggtcttggacgggcggagagacgctcctgcgcgcccgccttcatcatctcctgaagttcggagagaaaggaggagatgtccttaaacgaacgatacaccgacgcatagcgcacatacgccacctcgtccgcttttttcaggcgctccatcaccatttcgccgatttctttcgaagtgacctcgctgtccatgctgttgtatatctgcttggaaatatccgccacgatctcgtcgatgacggccatgggcacgggtcgtttttcgcaggccttgatgatgccgttgcgtatcttttcggcgttgtaggcttggcgggttccgttgtttttgacgaccaacacgggcgtcacctcgattgtctcataggtggtgaaacgcctgccgcagcccacacactcgcggcggcggcggatcgtcttgtcgtcgtctgccgaacgcgaatcgatcaccttgctttcggtgcagtcgcaatataaacatttcataaggctttatcctcctgaggatgattttttcactcgagcggtcgaagcggtaacttttttaccgcacagcgggtgcgcttctccccgcggctttatcgccgcgtttccaagcgccctttgctttcataaaaactcaaaaatattttgtcatcgaaaaattggtcagcctttcgccgcggcgttccacgcttcttcttgcctccgcgacgtagcccctctcttcgaaaaaggattttgccgtcagggaagcatacgtcgatatcttttccgcgcccctttcaaaagcgtatttctccaaagcgtccgccagcgcgccgcccacgccccgccgctgaaaatcggcaacggcgtaaagccgatcgagatatcccgtcccgtcgatatccccgaagccgacgattttcccgccatcttccgcaaccagcgcgtaatgcgcggaaagggaatttctccagcgctcctcgtcgggcaggcggggcgcccaggcgtcgagctgcgcgggggaatagtcctttgccgcgacgagatgtaccgcgtcgtaaaacagcgccaaaatttccttcagatccttttcggaatagcttctcaacagcatttcaaaggccctccgagcttttatctcttttttcccttcctttcccgtatctccttcaccatcttttcgtaaccgttgcttcccgggacgtaatataccctgtccttgagcgaatcgggcagatattgctgttcgacgtatccgccgtactcgtgcggaaatttatagtttctgctttgcgccttatcctcgcggctcccgaaggaattgtccttaagatagggcggcaccgcgtcgtcgcgtaccctcgaagcgtcgtccttagccgccagcatggccgtctttaccgaatagctcttttccgcctcgcagacgtaaacgatcgcctccgacaggggaatgagcccctcgggatagccgattttttcaaacgcatacatcgcggacgtggcaatctgcagcgcgcgcgggtcggccatgccgacgtcctccgccgaatggatgaccagccgcctggccacgagcatgggatcgcacccgccctcgatcagccgcatggcgtaatagagcgccgcgtttgcgtcgctgccgcgcagagacttgcagaatgcggataaaaagtcgtaataggcgtcctcgttgtagctcagcgcctttctctgaatagactgctccgcgtccgccagcgtgatccgtacctttccttccgcgtcggggtcggtggtcatggcggccagctccagcgcgttgtatgcggtgcgcagatcaccgcccgccatgcgggcgatgtgggcgatcgcctcgtcgtccgccgaaacgttcatttttcccagccccttatgccgatttttgagggcggcccgcagcgcgagagaaatatcttcttccgtcaggcgcttaaactcgaacacgcggcacctcgacacgatggcgggggtcatggacgcatagggattttccgtcgtcgagccgataaaaataatcgtcccctgttctattgcgggcaggagggagtcgctctgcgtcttattgaaacggtgacattcgtcgagcatcagataggtgcgcttattgtataatttgagattgtcgcgcgcggtatccaccgcctttttcacgtccgccacacccgagtttaccgcgttcagcttgataaattcgccgttggtcgtcagcgcgatgatgttggccagcgtcgtttttccgcagcccggaggcccccagaaaatacagcttcccaatttgtccgtggcgatcgcgcggcgaagcagcgaatgctgggatacgatatgcttttgtccgataaattcgtccagattattggcgcgcatccgttccgccaaaggcttggcggtttcttcgttgttgttgaaatcgaataaatccatattttcctctgtggggaagcgggaaaagcgctctcgtcgcagccctgccccttccgttttcgttttatccgagcaattcctttattttcggagcgtattccacccccagcttgtatccctgatcgaacgcataaggaaattttttgaaggaatattggctcatgtcgccaagctcgggctccagccagagatcgataatcccggcgttctcctctcttcgccgcgccgtgcggtaattgtccatcaggtcgatcatctccagcagcatgccgacggcgttggggcatttttccttacattccttttgtcccaaaacgtcgatcgcgacgatcttgtccgcgcccatttcctttaattgagcggcgggcacccgctcgagaattccgccgtccacgagtcgcatattgtctttttccataggcttgaaaatagcgggaatactcgaagaagccacgacggcgtccgccacgctcccctcggaaaaggtcaccaccgattgggaatacatatccaccgccacacagcggaaggggatcttcagctcggaaaaggagatatccccgagcgccttcgtcagtacctttcgtaccttgcgggtatcgaacaggccgccgggcttgatcgtcacgtccagaagatcgatcggcttcagcctgcatactatttcccgcatgtcgcacgggggcatgcccgaagcgtaagcggcgcccaccaccgagcccatggaacagcccgtcaaaaaatcgggtttgatcccggcttcgtccatcgcctgcaaaaatccgatatgcgccacgccccggcttccgccgctgcccagcgcaaagccgagctttttctttttactcatcttttctcacctctcttattttattattccgctttttcgaaatttcctttcatattttccgacttgtcctcataggaatagacaaatgctgcattcttcttccgccgccgcgggaaagccccgctctgcggtccgaacaaaaccgaaaaatttcaaagccaaactgaaaaaagctctgcccaccctctttttattcgcgtttgcggcgcttttcgcggtctttcccgaccgctatgtccccgtttgtttagacggcattgcgctttgggcgctgaacgtcttgcccgcggtattccctttcctgttcgtcaccgcgctgctgcgcgcaagcggcggggcacagcgggtttcgcgcgtcttttcaccctttgcgaaagcacttttcggcacgggcggggagggcggtttctgctttttcatgagcattctttcgggatatcccgtcggggcgagcctcgtttccgccttcaaagcggacggggtgttttcggacgacgaagcgcagatcctcgcgtgcgcctgttctacctcggggccgctgttcgtcatcggcagcgtgggcgcgggcatgttttccgacaaaaaaatcgggttcgccattttggccgcgcacctgcttgccgcgcttttgtcgggcgtcctgctgcgctttttttatcatctgcgccgaaggggcggaaaacgaaacccttgtaccaaaaagcaaagcgcaaggacgcggacaaaagctttttccctcgcggaatgcgtacagaactccgcgctgtccgcgatcggcgtgggcgggtgtatcgccgttttttacgtgctggccgccatggcctccgatttcggattgctctatccgctccaacggctgatcggcttactgccgcagctcgcgccctgcgcggaggggctttccaaaggaatagtggaaatgacgggaggctgtctcgcgcttgcggggctggaaacgcccctcgccgcaccctgctgcgcctttctcgtcacgctgggcggcgcgagcattctctttcagcaaatcgcttatctgcgttctgcggacgtcaacctgtttgtatttctgtccgtaaagcttttgcaggccgcaggagcgtttttcctctgtctgctgttcgtcgccctgtaacggacttttacgcggtctgtcgttctgtagcagacttttacattgcttaccgctctgcaacgaacgttgacaccgtttgccgctccgcgacaaaccttactttgcccttttatacgcgccgagaagcttgcattcgaggacgctcttttcgatttcggagagagcgtcctttacccgttcccccgccgcgtcgccctccgcttccacaaagaaacggtattcgccggggcggtccttgacgggacggctctcgattttggtcatattgatgccgtgcgccgcgataatcctcaacagggacatcaggctgccgggacggtgcggacaaaccgtggaaaagaaaaatttgtcgctcgcttcgggcagcctttcccgtcccttttcgatcagcaaaaactgcgtgaagttatttttttcgtcggaaacacattcctcggacatggtgaagccgtcggggataaacgccgtatgcgcgcccgcgatcgccgcgcttttacccgactcgtcgtcggccgccttcccgatccccagcgcggtggattccgtttccttcaacgctgcaaagggcgtctcgcggcttaaaaacgccgcgcactgatcgagcgcctgacggtgggaatacaccctgccgatttcccgaaagggcgtccccgtcctgtaaatcagccgatggtcgattttcagcacgtgctcgcgaacggcgtacagcccgtccgcgcactgcaggaggtcgagattctgcaaaacgccgccctgcaggctgttttcgatgggcaccgccgccgcggccaccctgcccgactccaccgcggcaaacacctcgggaaagttgcgaaaagggatacattcgtcccgttcgaagggcgctttatcgtccgcgcctttcgtctccttgagaaaaatttccgccgccagatgggaatagctgccctcggggcccagataagcgatcttcatgttttttcctcacacttcgtcggcgatatcgagaatcagccgctcggtattttcccagccgaggcagggatcggtaatcgatttcccgaacacctcgtcgtgcgcctggttgccctcgacgagaaagctttcgatcataaagccttttacaatgcctttgaaatcggcgctgtaacggcggttttgcatcacttcctcggcgatgcgcatctgctggcggcactgcttgcccgaattggaatggttgcagtccacgatgatcgcggggtttttcagctgcgtgccgcggtataattccagcaccttcatcaccgtctcgtaatggaaattgggcacgtctccgcccgaggcgtccaccccgccgcggagcaccgcgtgcgcgtacggattgcccgtcgaacgcacctgataattgcggtacttgaatacctgggggctttgtgcggcaaaaatagaattgatgagcgcgctcaaatttccgctcatggggtttttcagccccacgggcgcgtcgatcccgcccgcgacaaggcggtggagctgatcctccacgcttctggcgccgatggcgtgataggacaaaaggtcctcgacatagggcgtgttttcgggatagagcatctcgtccgccgccgtcaggcccgattcctccatcgccgcgatatgcagggcgcggatactgcggatcccccgcacgatgtcctccgcgccgtcgggattgggctggataaacatgcccttataccctacgcccttcgtgcgcggcttgttggtgtaaattctcggcacgagcaccagcttgtccttcacccgttcgttgagcctgccgaggcgggaaatatactccagcacgggcgcgctttcgtgcgccgagcaggggccgacgatcatcagcatcttgtcgcttttgcccgcaacgaccgccttcacctcctcgtcccgttcccgtttcagctttttcaaggcttcgggaagcggggtctccgcgataaattcttccggttcgggaatatagcattgtttttccaacatctttataaaactccttcttgactcttcatcctttgcgtttttctgcttccgccgcgtaaatatacgcctctacctctttcgtcacgtattcgtctatgggcgcagcgaatctgaggctgtttttcaccatggtcgagctgacgtgcagcagctcctgcgggcagggcagatatacggtaagaatctccttgtccagtttttccgaggcgaaacggttggcgttttcatattcgaaatccaccgtgtttctcagcccccgcacataaatttcggtattttctctctttaacagctccgccgccgtgcccgaaaaaaatacgatttttatccgtttttcgtcgggaaacatcagccgaagcatttcttcccgctgcgcgtccgtaaaaaagggacgtttatcgggattgaccatcaccgccacggccacctcgtcgaacaggcggaggcagtcctcaatcaagaccttatgccccagcgtggggggatcgaacgtccccgcaaatacgcattttctgtacgtcatagccgcctcctcacgcgcggcggaaaaaggaaagcaccgtcctgccgtatttccgctcgtcgtacttctccagccccgcgatctctccctcgaagggcctgtcgcgctcataaactgcgatccccttttcggaaagcaatcccttttccgcaatctttgtcagcgcgggaacgccgtaatcgaaacgatagggcgggtcgagaaagataaggtcgaattcccctttcaatccgttcagacaaagcaagtaatccaacgaatacaccttcgcctcgtcctttcctatccccaacgtccgcaggtttttttcgagtatctttacgctctcgcgggaaaagtcgttaaacgtcgcttccgacgccccgcgggagagacattccagccccagcgcgccgctgccgcagaataaatcgagcgctctcgcgccgtatattttcagggaaaggatattgaaaagcgcctcccgcacgcggtcgcccgtgggacgcacgtccatcccctcaaactccgccagcaccctgcttctgtattttccgccgataattctcacgttcgcctcttatttccgttttttgggctttgtgccgggcaacccgccgtaattgatctttttaggcttgctctgttcggcctccgccgcgcgcgccgcaatctcctgctggcggagagttttgtttctgcgcccgtacgcgcccgcgatatacagcccgcccgaaacggcgatgggaagcaggatcagcagggaggcgaggaaatagctgacgtacgtgcccgcgttgttcagcgtcacaaacgggaacagcgcccagcctgcgagacagttgaaaatgaggacgacggcggtcagcccgccgcttaaggaaacgtcctccgaagccgccgcacgcatcatttccgtctgattgcagccgaatataatactgccgatcagcacgaaaatccccgcgaaagcgccgatgataaatcccttccagggacggtattccttttgaaatttatagctggtgattttgagctcgctgcccagctgcatggccgaacgccgcttcaggtttcccgaaaccagcatttcgtaatgggaaccgccgcaaacccacatcaaaaagccgttgtaggccagcgcgccgatcgcgcataccaccgcccacgtaatcgtggcggaaggggtctttaccttagtcccgatcagcatcagcaggatacttgcgacaaaatacatcgcggcgggcgtcagcgcgcgcagggcgcactccccgacaatcctccagaataccttccatttggtcttgaaatccgacatagttctcctccgattttgatttcttctttcgtcaaacttccttttttatcatgatcagacgcttgtccgtcacaagatagtcgattttttcgtcaaacgcctcgcggggcacttcctttacgagctgaaaatcgaagcaccagccgaccgccagcgtttcgggacgggactttagaaacttatcgtaatagccgccgccgtagccgagtcggtttccctgttcgtccgcggccaaaaggggcacgacggccacgtcgatgcttcccgtccacgggcttccgaggggttcgcgtatgccgtaaggggaaagggaaaaatcttcgccgagcggcaccgccgccatctccttgccctccgcgcgcggggcgtatattctttttcccgccgccgtcagccgcgcgatcagcttgtccgtcggcgcttcggaagaaaaggaaagatagacgaaaaagctctctttttccgcaaagccgcccgcgaaaaaattttcgacgagcaggctttccttgatgtcccgattttcgttttctccccgccgccgtttcatatacgtcctcaaagacgcctttctttccgcggcggagctttcgcgtttttcgacgaagctgaatttatctgtaatcatattcgaactccgcgcgcttggtggcggcgcacaatatttcgtaggagatcgtccccgttttttttgcggtctcctccgcgtccgtcatgacgggaacgaggcttccgcggacgcccctgccctttcggatacacacgtccatgcagaggttgttggcgtttttctcgccgccccgcataccgttgtccctatgtcgggaaaatccgtccgcatagcccgcccgatagacggtgagataagtaaactcttttttctgcgcttcgctcaagacgccgtaccccgccccgccgaaggaatactttcggttttccaccgcccgcgcatataccttcatcgctttgcggagacggagcttttccttaagctcctcctctatgccctcgggcagatacccgtaaagtcccagccccacgcgcaccatgccgaaagcaaaatcgtcgccgagcaaagcgccgtacgtggaggaaaggtggcagaggacgtcggggaaataccgttcgcagacggctttcattttcataaatacagccctctgcttttcgcactccgcgcgcgaatggtcgtataaatgggaatacagcccctccaccgacacgcgcccggccttcgacaaaaatttgcataccttgccgagcattgaggaattcatgccgtagcggttcatccccgtatttacctgcaaatgaaccctgaccgcaagagaatatttttcgcaggtgcgggacaacagccgcgccgtccaaagatcgggcaccgaggccgtaaagccgtttgccgcgaggcacagcgcctgtacctcgtccgtcgggggcgtcagcacgaggatctcctttccgcacgccgccgtgcgtatggagacggcttcgtctatcaacgccaccgcgaacgtatccgcgacggcggagagcgcgctcgtcaccgcttccgcgccgtgtccgtaggcgtccgccttcaccaccgcgcacagctttgtattcgtcaggcgtttaaacgcccgcgcgttgtcctctacggctttcaaattgattttagcgattactttttgcacattccattatatgcgcttataccgctccgccgtgagggaaacgaaaatttcttccgcctgcgcccctgctgctacgcggtgcggaaatcgccgcgattgttattatttgtcaaacacggagaggcaatcgtcgtatccgttcgccatttgctgtaaatcatgagtcgggtattgccgtatccgttcgtcatttgctgtaaatcatgagtcgggtattgccgtatccgttcgccattcgtcgcaaatcatgaggagattgtcgcgcccgatcgtcattcgctgtaaataatgcggtgacaattgtcgcactcgatcgttcccccgcccgtcagcttgcttcgggccgcgaggggcggctccataccgcagaacggacagcggttatctttcagcgcgcccaccacggggaataccctctccttgcgtttggttttatacttttccattgcctcggcggaaatgcctgtcgaagcggcggaaagctcggcttcgatcgcctttctgtctccttcccgggaggccttcaccgcgttgtatttttcgtaagcgtccttgtactgcttctgcatggcgatgacctgctttttcagcttctgatattcgtcgtgcgtagagttgatgctcgccgtcagggcggaaagctccgccttgatttttttcagctggtcggcgatggaaacggcgttctttttataaaacgcgatgtccgcgcccccttccacaagttcgtcgagatgggcgaaatccttcagcgtatcctccgtcttgaggtattttttcgtcaattccaccgccatgtttttcagctgcgccgccttcgcgtcatatgaatccagcttgtctgcggcagtctccaaaaactttttcgctttcaagtattccttgcgctcctcgcagcccgcgatttcgcgctccagcgcgtaaagccttttgtcgatttcctgatacttcaaaatttcctgtaactgtgacatatattctcctcccgtcaaagcagcgcttcgtccgtgtgaaatacgcacggaatccccgcctgcttacggatttttcgataataattttcaaagccgtaattttccgacgcgtaatgcgtaagctggattacggcaagccccgtctccagggcaagagccaaaatatgatgcttgaaatcggcggatatgacgacgtccgcgccgtttttcgccgcaaactccaacgcgccctcgtccgcgcccgcgccgcagaagcttgcggcccgcttcaccgtccgttcgtcgccgtacaccgcgacgcgcttcgcgccgaaaacgtccgttattccctccgccaaagccttcagcgaaacgggcggcacgtcgtacgccctgccgtagccgccgacgctcaaaggctgataaatcgcagcgacgtctttcggcggccgcagccctgcccccgccctttgcgccgatgacaaaattccctccatgagactttcgtcgatcccaaagggcgcggcgtcgaggttgaggtgcatggatacgacggatatcccgtgctttaagcactccgccagctttttgcccagcggatcgaaatcggaaacgcggataccgcctatcttcgaatagacggcgggatggtgcgtgacgatcagccccgcgcccgcgcgtttcgcttcttccaccgccgcgagggacagatcgagcgaaaacagcgccttatcgatctccccgcccgcatctaccagcacgccgctgttgtcgtaggcgccgtaggttttacaaaactcgtcgcccaacgccttcggcgcgagtgcgtccaacagggcgtaaatttcattcagcttcaccgctcaacacctcctccagccgagcctttctctcctccagcgccctgcggctcgcttcctggagcccgctttccgaaaggtaggcgtctatttctttcagctgtttttccgttctctccaaaaacgcctgcggccgctttgagagattttcccgtccgaagcggaactgcgcgtcggtatatcgctgcgcttcttcgcccgcccgaagcctgcggccgcagattacgtcgtaaaactttccgtcgcggaaggtgaaatcccgttcgagatacgcccccgaggaaaggagataccgccgcagcttttccgcgtcgtgcatgggctgaagcacgaaagccgagggcagaaaaccgtaccgtttatcggaaaggataccgataatttccctgccgcccatgcccgcgatcaacacttcgtccgccgtatcggggacgccgcaaaggccgtcccccagcactgcccgcgccctgccttccgctatgtacggggcgagcagggtttccgcctttttaaggctgcccctgctgatgtccgaaaacaccgcttttttgcagagcccgctcttcagcatgtattcggtgcagtacccgtgatcgcaccccacgtccgcgaaaatctccgccgccgtcaaaagcgagcaaagcgtttcgatacgcttgccgtacatcagtcgagaaaatccttgagctttttacttctcgagggatggcggagctttctcaacgccttggcctcgatctggcggatacgttccctcgtgacgttgaattccttgccgacctcctcgagcgtgcggggcttgccgtcgtcgattccgtaacggagccgaagcactttttcctcgcgcggggtcagggtgtcgagcacgctcaaaagttgttccttaagcatggtgaaagcgaccgaatcgctgggcgtcgtggccttgtcgtcctcgataaaatcgccgagatggctgtcctcctcctcgccgatgggggtttcgagggagacggggtcctgcgcgattttctgtatctcgcacacgcggtcctcggaaacgcccatcttttccgcgatttcccgaggggtgggttcgcggcccagctcctgcaacaaaatacgcgacacccgcgtcagcttgttgatcgtttcgaccatgtgcacgggaatacggatcgtgcgagcctggtcggcaatcgcgcgggtgatggattgacgtatccaccaggtggcgtaagtggaaaatttgaagcccttctgataatcgaacttttccacggccttcatcaagccgagattgccctcctggataaggtcgagaaagagcatgccgcgccccacgtaccgtttggcgatggagacgaccaggcggaggttggcttcggaaaggcgctttttcgccgcttcgtcgccgtcctgcatatgctgcgccagctgaatctcctcgtcggcggaaagcaggggcaccctgccgatgtctttcaggtacattttgacgggatcgtccagcccgatgtccgacagcgcctgctcgaacagctccctgtcgcgctcgtcctcgtccacgatctggatgccggcctcgccgatcgacttatacacaaaatcgatctggttggcgctggtatcgtacttttccagaatatcgcagagcgcgttggtggaaatgctgcctttcatcttgtagttattgatgataccgttcaaaatttcgttgagtttttgttcggatatgttactcactttttatcctccgtttgataaccgaaacagtcgcctgttttctctcttaatttcaatacaacttttttactttaaggtttgttgatatcgcgtcatattatctatttcgcgaattagttgttttctcttagccatgtcttcctcagcatcgatcagatggtttagttcttctatctttttattcacctgtttcagttccatcttttgaacactttccgagaaaaatttttctgcgatcccgtccgaaagcttgtctccgtaattgagatcgagtatctcgttgaattcgggacaatcttcgtccaaaacctcaaaaagctcgctcgggcgcacccgctccgcattcttttcgcattttatgatgtattcggctatgattttatgcacattatcttcaaattcaatactttccagatcgcaattttccgcatagggagcggaaaaaagctttgcggcaagtataaatctcgcggccgttttatacatatccgtgccgatctccgacggcgggggcaccgcgatttccatctgtttctcctcggggagattttgaagatcccgttccagcgattgatagctgacatccgtctttgcgtggagcattttcaaaagatcttccttttcgctttcgctctccgccgtgcgcaccaccttcagcgcctccgcacgaaaagcgcgcttgtcctccgagcgcttcagatcgtactttctctcgagggaatgtatcttatagtcgatgaggggcatggccgcgtccaaacaggcctgataggcgtccgcgccctgcttggccacgtcgtcgggatcgagcccctcgggcatgggaacgacgcgcacgttgagattttcgtcctttaagatctccaatccccgcaaatcggccttctgccccgcaaaatccccgtcgtagctgatgaggacgttttccgtatagcgcttgacgagacgggcctgatccttggtaagcgaagtacccatggaagcgacgacgttatggaaccccgcctgataaagcgaaatcgtgtccatgtagccctcgaccacgatcacctctttgatcgtctgcgtccgtttgagctttttcaggagattgacgttgtagagcgttttgctcttattgaacaccatggtctccttggtgtttttatacttggcaaagtcggatttttcgagcagtcttccgccgaaccccaccacctcgtcaaaggcgttgatgatgggaaagatcagccgtccgccctgcgaatcgataagtctgccgtttttcgactccgtcagcacgccgctgtcgagcaggttctccttcgaatagcccctgcccgagagatattcgggcagggaataaaaatcgagcgacgcgccgaggccgaatttcttgaccgtcgtcggcgcgagcttccgccgtgagatatattcgagatgggcgtccgcctttccgccgtaaaggttagagagataaaatctcgcgctcgcgagcagtatctccaccagcgcgtcgcgtttctttttgagaagcgcggccttttccgaatcgaaattgctttcgggcacgggaattttcgcccgagccgcgaggatacgcaccgcgcccataaaatcggtggattcgatctcctgcacaaatttcaccacgtcgcccgacgcgccgcagccgaagcagtgataaaactgttccgactcgttcactgcaaaggagggggttttttcgtgatgaaagggacagcaggcccaatagttgccgccctttttatctaaagcgacatagctgccgatcacttccgcaatatcgtttttctgcttcagctcctgcatgaagcggggatcgagccccctgcctccgccgctcataccgtcacccctcccaaagaaaagttttcggggataaacagcgcctcgaacacgttgatcgcatacctgtccgtcatgcccgacagataatcgcaaatgatctgttccctgggcgcctcgtccgaaagccgtagataggcctcgggcaaacattcgggacggcgcatgaaatactcgaacatcgcgctcagcatgcgctccgcgcggtcctgcatggatttgttggtgatggagtaaatatttttgaacatgaagcttcgcagctcgaacgtcgccgccgccacctcctcggacatgcacacggcagcctttcccagcgaatgggcgtagatatcggtgatggcggtgttgatccgttcccgcgtggcgtggccgagcgttttcaccgcccgcggcggaagatcggtttcctttaagatacccgcgcggatcgcgtcctcgatgtcgtgattgatataggcgatcctgtcggccagcgacaccgccatgccctcgagcgttgcggggcggcccgtgcttttatgctggagaatgccgtcccgcacctccgccgttagatttagcccccgtccgtccttttcgatgacgtccaccaccctcaaagactgaacgttgtgctcgaagcccgtgggagagagcatgtccagcacccgttcgcccacgtgtccgaagggcgtatgccccagatcgtgccccagcgcgatggcttccgcgagatcctcgttgagagaaagcgcgcgggagatggaacgggaaatctgcgcaacgtccagcgtgtgggtcagccgcgtgacgtagtgatccccctcgggcgcaaaaaatacctgcgttttgtttttcaggcgtttgaaggagttgctgtagatgatacggtcgcggtcgcgctgaaaatccgtacggaattcgcacggcggttcctgtctcgcgcggcctttcgtctcgtccgacttcatggcatagggcgaaagaaaacgcgcttctatctcataggtcttttgcttgaccgagatcggcgtggtcttatccgtcattttgtctcctccttttttctttaagcctactttgtgcctaatttatatatatattcgacgtcttatgcgaaattcctttttttccgcgaaaataattgtatttttttgttcaaagttgcaaaaagaacggaaaaatcttccgttctttttgcaacttaaaattctatttccaagccgtcgaacgaaaccacgacgccgtactttgccgcctctgcggccagctcgtcgtaggtcgcccctccgttgtgcgaaaaatgattgattaccttaatcgtccgttcgtcggcgattccctccttctccatgcgccgaaatacctcgaggtcggtttccagacacatgtgcccgtctctccagcccgtcctgaccccgcccgtgcaatcgagagacacgagatccagcctccccgcctttttcagctccgcccagactttttcggaaaaatatcccgtatcgtttccatagagaaggcttttgccgtctccctccacacgataaaacacgggcgaggacgcgggatcgtgatttgcctccaaaggcagtatgcgatagccgcccacggtaaaggcgtggaaaggcgttattaaagcgacatccgcggccgaacgcatcagctccgaatccgtcactgccttaatcttccgatatccgtcttcccaggcgtgaaaatgcagggtgttcgtatatccctggcaatagtcccgccgcgcaatttcgatatcttcgggatagagatggtcgctgtggctgtgggtaatgagacagtgatttaccgcgctcaagtccaatccgtaacgttgggcatgccataccgtatccgcgggaaaatcgacaagcaggtcatcgtttatcagcgcctgcgaacgggaacgcaagcttcggccgcccgccgcgcgcgactttttgcacgtttcgcattgacagtataaggaaggcactccctcataggccgctgttccgaaatattttattttcatatcttttctccgagagaatgggacggatttttttatgccaatttacgccccatcagcacgcccatcaccgaggccatcatcagcccgcgcgtccagccgctggaatcgccgaggcagtgaagccccttaatatttgtattaaaatcggtgtccattttgatgcggttgctgtaaaacttgagttcgggcgaatacaacagcgtttccgtcgccgcaaacccgggcaccacgtaatccaccgactgaataaaattgatgatgttgatcatcgtgcggtagggcatggcggccgtgatatcccccgccaccgcgtcctttaaggtggggcggagattggagcgggtgagttctttatcccacgtgcgctttccgtcgagaatatcgccgaagcgctgcaccaggatatgtcccgcgccgagcatattggtcagctcgccgatcttctgcgcgtaagcgatcggctgattgaacggataggagaaattgtgcgaacagagaatggatacgttggtattgttggttttaagctccttgtagctgtgtccgttgacgacggcgagattgttgtcgtaattttcctgcgaaacgaagccgccggggttctggcagaaagtgcgcaccttgtttttgaagggcttcggatagccgataagcttggactcgtacagcaccttgttcaccgtttccatgacttcgtttctcacttccacccgaacgccgatatcgacggtgctggcgacgtgttccacgccgtatttttcgcagagcttttccagccaatcggcgccgcggcggcccgttgccacgacggtatcctccgcaaagatatccatgctcttactgccgtccgctttggtgacggaaacgcccttgcatatcccgtcttcaatgaacagcgtattgcattcgtaatcgaaaagaatttccacgccgtgattttgcaaatatttttcaatggagagatagatgctctgcgccttttccgtgcccatgtggcggatgggacaatcgacaagcttcaaccccgcctgaatggcgcgcttgcggatttccttaacctcttcgccgacgttgaggccttcgatgtgctcgtccgcgccgaattcgagataaattttatccgtataatcgatcgtatcctgcgccagcgtctcgccgatcagcatgggcaggtccccgcccacttcactgcttaaagacagcttgccgtccgaaaacgcgcccgcgcccgaaaaccccgtcgtgatgtgacaatagggcttgcagttcatacacttctgcgttttggccttggggcagtgacggttttccaccgactttcccttttcgacgatgacgatttttttcgtgctgtcctttctcaacatttcgatcgccgtaaaaatacccgcggggcctgcgcccacgatgactacgtctgttttcatactttcccgtacctccttaaatcgtaacgtgccgacggcgtccgattgcataaaaaaaccgcccgacggatatatcgcccacgctttcgcgtatggccaaccgaatcggcggttgtcaatgctgttttcggagaagctccgtttctttcacgcctttttggcacacgaataattatatcatgtcccgcgcgttttgtcaagcctaaattttacgtttttgcgggcggacaatcgattttttcctcttccgccgcctcctcgcggttctccttcaggatttgctttatttctcggatatcctcaacggcctgagacagcctatcctgcgaacagagttcgcgcactttccttttcgcggcgccgctttcccattctacacattcctcctcaacgaaagtaattttcgcgtgtttccgacaatacccctgttttatctgcgaaaatcccataccgcctttttcataatacctgctgtagtgtttacatgtgctgcattttctcattattgaaattctcctttgttttatgagttgctgtttacatcattttatgatttaatttattatacatcactttatgacttaagccaagcatttttgtgatgtaaagtataaaatataattatggaagattttaatttgagaaaagaagtgggcaatcgcctgaaagaaagtagaaaacaagcgggatacacccaagatcaagtagcaaaactgatgtatatgacccagcaacaatacagtcgttttgaaaacggtgttttcgaattgaactatcagcaaatcataaagttatgtcaactctacaatatatcggccgactatcttttcggtctaaaaatattttaatcatttctccaacaaaaaaacccgatgactgtcgggtttttattttcgttttcaagcgcttatttcaatcggttcgcccgttgggagcgtctctttttccgccgcccgcctttgcttccgctcgttgcttcgatacaacactttcatcttgtaaaaattgtagcgcaggataaaataaggcaatatattcataatcagattgatcacggcgacgggaaatccgaaacagagccaatatttcagcggatagaaaaaaataatcacaaagcccagaaaacagcccgcgagatgaataacttccccgtaagcggcctccagcatatatcgttccaaatagacgttgttgcggggttccgccactttatttttgtgaaaattggtaaactgtcccagctcgggcactttgtccttccatttgcggatttttagtttttcgtaaaactttttttcctttgccgaaacctgaaaaaaccttctttcgtgtccaaaccacttttcgggcaaacggcgtatgagaaaagcaaaaaggccgtcaacggcaatcaccgcaacgacgtttatgagcactgcgccgagaataaaccaaaagctcaccccgaaacggggcgcggcaaaaacggcatttacccccgtcagaaggcaaacgcagacgaatataatcgaaccgtataaaatcattcgctcctttcctcctgttctccgtaatcgagcgggatcttataaacttcctcgtatttttccacccagagatgataatttgtctctttcatgcgttcggccgccgccctttcgctcaacgtcttatcgggatagatgggctcgagaacgtgcagcgtatgccgctgaacgggataaccgctgccgtcgagccgttcgtcgtcccgcattgtgataaacataggcacgacgggcacgcccgcacggcaggccattttgaacgcgccgagcttcaaaggccgcggcttgcggtaattccaccacatcgcctgttcgggataaagcagcaccgtctccccgcgggtcagaagcacattgacggcggagagaaaattgatcatcgtgcgcggattgctcgacagaggcagagtgttgcagtgcttgaaaaaaaagccgtacaggccgggaaaattggtgtaattcccctcgcgtataaccttatagagcttgcccttgggaagctctttttctatggatttataaatgacgtaattgtcgaacggcgaaaaatggttgcaggtaatcatcgcgccgcctttcagcgccgcgagattttccctgccttccactccgtcgattatgagtacgtcctttttgatcagccgcgtaaagtaatgatccgcgatgaagttcgagatccccgtggcaatcctgctcttcagctttttgttgagataatccacccgatcgggcagaagcacgggcgcgggcgggtcgttttccacgtcctcgtcaaaacgcctctgccgctcgtaaagcgcaatcttttccagcacttcccttctgtcgggagctacgttgttcaaatccatggcagatcctttttcggatttatttcatccttccgtactgttttttatacaccgtaaaatagttgtcggggcgttcgatttcgctgcgcgccaacgcctgcaatcccgcctcgcacttcatatccctttccatgtcggcaaaggaaaacttatcgaaaatctccttcagcaagccgtaaaactccgtcttttcggcgtattcccaaaaatattcctgatagggaatgtccgaataatgccagggcttccacgtcatgccgtaatgcacgatgcgtaaatcctcgcgggcaagcttatccttggctacggggaatttgttccaggcgcgcggcagacgaagcacccgatcctgacagagcacgttgagatagtcctcgtcctgaatgacggtgaatttatattttttgagaaggtccgcgaaccgctcgtaaaaattttcctcgcggaagctcttgaggttcatgaggatcacgcccgcattgaaaaacatggagggatcgaggccgtccacttcggagacgtattttttatacacctcaaagctgttcacgccttcgcagggcgcgccgccgatcaggttgtcgcccagatcgtacgaataaagcgcgctgatatcccccaaaatcaccgtatcgcagtcgagataaagcgccttgtcgtattgcggaaacatccccgcgataaaaatgcggaaatacgtggtgcaggtgtaatagtcgcgcatgtgcaggagagaagatatctcctgcagcctttggctgacatctacaaaggagatctcgaagccctcttcggaaaaacgcatgatcttttcgtaatagttttcgctgacgcccgaatgaaggacatacactttataaagatagtctttagacgagttttcctttaaggaacaaagcgtcacgcccaaaaagggcagataattatcgtccgtggcaaaaaacagcggaacgacgggtttatcctttttggaagcagtatcggcaaaggtacggcggtcgcccctggcgagcaccgatttccccgcttccgtcttgagcggcgtataaatatgggcgtcgggttccgaccagcctcttcttcccaggtaagccgtccgaccttcagtttcattaacggcagccgacgtatttttcataaaatcaatctcctctttcattcttaacttttttgatgccgcgccgcagcgcccgcagacgtctccctcgggcggcagcgctttttgctactgatattattttatccgcttttgggagaaatttcaacctactaccgcgtttatctcctctacttgcccgttccttaattctaccgccattcaccttgcctctatcttcgaaatcgcccctgaagccatctttgcagcgcatatttttcgagtataattatttattttatgcaccattttttcctgtttcccgacgcgcaaaaaaatgggggaaaaaccgtttggaaatgcggcggaatcggcaaaaaatcaagcttttcgtccacttttttcaacttcgtttttcccgatgaaaaatgccctttcaaaaatgaaactatgcacggaagcgatttgtccgcactttttccgcaaaaaaacccgccgcgcgggcgcggcgggccaagtttcccttcgtttcttcttcggtagagcaaaaacagccgattctaccgtgagtagagaggatttttttcgaattctactcacggtgtagtcattggtgaaaattttttcggatttgtcaatgctttcaaagaaactttggttgtttgtcatacggcaacattacattgaaattcttaaaatgacaatcatatttttcagcattaaacagtagagttataaaaaggaaagaattctaccctgcgtggagaaaaatttacaagcataccgcacgggtagcgacatttcgggaaaaagcggcgtcgtgttcgacaaacaacagcgtaggacggaaagacaggatgagctcttctatttggatacgggaaagaacgtcgatatagttgagcggttcgtcccagatatacaagtgcgcccgttcgcagaggctgcgggcaagcgccgctttctttcgctgtcccgcgctcatttgggaaagctccgtctcaaattcgcgtttgtcaaagccgaatttgtttaacacggccttgaacaggctctcgtcgagcgcatacctttccgcgtattctgccaaagtgccgtataagtcggcggcgtcctgcgccacataagaaattttaagccttgaggctttcaaaagagctccgccgaacggcgcctctcccaaaaccgctttcaggacggaggattttccgcagccgtttctgcccgtcaggcaaaccctttctccttgatatacagaaaaagatacttcgcggcagacg

SEQ ID NO: 3502 - DNA, 32759 bp, Unknown
  16S sequences of unknown bacteria
attccataactcgtagatataacagattgagcaacgcggtctcattggggaacgctccttttttcgttacctttctaaaattggaatttatcgctttatttaacttgttgataaactgagattttcctatcctataaaaacattgtaaatcactacaacatagacaaatactgcggttaaacaggtcataataaaaccgcctttatctcgattatttttatattctatacttcttaatagtaagagagtggcaagtgatacaagcataatcgggtttgctatgtcaaaaggaagaattttcactaatcctaatacagcgaaaagcattattattatagataaaatgatttttatgattttcatacaatcacactcctttgtaaaatcccaatttatttgttatggaattcaaatcgattttgcaactgttccaaactttgataaaccatttcatattgttcaacggtccagtctgatgttagctcttgattgaattttttaaggcttcacatagaggtttatattgtaatttttctgttacatatagtttttattccttttatcctcagggtcagtttttcgaaaaacaatttctttttttctaatgacctgattcttcgcgctgtagcagctttatcgactttgacaattttcgttaattcgtcttgtgttaggccatcattttgtgccagtaccatgaaataaggttcttccccaacactgatatcagattcacaaactacgtttaatataccttagatctataaaatgctttagctgctactatctcatccacagtataattttcaccaattaactgaactacctgaggaaccagtaaagtcaaaactgcttcaaactttttatccaccatcaaaactcctcctctggcacagtaccgacaaatcgtaagtacgataaagcctttactgatgtcaacactaactgatcatatagtttcttgattttgagttgttccaaggcctgctcctttgtcaatatgccagcagtatagaaagtaaatgtccgatacacatcatcattggccattggcccaagaataagatcatagtcttctcccttataataaccagaagttatctgatacagagtccaaccattcttctcctggctcaacaaaatacagaacagagcattctgaaaaagcgatttcgctgaatcagcttaagctttgatacgaccccattgctgccatgatataaaatcataattatccctccttctctgcaaatatcgaatcattatttcgatacgcctgcgttttttacttacctccaaacaatctccacaacttttcacaaaatatactttaacatttcttcttcatggcatcttaaatataaacttggtctcttttcaaaagtggtgtctttgaaaagattcattttgacattttaccaacatacgatcgacgtatcctatctcacaagatgatactaaaaatcaaatttcacttcccctctatttctattatgcataattataaacagcagattaaaaaagtcattagaaagcaaggcatttcttatgaattttttgccttttttcaaagtttttttctgtttatccttcatactgcaaataaaccttttaacaagaacgaagttcaatcacatctacatactgctatttatagcaactgcccgtcatacgaaaaaactgccatgaacgcggcagttttttcttactctttgatcttgatcgccttcatgcgcagacggacataatcaacatgctgctcattatcgtgacatagctttgtcttcaagctatttacggcttggtcaagcacagatttctgatcttctgtgcggatgatgaccagcggttctttcagaaacatcgtgatcctatcgcacagaccatcatttccttttaatgggcagaccagtcaaagagaatagcatatcttacctcaaagcctgtctcatccagcatggctgaatattatgcgatcgaggaaaaatagaaggggttttcatatacatatccatgcgcttgaaacgcatccgtccgcacgaacgcaagctgcggatacgtttatctggcaaggcgaagcagcgcgacagacctgatatcctttctcttacagcctgatcgtcaaagcaccgttgccgcagcccagatccaatacggaactgccagccgacgcatcgatcagttctgtcacgtcattgccatgctgatgcacgaaggaaaaatctacggtgcatcgttctgcttcccgctccatggctatgctcctttcaatatccgagatcttcgcgaatcaggaccacctcaacagcactgccgatgggcgcttcccataagatggacaatcctttgcagatccgctgcgggctgctgcaatcaaagcagcgctctcccttcacggcgcaaggcgtctgcaccccgaggcgctgagcattgagcggggcggcgatattgcgcgcacgatgcaaggcacgctccatatccgcttcgatcttgtttcctcccgcgatcaagtagaccttctcatgtccgtaaacgatagaagctacacggttgcatctgccgtcgatgttcacgatctctccgctcatggctaagccgttgaccgaagagagatagatctgcgcggcattggccagctgacggcactgcgcgtctgtgcgctgtcccggctcccagtgccaatacaccgtattatgccggttcagccgcgcatacagccccatctgcttcagtgtcatcgatccgccgaagccgacgcttttctgatcgatctgcgcatccagataatctgccgcttcttcagcggtatcaaaacagctgacttcatatcctttggcaatgagattggctttcagcgtttcaaggtcaaacatcagtatttctcgatcttgcggcgctcaggcttgagattgccggtcttctgcgcgcgacggcccagttcttcattgacttcatccagcgtgatgcccttttccgccatcatcacgaacagatgatagatgagatcgccaatctcattgaccacttcatcatggctgtcttctttcatggcggcgatgatgacttccgtgcattcctcaccgactttcttcaggatcttttccagacctttttcatagagataggcggtgtagcttccttcttccgcatgagtcttgcggctgaccacggtctcatacaatgccttcatttcattttccatgttgctcttcctccttatacagcgtgcggtaaaagcagctgcgtgccccggtatggcaggcagcgccatcctggatgaccttcagtagcaaggtgtcttcatcacagtccaaggcgatctccttcacatgctgataatggccgctcgtctctcccttgagccacagttctttcctgctgcgggaataataacaagccagcttcttctccagggtgatcttcaggctttccgctgacatataggccagcatgagcacctgtccgttttcggcatcctgcacgatggccgggatcagtccgccctgcttggcaaaatcgatcttctgcagcaatgatccatcgatcatgatctcaccttcatcctgactggaatgccatgggcagaaagatggtctttgacctctcccacggtgtgttccccataatggaagatgctggccgcaagggcagcatctgccgcgtgtgcgtcttccttcagcacatcctcgatatgctggatgtttccgcatccgccagaggcgatcagcggcacatcgatgatctcgttcacggcctgcagcatcggcaggtcgaagccctgcttcgtcccatccgcgtccatgctcgtcaacaggatctctccggcgcccagcctggtcacctcagcgacccactccagcagatcgatgccggtatcgatgcgtccgccgttgatcacgacattccagccgctgtcgtctgccctgcgcttggcgtcgatggctgccacgatacactgactgccgaagatctcagcgcccgctttgaccagctgcggatcccgcacggccgctgagttcagcgagaccttgtccgcgccggcgcgcagcagcgtccggatatcgtcgatggtgcggatgccgccgccgatggtaaaggggatgaagatgaccttggccacttctctggccacatcggccatcgtcttcctgccctcgtgtgtcgcgctgatgtccaggaagacgatctcatccgcgccttgttcataatattgtctggccagctctaccggatctccgacttccttcaatccgacaaagttgacccctttgacgactttcccttccttgacatccagacagggaatgattcgtttcgtatgcatacctattcctccctgcacagcgagatggctgccttcagatccagcgtgccatggtacatcgcctttcctgtgatggcgccatacaggccgagctgtttcagcgcagcaatatcctcgatgctgcggatggcgccgccgctggcgatgatgcgcatgccgctttgtcccttcaatgcggcgagcatgtcggtattggggccgctcagcgtgccgtccttggaaatatccgtgacgatgaccgtttgtacgcccatctcttccagctgtttggcaaatgtgatgtaatgcagctcgctggcctccagccagcctctgccatataccagaccgtcgcggcagtcgatgcccacggcgatccgttccccatatctgcgcagggcatcctgcagcagctgcggatcttccatggcgctcgttcccaggatcacgcggtcgatgccgttttccagatagctttcgatctgcgccatggtgcggatgccgccgccgacctccacgggaacatcgagcgcatgcgccgtctccaggatgatctcatggttgacgcgcttgccctccttcgctccatccagatcgaccagatggatgtattctgcgccgctttgctcaaagttcttggccagctccatcacgctggagccgacgatctctttctgcgcatagtccccctgatacagacggaccggttttctgtctatgatatcgatggccggcaggatgatcatgcttttccctcctcacacagcgcggcaaacttcctgagcatgttcaggccgtcttctccgctcttctctggatgatactgcatgcccaggatgttgccatgacgcacatagccggggatcttcagcgacccatattcagaataggccaccagatcttcatcgcgatgatcctgcgcacgataagaatgcacatagtatacgaatggatgctccccttcttgcaggatggtgtccggatggatgacttccagccggttccagccgatgtgcgggatcttgacatccggatcttccatgagacggatctcgccctgaagcaagccaagcccggcgcattctttcacttcatatcctttttcaaacagcacctgcatacccaggcagatgcccagcaatggcttgccctgcgccgcttcgctcttgatcgtgtcgatcagcccgctttgttccaggttgcgcatgcagtcccggaaagcgccgacgcctggcaggataatgccatctgcctgtttcagctgttcagggtcactggtgatctctgcctgagccccgatggcctgcaaggcattgtagacgctgtgcaggttgcccatgccataatcaatgatcgcgatcatctatatcactcctttggtggatggcagctcgtcgctgacgatgcagacggcgctgcggaccgctctgcccattgccttgaagatcgcctccactttatgatggtcattttctccatacagcacattcacgtgtagcgtcatctctgcctgaacggcaaaggcacgcaagaattccggcgtcatctcacaggaataggcgccgatctgatctcgcttcagttcgcagtgatacacgagatagctccttccgctgaagtccagatcgacacagcacagcgtctcatccatcgggacgcgggcactgccataacgggcgatgccgcgtttatcgcccagtgcctccttcagcaccttgcccagcacgatgccggtatcttcgatcaggtggtgatcgcagacgtgcagatcgccctttgccttcacctgcagatcgatgccggaatgaaaggcgaacaaggtgagcatatggtcaaagaagcccacgccggtgtcgatatcgctttttccgctgccatccagatccatcttcacgaagaccgccgtctctttggtctctctttgcagctgtgctgtccgcttcatcatgcattcctcctgtaagtctccaatacgctgagcacaagggcattttcctcttctgtgcccacagtgatgcggaagccttcatccgcatagctgcggatctgaatgccggcatccgcaaacgcctgcaacagttcttcctttttcgtgcagcggccatagaagtaattggctttcgacggatacacggtcagcgtctcatcctccaactgcttcagctggatgaacatctgatcacgacgcgccttcagcgcatctgccgcagcggtgatctcctcatgatgagcaagcacgatccgcgctgcgcgctcgctcagcacattgacattatacggcaccttggccgagcggatcttatccatcgccttggcgtttcccagcaggaatccgcagcggatggccgccagagagaatgctttggacagcgtccgcatcacgaacagatgatcataacgatccagcatatcgatcatgctcgaatcatcaaattccgcataggcttcatcgatgatcaccggaatgtcggcaaatgcctccacgatgcggcacagctctgatttaggtatgcttcctcccgtcggattgttgggattggaaaacagcaccatgctcacctgctcctgcctgccataggcgatgaagccttctgtgtcgaatgcttctccaggtttgatcgtccatctgcacatctctccgtcatgcatgccgcaataatagtcatacatcgaaaagtccggggcaagcgtatacagctttttgccttttccgatatacaggccgatcatcagcccgagcatctcatctgagccgtttccagcgatgatctgttccggctgaagctgaagatagcgggcataggcttcacgcaaagccgtatagtcatcctgcggataacggttgaatgccgtttcctggatggcctgcgcgatctcttcccgtatcgccagaggcaggttcacgctgctttcattggcgttgagcaggatgccttcctgcttcatggcctgatactgactcgtctgtttcatggcttcatcctcactttcaccgcgttggcgtgtccatccagtgattcatgatgggcgatgttcatgatctttccaccgtcgcgctgcaatgcttccttgctgtaatgcagatagctgctcttcttgatgaaggaatcacagctcagcgcagaggcaaagcgagccgtgccattggtcggcagcacatgattgcatccgccgaaataatcgccgatgctctcacaagtatagtagcccaaaaagacgcttccggcatttcggacaagcggcagccagctgcgggcatcctgcaccatgagctccagatgctcaggcgctaccgcgttggctttttcgatgcattcttcgatggtatcgcataccatcacagtaccgtaattgctcaggctctgagaaatgatctcctgtctgggcaaagcgtcgctctgccgctgcagcgcttcttcaactttttccaccagcgtttcatcatccgtgatgaggatgctgctggccatcggatcatgctcggcctgggagatcatatcggcagccacatattcaggatcagcgtctttatccgcgatgacgaggatctcgcttggaccggcgatcatatcgatgtcgaccttgccgtagaccaggcgcttggcacaggcgacatacgcatttcccggtccgacgatcttatccacgcgcgggatgctctgggtgccataagcgagggcagccacggcctgtgcgccgccgaccttgcagatgcgagtcacgccggcgatatgcgcggcggccgcaatgaccggatctacgctgccatctgctgagggcggcgtgaccatcacgatctccttgacaccggcgatcttggccgggatgacgttcatgagcacagtgctgggataagcggcgcgcccgcctggcacatagacgccgacacgctccagcgggatgacgcgctgtcccaggtaaacgccgtcttctttctggatctcatatccttcctgcagctgtttctcatgataacaagcgatgttttctgccgcttctttcaggtcagcgatcagcgatgcatccactttgctcatcactgcctcgatctcctcttcgctcatgatcagtgaatccagcttcacatggtcgaacttttcggtatactccagcagcgcgtcatctttgcgggtccgcacctgttcgatgatatcgagcactttcgcattcatctgctgatcgacgccggcctcgcggctttccagataggcggaaagcgcctggacatctttactgtcaatcttatttaaccgcatcttcatccctcactttcttcagatcatcaagcagcaccatgatctcatcacgcttcagcttgaagctggcgcggttgacgatcactctggcgctgatgtcacagatccgttcatagacgatgagcccgttttcctttaatgtcgttccggtctccatgatatcgacgatggcgtcacacagtcccaggatcggggcaagctccacgctgccttcgatcttgatgacttccacatccatgccgcggctgcggaaataactgcgggccacgttggggtatttgctgccgatcttgatgtgaccgatcttctcaaaggggctgcatcccggcaaggcagccacgataaagccgcatttgccgatccccagatccatcatctcataatattttccatttgcttccatcagggtatctttcccgacaaagccgatatctgccacgccatgttcgacataggtcacgctgtccgccgctttgacgagaaagtagcggttgtccttgaccgtatcgtgaaacaccagctgacggcctttgtttttcagttcttctacgccatagccgcagcgctcgaacatgcgtacgctctctttttccaggcggcctttggtcaatgcgatcgaaagcatgatcattcctcctcgacgctgatggccaatgcgtgctgatcgggcatcagtctgatctttctgtgttctttccgatatcttgcggcagcgcggagcgcttccacacgcgcattgggatggaaacggatcaccaatggctttgtttcttctggggcctgagccacttcagccagcgcatcgagcttgatggaaaagccgacagccggaagcatcctgccatatttgccgatcagcgtatcatagcgaccgccgctgagcacgcgtttgcctacgccgtccacataagcttcaaacacgatgccggtatagtagttcaggtttttggtcttgcccagatcaaactgcacgcgcgcacagcccagcgcttccagatcttccgcaagatcctccagccgatccaggatgacggtcagctctttgcaaaaacagtactgtctcgcttcttccagcatttcctctcgtccgctcagccagggcaggcggttgaagaagcgctgatactccggcttcagctgcagctgtgtcagcttttcttccaatgaacgcaggcttttttcgtcgatcagctctgccagctcttctgcatcttgctcactgatctgcgcataccggcatgcttctctaaagaaattgatattgccgatctccaatacccatttgcggtcattgacgacttccagggcatcgagagctgtcatcaggatctccagatcgccaggaacttcttccagtccgatcaattccactccgcagtcgctgatttcgttcttcagcccgctcagttcttcatggaccttgaagacgttggcgcaatagcgaaaccgcagcggtaccggcgcatctttgtatttggtcgcggtcagccgggcgatcgggatggtcatatcggccctgagcatcaggatgcggccttgtgcgtcaaagaatttatacatgtcttgttcattgatgttgtcaaacccggcctcgtatgtcttgtagaattccacggtcggtgtgatgacttcttcatagccccagctgtccagtctggcttcgatatcatttctcagctttgttctgatccggcattcttccgggatcagattgcgcatgccctcagggatcgtgaattgtttcatcgcttctcctccttctaacaaaaaagactctcatccaaaggacgaaagtctgatcgtggtgccaccttttttcaccggctcctcacgaaaccggcctctgtgagtatctgcatactccggcacgataacggatgccgtttccgctgaaggctactgcatggttcaccttcaggactccaaggtgtgttcgcagccttcccatcttctcttccaccagccgagaagtctctgtcatgatccggactgttactgctccttttccccgtctttgttattcgtataccattatattactatgccggaaaactgatgtcaacaaaaacttgaaaacagtttcagcaaatgaaaattattttcaacaaagtaaagaatcatcctcagcaaacctgccatactaatctcaggagggatgctcatgagcccgcttgcgtaccgtctcagaatatgttccggcatattataccttctggctgccatcgtgttcatcatctatttctttaccgcctctattcatgcggcgttcatcgcgacagcattgctttggtgcggggtcatcctgagcttggtttccagatgggtacgttaatcagcatatacggccgcatgaaacgattggccaacaccacttcaccaatttgaacagattattttgccggataatacttttcctataccatttctatccacgttcccacgtagggaacgaccgtaagcgcccagttcgtttccgggatcgattgcatttctatccacgttcccacgtagggaacgaccgtcggcgctctgtacgtatgcaacggcgttggcatttctatccacgttcccacgtagggaacgacggtgagcagaaaaccttaaaacgcagcatcaatgaatttctatccacgttcccacgtagggaacgacttcagaatcttgaagatgttttgaaatagaaagatttctatccacgttcccacgtagggaacgacccctcccggagtacgcccggcagaatatgtgcctatttctatccacgttcccacgtagggaacgacgacgatagtgatcaagagcaaggaaggcaagatcatttctatccacgttcccacgtagggaacgacgatgaaatcgctgggagaggggtgatgacatgaaatttctatccacgttcccacgtagggaacgacaagacagatcgcaattactgaaaatcagattaagatttctatccacgttcccacgtagggaacgactcagcgattggctgccccgacagacgaagcagcatttctatccacgttcccacgtagggaacgacgcttggattggtggggtttcgacctctgcttgcgcatttctatccacgttcccacgtagggaacgacgatgtatgccttcgctaaagacgggaatgtgttcgttatttctatccacgttcccacgtagggaacgacgacggaattacgtctttgattacgctgatgctataatttctatccacgttcccacgtagggaacgacactggctggatgaagagccgcatcaatggtgttgaatttctatccacgttcccacgtagggaacgaccaagaccgattccgggacggcgagacatcctaacatttctatccacgttcccacgtagggaacgacaacgctcaaaatcggattcaaacctgccttcttcatttctatccacgttcccacgtagggaacgactcataatagtgattgatgaccgttacaacatcatcatttctatccacgttcccacgtagggaacgacggcattttatctttcctttctatagataatttcatttctatccacgttcccacgtagggaacgacactatcaatcagttgcggctacaatatttgagaatttctatccacgttcccacgtagggaacgacgttcagaattccgaaactggtacaactcctcaggatttctatccacgttcccacgtagggaacgacagtccaatcggaaatctttcccaaacaatttagtatttctatccacgttcccacgtagggaacgacgcatatggcgcaagccatgcctgcttaaggatgggatttctatccacgttcccacgtagggaacgacctggaattgcatctgtttgtttgctgaattttgattatttctatccacgttcccacgtagggaacgacggaaggagagcgtcaattactctagcgacagaatatttctatccacgttcccacgtagggaacgactcaaggtcaccgcatcattcaagtcaacaatggtatttctatccacgttcccacgtagggaacgacggcggacatcactatattcgatgaccactggtgcatttctatccacgttcccacgtagggaacgactgcaaaagtgattgaaaacaagacatatttgccatcatcttttgctataaaagggttcattcacaaaaaacacatgcactttgtgaaatatcccttattttgttaagtttttctagtgcgaggctccaggcacttttatgtgcactagggattcgcacaagagtttacgagtaatcataaatttatatcagcaatataccatcctgtggccattgaggcgttcgtccaacatgttccacctttgttttgtatttattgccaagttgataaaatcgcaaactatcttctgacggatcaatcagatcaattagctctgccttaaaaacggtaaattgagcagcgtccaacatacattcaaacacggaattttgaactcgctgtccatgatttacacatgccttagcaacttttcgcagtctttttcggccagcagctgtctccgtattaacatcataagtgactaagataagcataaattcgctccttatttccagaaaaatggtggataacgttctaaatctcctcgcaaagtacgtgcgagcagtaaagcctgtacatacgggacaagtccccaagggattttttccttcaaaaacggatgttgtatcacctgttgcttgcgcaattgccaagcttccaaaaaagcccggcgcccttcttctgtcaaaagtacagcagtgctctcttgcttttcgcaatgctttggcaaaattgttttctgattgatgcaagttaaaacaaagcgatcagcataaaccgcacgaagctcttccatcagatctaaagcaagactggtgcgaccaggtctggggcgatgcaaaaagcctacatatggatcaagccccacaccttctaatgctgcagcgcagtctcgtgccaacaatgtataggcgaaagatagcagagcattgaccggatctaaaggaggacgtcgtgagcgcctggtaaatgcaaatgttttgcgctgttgtaagatcaaattatcaaatccactaaaatacagttttgctgcttcgccttccgtaccgcgcaattcttccaaagtttctgccttctcaatatcggtgagagctgccgctaattgcccagatattttcttcagcttatctactggaacacgctgaggatgatctcgagtcgctcgttctaaaacccaccgcgcattatataccttacctaatagaaacccttttgcatactgacaactgtttccaggatcatcactgacccgaaactgcttctgccgcagcaagacattccctttagtttcaccaacagaacgtgcaagaaacttaccacgcgggttgaaaaacgctaaatcgatattccgctgtgcgcaagcgcccatcaaagcaggtgaagccccagcgtaggaaaagctcaatatcccctctaatgtatgcagaggaaagcgtgcaatttcttttttctcttgactgaccaagacgttctctccatcaaggctcaaatagctgttttcagttaagacaaacagagtattcaataactttctcattaggaatctccttctgactcttctaaatggctgcgtatgtaatcatcagcattgctgcggcggcaaagagtcggtaagcacaattccttcaaggaacacgcattacagtgtttgcccggctttacctttggggtatagcctcgagcgaaataatcattcatctcatccgccattttctgcgttttttgccgaagctcagacgtgaattccacttgttctctacgacgggtctccgcatagaaaatagcaccttgcgcaatatcacaaaccagcatttcttccaaagccataccttgtgcacaaagctgcaatcgatcagcatcattcgtttttggagatccatgtttgtattccacaggtaaaggaagccaaagaccagaataatcctgaagggatattccgtcaggatcagcccggaattctaccacatcacatgtcccagataatctcaggcgatgactgatcactctcagtcctcgtacgatcagcagatcgccgcgtttttcacggaaagaatcatcatgacaatgctcatgcagcaaatgtccttctgcagttctctggttctctgcccactgctgctccagataagcgagtgcccattgccggcggcaaaagcagaaatgctgaatgccagacatttgcagataatcatcaggattcgtcataaacttctactgctaagtcaggcagttcatcacaagtgatggtatattcatgaatgtcatgcggcatatcgacatttttttcgatatgtatcaatcggtgtactttagcagaggagtattgtccgctcttgcagttgtgcttccaccaatacagtctcaatacctccatgctgccatctggccgagctgaggacgcatcattttcaaacagcgtgcgtaatgcttctttcaacagctctgcatcttcttcagtaaagccggtcttttctgccagctgacaattgatgctgccaaaagtcgtatacatcgcaaatccaacacgatgcttggttcccatcgtatcacttgatttcttatcactggtcacgctgtttacgctctttgtaatttgcaagctatcaattgtgatcgggtcaatgctgaaagctgggtgaatagaaactggtccgcgtattcctacagaaactccttcgtttttccctttaaatgcaaacacttgtccaaaactacgtacatctatccatgtctcacatgcagcttttgcataagcttctcgatctttagctttagtagcggcagctaatgcctgacaagcatcagcgcggtctttcaaactatgatattcatcattacggcgatcatcagactgtacaaatacgttggcccccatatccatcaatcgattacggatctttcttttcaagcaaacatctgaaatctctccatatccttcataagtctcacgcggacggttgccgttcaacgggtctccattaggattagcatgatgaactgcgatgacaagtgcaaaatcgattttattctgtaacgtctccataagtagctcctcctttattcatgatcatttgatgcttcatctgtctttttgaaaaaatctgcccgctggcaggcatagccaagtaagtacaattccgttaacggctgatcattaaactcctccatcggaatacgtgagatcaactttaacatttgttcatttgcgtaaacagacttattcgccttgatcagacgttctaaataaggttccagttgtttgcgcagcaaagccagcgtcttagcaggatgctgagtatatgcgacctcataacgcaaggcattagtcggccgattgcttttctctcctgcagtattgtagacggcgtactgttccaactgatcagcacaggctaagatccgtccaaacagataactgcggtcgctgcaattttcatcaatagccatagtatattcctcctttaaattacgatgatgatatcctttgatcaaagcacaggcaatgctgcgagttttattgatttcccatgtttccatagcaatgccatttgcggctctgtgtacggccgccagcatgatgtcttttggaaaaggacgtttttctgtaatgcaaggcagcaaacgttcaatggtctgttgtttgagcctatcgtcagctttaactccataagcggctgatgcgatatcgatcggtgcaggtgcgcctacaaaaacaacaggtacagctttcttctttccttttccgtcctccttcatcttagcataacgaagttcccagccaaatgttttgtgccaatcttcgatattatccatcagtcgagatccagaaagctctcgataatatcgaatggataagcggccaggtgtagcggaatcaaggatcatcacactgacttgactatgctgagtcaacacgtgacgatatccttgtatcgctttgttgaattctgccgcaaaactttctcgtgtctgcggaagggtctcgcccccatcataaattgattgaaattcttcaccaaaaagatcactttgaccacgttccatcaaatcatatgcatcgcctgtgatgggagggatcggctcattttcagtaccccatgccagtatagtttgatcaccattctgaataccctgtctccctaccagccatcttaatgcgctatgtgctttttgtgtcgtatcaaagccaatggataatgcttcttcaacattttcgaatcgcccacgatatgtaaaatttgtactgtcattgctggaaatcaatttcgcgcgatccccggcattacggatcttatatgggctcagataagatatgggcatctcttctccctgtatgtagcagattcccttgtttcccaatgtagattgataatactgggtataactatcccagatttttgaatccaaagaaaggatatctccatccacttgaaaacgaacaaatgtctccaactgatccccgccagtaatagattgaaatatcggcggtatctcctctttgggaccattccatttttttaacagctgacctttttcatctgcaaacaggaccctttctgcaatcaaatctctgatcagacatccttttttcagatagatcaatacggcacgtaccttttccgatccaaaaggagaatcacaccatgcttgcagctgatcaaggtattctgcccacatgtgcttttttgtaccgcctctttctacatagtctcctgctatgtactgcaatttatctactagtggatgaggaacagggccagatgtacgtgcagaagattcttcagtgcatggaatgaccgtggtcatgtcatcagcgtgaagaacatgtgctgagataaagtccgctttttcagataagctaacttccacatttactttctgcgtagtatgggctactggaagcaagatcggtgcattccagccatgtcgaatagatgcagaaggcttaccgacctgggcaagatttttttcataagtctgataacatcgttcaatccagcccatcttttgtcacctcctgataaagatcatcgcagctctgtaaattttcatctttcacaaaaactttagccttctgctcacgaatcgggcgaatcactggacactcctctggccgtataaatgtgatcacgccatctttcattaccggacgccacaaacgctcatacatttgtccgctgtcatgttcatctgcatatgtgatgccatgcaccataagaccaaatggcatgggtgcagtgtcatcataggcacctggtccttcatggaacttacatggctctacatatccctgacactctcgcgtaccaaggaaaatgtcacggcgcccgccgcgctccaacattcgcttagcaataaaataatgtttattctcattgcggtctcctgcaagatctggccgatgcatgttccattcaaaatgtgctttgatttgataagatacattgaccaaataggtgtaaatagatagatcattggtgccattgttatagcgaatggggcgaattccttttgattccgtttctatgggattcaagatacggacggcatccgggacccaaataatggtcggtttccaataaatgctttctaatatccctttgactgcttgatacgtaggaacaggataactgaatttctctccccccactcgcgtaatgggatcactgaacagggcgtaacgtccccatacatgcagggtaatggtattgctatattgcaaaggtcatctcctcctttcttgctcatcgatcatacgataaaagctgtcgaaccaactgattcaaaagataagcctttgtgttcactgtcgtaataattttcctgcaaggccaaagcctcaccatccaaaacaaaatacaaggcattgccaaggcgccgatattgactctgactgatagagatcgtataaggctggagatctttcaacaaagccgtattcgcacgtgcagactgcaattccagaagcagctcttttccacgtccgtagggaacaagtaccgaaatcgtttcatctggaattgccgcaaaagcagactctgccgtgccaaaagcctgacaaagacctgctcgacatggtatttgcctttccttagaggcattgattccctgactattgatgcttaacaggtctaccatggtagaagcgacatgacctgttaccgaaaatggatataacatatcgttctggtggcgaggatcaccataatatcgttgataatataactgaatgacctgaggcgaaagtagatcagcctcttctggcaatgtggccagcaattcacgtgcgatctcacggccatcatagatttctggtaaagcatccagattctctcccgcacactcgatcagatacactggacggcaattggattcaccgtgacggttacagcggccggctgcctgagcgatgctgggcagaccggcaagatctctcacgacacaatcgaagctgagatcgacaccagcctcgatcagctgcgtactgatgcagatcaatgatcggccgctcttcaatcgctgatcgacctcatccaatacatcattgcggtgctgttgacaaagattcgtcgttaagcagaatatacgacactctggtgaaacaagaggtttcaattcatcaaatagtttattgaccacatttttggtgttcagaaccacaaggatgctgcgattgtctttctgcaggctggtcacaaaatcagcaatagcagagatactctgtcctcccttgatcattggccggatgaccttagttcgcttaaactgctgaaaacgtaattgataatcaggaacgatatctttttgatcggcaaattgtaaagggataggtgctgtatctaagtcaggctgtgtcgcggtacataagatcaccgtacaatcaaacagacgcacaagagtatccaaagctaaattaagcagacaagtctgtgacaacggtaatgcttgaatctcgtccagcagcaatactgaaccagcaagagcagacaaacgtcgtacattctgccgcggcgcagcaaataacgtatttaacagctggaccatagtcgtgcagatcacgggcacgccttgccaccgctgactgagcgcaagccatcgttcttgatcgctgtactcatccgactcgaacagaacgtctgaatgatgctccagcacatattcctcaccaagtgcccgacggatattctccgcattttgcttagtgatcgatttgtatggtgcaaaataaaataagtgatgagcattctgacggcgagccatttgcacacaaaaccgcaatccagaaaatgttttaccgccgccagttggaacatacaatcgataaattcctgcaggacgtccttgcgcagcaaccaaacactgatcagagatttcgcgccgcaagatatcgatgggacgttctgctttcagtgaatcagtaaaccattccattcggtcgcaaagcaaattccaagtagctaagcgtgtatcatcagacggaaacgatggaagcggcaaatgattcatgaaactagccgtatcagtccaatccgcatccaccaaagcactgaatatgaatcgctggataaatcccagaccgaaaaataacgcattcttatacgcactcttagatgattcttctggaatgatggtctgtgccttaggaaatatcgtgtggatctccttagcggcttcttggatccatcgctgaatctccgtctcctcacaacactctgcaaaaaaacgagtcacgctctcatggtaaaacggatcagcttttttggagtacatacgctccagccaaggtcgatttccatctatgctaagataatcacaacggccgctgtgatgacatccgatagcaagcgcaatgatctgtcctgtcaatcggacataattatcaaatttttccgttcgttcccatatccaccgcatacctgccgctgagtgattaagcttttccttagtttggttccaaagatgatcctgcacatccggcgcagattttcccatgtcgtgcagataaccagtcaacctgcctagattctccaaaccaaatggacgacatatcgcggcgcaatgcattgctacattctcactgtgttcacgcaatgtttgaatataaggaggcgcattatcgtctgcctgatcgagaatatgtgcgatcaaagtcttcttcactatttctcatctccaatcaaatcaaattttacttaatttagtaatattacgtataaaccataacattaaacgtcttgactgtcaatcactgaaaaaacaatttgtaatcgctttaccatcaatatgatcctatcagactcatcataaagcaagacttgtcctcatttttgcaaaataatgaattcaaatgacgaattccctatccacattctataaatctttattttatcgtctaatcctttgtaaaaagccaaaaaaacatgtatactacaaatgtcatttcggctcatgcatgagatgtggatagaaaaacttattttagtaatatggaccttgtccatttgggaagaggctgttaatgtattagcagtttcttcccaccttttatatacagttaaagatcgatccgcgttttattctttatacaaaataagaacgattttgatatacgatcaattgaagaacaatctgatcaatacatgatcagaacgagtaatttgctatgttgtgtacagattgacgagaaccaattatctttctatttggatgacaatgatcattgctgatcgatttcctctattcgccataaattatctacgattgtaactgtgatctatactataataatgacagaatatttccacaaaataaagctattcctgcatgatcatgattttttatcaaatggaagaatgaagaggataaggcctctgttttaatctcggtcttctcatcaagattcaattgcgtccagcacaccattaaaaaagcgcctcaaagcccttgtcaaaagccatgagacgcgctgacgcataaagagttgaatatgattacttttcttcccgtctgctattgcgatactccaggatattgatcaatccagcggtcaggatagctacgatcggaaagatgatccagacgatctcccagctctcctgcgtaagtccgatgaacaggaagaccatagcggccaatggcatggtaatgccccagatgaacgcatagcgcgacgcctgcttctccttgtccttctcttgattggctgcttcaaagtagatgaaccggcgatacgcgccattcatgatccccgccggaatgatcagcaacatagcagcggcagtgaaataaaacaagatcgccccatagcgttctgcggcgtcatggatcagtgcatccgccgccaccgtggcgcataatccaaagatgatcagaaagatgccggaagtgatgaccaccatgaagcgtttctgaaacttctgatacgctttgttcaatgtctccacatcactgcggctgacatagatcttccgctcatccagatattgccagcgatgagcatcgcggatgccgaaagcgacaaagacagcgaccgcgatccccaccatgagcagaaagaacgccgctccgacctcttcatcaaacaagattggaatggtcacgccgcataagatgatcgccacgccgatcgcgatggcaaacgcaaagggacgtttccatttcagatactcctggatcgtatccatggaaacgctgagggtgccctcatcctgatctgccgtatcctgaacgccttgttcattctcctcattgagcaaataatcgattgaaacatgaaagagcctgcctaactgaatcagcttttctgtctctggatacacttgcccattctcccatttactgacagcctgccggctgacgcccagctcatcagccagcgcttcctgcgacattcctttttcttttctgagcttctgcagtttttcgttaaatttcatctccatcacctctgtctgcatcgtaccttgttcagccgttttcagccaccaattgacgtttgcaatttgtcaactacaggttgcatcaaccattttttgcggttttttgacgatttttccctttttctcccattatatcggaaaaatgagcgaggtgaaatcacgttcatgcccatccgctgctttgcctcatcagacgccatgcatctttccagccagtcaagcctgtgtgcgctgcttcctgtctgaggcgagatacagcgggatcgccgacagctgcgcgatcactgacacagcgaccatcgcaggaatgctcagatcataaagcatgcccatgatccagcttccgaggaaccagaacacaccgaaagcacattcaaagatcccatatccggtagcgcggcagtgtttaggcaccattggcgtgaccacggctttcaggatggattcctgcgcgcccattccgatcccccaaagcgcgatgccgatcagcagcatcggaatggaatgaacggaaaagacaaagacggcgaatgcgctggaaagcaaagtggagatcatcaaggccttcatgccgatcttatcataaagatggccgaacaccagagcagcgatcgcatccactaacatcgcgccggcatacagcagaggaagcgtgccttccgtgaccagcgcggaggtctgtgccagatcggcagccaggccggcgtaagtgttggagacgtgcatgatgatcagagagtaatcgataaatccaaaggcaaagcagctgattcctgcaatataaagcacaaagctctttttcatgcgaaacggaacatattccttcggctcaggctcgaatcgctcaggatccggaaacttccgccaggtaagcagaagcaataccagcgtgatcaaaccgggaatggccagcaccgcaaaacagaacgcatagttctcaaagacatcgccgtccgtgcgaaagagcatcaccagatataacagcaccggacccagaaacgcgccgatctgatccagcatctcctgcaagccaaagctctttcctaccccttcctgagaggccgtaaaggacatgatcgtatctttggccggtttcttgatggccttgcccatccgctgaacgagcaacagaaagcaggcccagatccagccatgctctcccaccagcgccaatgccgggaccgccatcatatccagcacatagccgatgaccgtgatcggccaatactgtctcgtcttgtctgtgatctttccaaacagataacgcatggagtaaccgatcaattcccccagtccggagaagaatccgatcgcaccggcggaagcgcccatgatcgacagataagcgccccggatgctggaagcaccttcatgggtcatatctgaaaacaagctgacaattccaaacaacaacagaaagaccatcgcctgtgacagatgctttctctactttccgctcttcatctcgattgctccttcacgcgcgccgtcatttcaggaaaatcggccttgctctctgctttgcagcgtgtataaagaatatccagcaaacaagcgaattcctctcgttcttcatgaaaaagaggctcgacgagccattcataaaacaaagtctcgatatgcgccttggaatttttcaggcgctgcgcctgctcagtaggatagatcagctgactgcggccatccgatggattgctctgccgttgaagatagccctttgcctccaaattggcagtctgcttggccacagcgcctttatccgctcctaagatcctgcatatttctgattgggtgatgcccggtcttttccgcacgacatgaatgaggtcgaactctgcagtgccgaccccttcttcctttatcgtccgagaaataaattttcccgcttccctggcgatttttgtgatctgacgctgtgtgatatccatatcgatttctcctttatatagatgtaccatcaactaattggatgatggtacatctatttttgcctgtcaactgcgccaaacagatcctccgctgtttctccatcaaaaaaagaccagaatcctctcttgagcaattccggtcagtttgcttacggccagaccttttccgcgatcttcttcaccaatgccagtttggcccactgttcctcttctgtcagcttattgccgatctcacaagaggcaaatccgcattgcgggctcagatacaaccggtcgatatccacgatctgcgctgcctcatggatccgttcgatgatcgtctgttcatcctccagcttcggtgatttgctcgtgatgagcccgagcaccactttcttatcggcgggaatatagcgaagcggctgaaaatcgccagagcgttcgtcatcaaactctaaatagaacgcatccacctgctcattcgcaaataagatcggagcgatcggggcatatccgccgctgcttgcccaggtggaatgatagttcccccggcagacatgcgtcgcgatgctcatatccgctggcctgccttccagcgccagcgtgttcacgcgcagataccgctgtgcctcttcttccagcgaatcgccgcgctgtgtccggaaattgcgatatccttcatcgcagagcatgccccaggtacagtcatccagctgcaggttgcggcaccccgtcgcatacaacgcgcggatgaccgtacgatacgcagcggcaatatcctgaatcagctgttcatcatccggatagatcttcttcgtcttctctccattatcctcgcggtaaagctcggccaacagctgtgccggcgcaggaatggtctgcttggcaacgatcccttcttcctcaaactgcttcacaaaacggaaatgctccacaaacggatgatcctcgccgctgatcttgccgatcacctcgatggatcccggcgtagtttcttccccatggaaaaaatatccatgatccagttcgatcttttggatgccctgaaagccccacatgaagtccagatgccagtaactgcggcggaactcgccatccgtgatcaccagacagcctgcctgcttctgtttctcgatcagcgcggcgatctcctcatcttcgatctgtttcagctgttctgcgctgatcgatcctgcttcatatctgatccttgcgtccttcaatctcaccgggcgcagaaagctgcccacatgatcatgacggaacggtatatgcaatgtgctcatttgaatgcctcccttgtgatggattccattatagtgataccggcatgattcgtaaaatatagaaaaaagacagtttgccatagatgaaatctatgacaccctgtccttcgcaaaccgcttcagcgcttcgatatacgaggtcgcaaattttcccggcgccaccttatcattggtgatccatccgatctccatggcatcctccacatccaacgctaccgaaacgatatcttttccattcagctgctcattgatgacgccgctgcagatcgtatagccatttaatccgatgagcaagttgaacaaagtagccctgtcgctgaccatgatatccttacggctctctctggtgctcaggatctcctcggaaaagtagaaagaattatgctcgccctgctcataggaaaggcgcggataatcctccagatcctccagcgtcacgacctgcttttgggccagcgggctgaaccggctgacaaacacatgcggtctggcagtgaacagcggatgaaagctgatcccattttcccgcatcgtcctgcgcaggatcgtctcattgaacgaattcagatacaatacgccgacctcgcttcgcagcctggccacatcttcgatgatctcatgggtcttcgtctcacggatgcgaaaatcatactcttctccgccatgttttttcaacagctcgacgaatgcttctaccgcaaacgaataatgctgtgtggagacacagaactgatggcggacaggggcagtgccgaaataacgctcttcgatcaatgccgtctgctcgatcacctgtctggcgtacccgagaaattcctctccttccctggtgacgatcacgcctttattggtccggctgaagatcgtgatgcccagttcctgttccagctctttgatcgacgccgtcaggctgggctgggtcaaaaacagccgcttcgccgcctcgctgatcgtggaacaggacgcgatggtcacggcatacttcagctgcaataatgtcatacacatctccctctctgcatgcaaccagtatgacacaggatgccgattctgtcagccctgaatacagaccaaggtgatcatgccacatctgcccttcgtttgactggccaacgctttgcatccatgcttcctcttgctataatatggtcagctcatgatcggcatcaacaaaggagggaggatcatgtttgattttttcggtacatttttagacggcccgctggcgggaagcacatttggcggcgtcatcaacgatggatccggcggtgacagcgtcggaccgtttctggcgctgggcggcatggcctttgtcttggccatcgtcctctctatcatcatcgccccctttgtcgcatggccgtcgctgattgccagcgatctgaatgaaggaagaggcatctggggagccatcatcctgatcgccattcagttcatctttatcatcctgcggatccgaagcaacgtcagacactggaagcgcagcttcctcagcgatcttctgctgaatatgctgtttctgttcctgctgttcttcctctctgtcgtgatcctgtttgtcccgctgatcactctcctcggcggcagcgagatgggcgcctatgcggcagcgcattacggagaattcctagggacagtgttctccaatctgttttccaacttattcggcatcgtcttcttcatctgggcgttgtccatgatccctgcggcactgaccacgggatgctcgacactgttcatcaggaaagcggcccgtgcggccggcataaaggcatgatcgaacagatcgatccagacagcggaccgcgcatcatctatcgcgtaaaaagggcgatcctggtttttccagaaatcagcccttttttgatgtgtccatatccaatgcatcatgcgttttggatcatgatgacctattcctgattaagacagtctccattgcttcggacgacatctcgataccagtaaaacgatcgtttgcgataacgatccaatgtgccgctgccatcatcctcatcactcttcttttgcagtgaatgtcgatgcttgtctcccggcatcttccgcatatcgaagactgaggcgcagcggccggtcgatccagcttctcctcagcgcggaaagacagcggaaacgagcggcgctttcgatcagcgagatccatgtatctgtcccattgacgatccatgcttctttgcaccgcggcggaatgatggtcaatggccacatatgctttctgatgatctcgatctctttttcgctcagatggaagtcacgctgggcgttttccatggcaaagcgaggatgcctgaacccatgccacttatgccacccctctttctcatgccagtcatacaaataataatcatgcagcagcgcaccgcggatcagtgcgcgttcatcatacttcagccgcagcctgcaggccagcatgcagctgtaaaacgccaccaatacggcatggtcatatgtcgatacatctccgtgctgaacatatttcttcatcttcatcagccgttcatcacccaaatataaagacagcttttctgcgctttgttcctgcagccttctgttcatctcatcaccttcaccagttatgataacattttttttgagaataatttctataaattttaagcattgttgttcacatctcgttcatttttttatatgcgcttttccatgttttcaaataagataaaataaattgataaccgcatgctaatgctaaatacttcatgtaatatattaattttattgatgaacgatctgctaaatttatataaatatatgtgctttttttctcttcttcagtcagttacattctcccagatcctgtcgatttccagttattgacaaaggtatctgttattttatataatgactgtaagggctatctttcttttcgagatagcaggaaaggagacaaaatggaaaagttggaaaagaaactgctgaagatttccatggctgcttcctgcacgctttccttgctgatgccaaatgtggcaatggcacaggaaaacgatcaggcaacagagtctgtgcaggctgagatttatccgaagccgcagaaaatggaatatctctccactgaaggaatgaagctggagggcacggtcaacctcgtcgttcatggtgaacaaaacgaagcgaccgtgaccaaggtcaaggagcttctgacagcagaaaacatttcattcgtagaggctgatgaagtggacgacagtcaggcgaccatcctgatcacgacagatgcatcacattgtgacgattgcgctgcgccggcagacgcagatgccgccgtgctggaggaagaacagggatacatcctgagcgccagcaacgatgagaacgccaaaggtgagatcaacatcgtcggtgcagacgaagacggcgcttactacggcgtcatgacgctgacccagatgatggaacagggaaaagaagacggcacatttgctgaaaccgtgatctctgattatccggatgtcaagctgcgtggatttgtcgaaggattctacggttatccatgggactttgaggaccgcctctctctgatgagcgaatccagcaaattcaagatgaacacatatatctatgcgccgaaagatgacccatatcacaaggatcagtggcgtgagctgtatccggatgataaagctgaagagctgcgtcagctggccgaggaaggcaagaaagacaacatgagcttctgctggagcgtgcatccgggatatggattcaattacaacacagatgatgattataatgccctgatcagaaagttcgagcagctgtatgatcttggtgtccgtcagttcggtatctcttatgatgacctgagcggttcttacagcggtcaggatcacgctgacctgatcaaccgcgtcaaccgtgaattcgtgcagaagaaaggcgatgtcaaaccgctgatcgttgtcggtacacgttactgcaacggctggggtccagatatgcagacttacttcaagccgttcttcagctctctggatgatgatatcgtcgttatgtggacaggcgccaatacgatgtctgctatcacgaaggaagcttatgagtggccgaagacacagaccggcgtagataaagatctcgccgcatggtggaactatccggtcaatgactattgcgacggcaacctgatgatgtccccgttagaaaacctggacaatgatgtcgataacctgagcggtttcttcctgaatccgatgtctcaggcagaggcaagcaaggtcgcgatcttcagcggtgcggactattcctggaacatcggggatttcgaacgtacttccagctggaagcgcgccatcgctgaacttgttccggaggccaacgaagcatttgaacgctttgcggacaacatctcttatatcaaagatggatttgaattcgacgaatcccgttacttagttgaagatatcaccaacttccagacagccctgaagaacaacatgggcatcaaagaagcagctgaagtgctcaaagctgatttcacccagatgaaagaagatgtcgctttgctgcgcaacatcaacaacgcaaacttgctggaagagatcacgatgcacctgaatgcgtatgaggctgtcgcagaagccggaatcgcaagcatgaatgcattcatcgccgcacaagacggcatcatcgatgactgcctgaccaacatcacgcagacagagatcaagctgaatgaatctgagacttatcagatcgaaagcctggaaaccaatggaacaaagatgaatgtcgttaaagttggtgaaaaacgtatcaagccgctcctgcgtgactctatctcccagatcaaagacctgctcatggatacggtattcccgcaggcaaatcctgctgtgatcggtacgatggaaggcatcgatgaagttaaagtgattgctgcgcagggcaactacaccatcaacgatgttgctggcacactgaatgccggagaatccatcggtatccgtctgccgaaggccatgaaggtcggcagcatcgcaacagagatcggcacagcagaaggactgaagctgcagtattcggtcaatggtcatgagtggacagatgcagattcactgaacgcggacatcaacacgactgctacttatgtacgcatcctgaatgacacagatgccgcaatcgaactgaacctgacttctctgacagtcaaaccgatctacaatgtcggcgtcatgaaggcagaaactgacctgggtacttatgaaggtacgatggccaataccattgacggcaatatccatacgaaattctattccagcgccggcgcaacggtaggcagttatgcccgcgtcgatctgggcaaagagatcccgctgtatgatgtctccatcaactatgccggaaacccaaagggacctggacatggcatcgacggattcgcagccacaaagctggagatctccactgacggagtaagctggacacagatcggcgatatcatcaacgatgagaactatgttgagaagacgatcgacggacagctggtcaattccgcagattacaacgcagaaggccagatggcacgttacatccgcttcactgctacagaggcaagcgaaaactgggtacagatcttcgagatcatgttcaatgagagcgaaggcgcgcttggtgacgatacgatcgatatcgcttcttccacatttgaagacggcacgctgtataacctgtatgaccgcgatctgacgactgcattcgcaccgactgctgtcaaagacggcgatacgctgaacttcgacatgacgacgatcaccgatgtcggcaacctgatgatcatgcaggacgcagaggccatcagcaacgccgttgtcagcgtgaagggcgtagacggcacatggaaagaagtcggtacgctgaataaagaactgacgacgctggccatcaatgacacgatcactgaagtccagctgacattcaacagcgcaaatccggcgccggtcatctacgagatcatcgcacaggaacagagcgaagatccgggagatcaggaaactgcaagcgaagcagccatcgccgcactgcagaacatggtcgacaaggccattgctctgggctctgatgatgcagcattgactgaagccatcgccaacgcacaggccgtgctcgccaaggaagcaccgaccgtgacagaagtcgttaccgcactgctcaacctaagcgaagcgatgcaggatctggatcaggaagcatctgaggatgccctgagagcagatatccaggcaacgatcgacttcatcaatgagaacatcctgaacaacgtagaaggcatccgcccggctaaggtacaggcgctgaaagacgcagtccaggccgcacagacactggtcaataacccgggtgcaaccgtagatgagctgaaggcagcgaacaaggcgatgaccaaagcagcacaggagctgtgggagatcgtctccaaggcagagctgaacgcattgatcgaagccgcaaatggttacctcgatggtgactacacgacagaaagccttgacgcactgcaggcagcgatcgaatccgcacagaccgtagcgatcaatgacaatgcgacaacggcagaagtcacagaagccatcacgaacctgagcgatgcgatcgccaacctggagaccattacgttagatacgagcgcgctcgagcatgagatcgagctcgtcaccgagatgatcgccaacatcggcaactatgtgccgagcagcgtagaaggactgcaggagaagctggatgcagcgaagacggccctgaacaacgcgacgacacaggcagagatcgatgaagcgaccaagacgctgcgtgaagcacgcttgaatgcgagaacaaaagcggacaccagcgcattggaagagctgatcgcatatgtgaacagccttgacctgagcgcatacacgacggaaagcgcacaggctgtcatccaggaggccgcacgtgcagagatcatgaccaatgat

SEQ ID NO: 3503 - DNA, 3274 bp, Unknown
  16S sequences of unknown bacteria
cgctgcggctgacccgatccagccgatagcataccagcatatccacccgcccggcctgcaccgcctccatcagcgcggcaaactgcggacggtgcagcgtagcgccggaaaagccttcatcctcatagacctctatctctgcctgtggccaatgatgctcgatatactgtctgcacagcgccgcctggttttcgatggaatcccccgtttcactctttaccgattttcggctgtaaattgcagcacgcatggcatcgcctccctcggtctagcgtatgcatcctgtgcagccgataacgcatacactgcgtaaaaaggaggaaccgccatgcctcggcccgatgtttatcccgtttccatccacctgacccctgcacaagcccagcgcacagcgcaaaagcttttacaggcccttcaggccgcgcagcaaaccgcgcaaaaaaagcagcgccctccggcgccgccctctgccaagccataaagcttattttggttttcttataccaaacacgctgccgttgtagcggtatagcacggcgatgcaaaatgccacgccaccgatcatgaggacaagccccaccacatagccgatgtccgctccgcacagcaagttcacatacggcatggccgtgcagccggcgccgacggccataagcccctgccccatgcggcgggcaaatgccggcagcttttccggcattacgttttgggtatggtaccagtgcaaaagccctacctcgccttgccagcccgttcgataggccatatacatgaccaacagccctatggccgtttctatgacgatctctcccagcatgctatacccccgtcttcgtttgcgcgccttgcctgggatgtcttcttaaatttccgtattttttcagccggtacagatagtaagccaagaccagggcaaatacgccgttcatcacgatcatcagcagcaaatagccccaggccgcgcctacaaggccggccgtccgtaccgcaaagggcatcagcaccagcgataggagaaatacgctgccatagcccaccagtaccatatactgccggcgcatgatggtgatgcaataataaaacaccccatacagcgccgaaaccccgccggcagccagcagcaccatcaagacgccccggtatccttcaagctctacgccgtaaaaccaggacaacaccgggatgccaaatagataaccgcccgtcatgcataccaacgtaatgagcaggatatacacgatctgttttcccatcgtcagcaaaaacttttttacctggccctggccaaactgcgtcgccagcacggatagctgcggctttaggataaagcccccaaacagattgatgacaaaggccggcataaacagaatgttgaaatacgtttgaatctcggaagccagatatgcatcgatggcatacttggcggaattgttgatatagcccgataaaaaagacccaataaacaacggcaggcaggccagcagaagccggcgcaaatggccgaaccggaattgaactgtaaaggattcaaacgcgcctaccacagcagaatcatataccaggaacacaatccaatgggccagcaccaagcaacaggccgacactataaggtttttgctaacatacagcgctataataaagctgctggtagaaacaaggtatttgataaatacgcccttggccgatagatcataccgtcccttttgctggtacaggccctcgaagacatcggaaaaggcctctccgcctctgtataggcagaaaatcaaggtaagggccgccttttccagcgtaaaccggctaaagagcacccaagccatccctgccagcatcatcaggcctacggtgatgatacgcgaagcaaaataatccttaaatgcatacatatgctgtatatccgaagcttgaaacgtacgcatacagtaccagcccagcgtcaaaagctgctgagataccgcaaagcaaatggagtagacgccaccctctgccgcgcccaatatttgcgtaacggcccacagcataatcacactgctgcccgcatacatcagcccggaggtcaccgtccacagataggtcttatgccccaagtttttcccgttgcccaaaatcaaggaacgcagcttttctttcaatccttttctccctacatgccacctgctcgtttgtcgcttaaaaattaccgtgtttcgtctccgaaatccaataccttggccccgtggttgtaccgctgttcttctggcggcatttccatataatccccatacatacgggtcaacatttcatggttgcaggccattgcctttaccgtcatcccttcaaacttcagctcttgtagcggaaatatctcgtcttttttgacaatgctgatttccggctctacatcgcacagcgatgcgacaaggctcgtttggttgtgatagcgcaaagacgtctccctgtattttcggttgatataatccaccgaaacaaaggccttgagcaggtaatgcaccacaaagcatcctgccgacatgatcttgcccatcacccctttgaacggcaccgtgggattggggatgatgcgcaggatatacatacgagtatataaattgatgtcccgaagctgctttttacgcagttttgggtcctccggcacgttgtcatacggaaaaatatcgatccgtattccaaaagtggtaggatacttggaatgctcgtcggtaatatgctttgtgcctaccttgcacattctcatggtgtatcccaggcaatccttattgatctctgcattcatcaattcatatttgccttctatctccccaggggccacctgtaaaaacttttcataatcatcccgcagcattcccacgtccatatcatcgtcccacgggataaagccctgatggcgcaccgcgccgatggccgtgccgccgttgacaaaatacggcagatcatgcttttcacagatctcgataaacgctgcaagcacttccatctcggtttttttcaatcgttccagttcttctggtttataggcgtactgcactacccttccccctcttccaacttaaatccacgcatcggttatctttcatcgccgaagtccagttcgtatggcggatggttatggcgcttgtcctccggcggcagctgcatatagtcaccatatcgtttggctaaatagctctcaacgccgcctggaaagcgcatcatcagcccgttaaacgacattttttttgttggcaagagctgctctttttcaatgatgctggtaaagggcgtaggatcaaagaac

SEQ ID NO: 3504 - DNA, 3623 bp, Unknown
  16S sequences of unknown bacteria
gccgctgagctgcggctttgattaggatttggctaaaactgctgcaaaactatggagctggcgaaccctaaatcggggctcgccaatctgcttgagcaggctctcgagctcgctgtggttcaaggacttgatgtcgacgggattcggcatggtttggttctccccaatgtggacgattacatggctgtaagataacatcaacatactggctagaactatctcaagcatgtgttttacgttcgttttattgcacaaatgatagaaaatccgagaggttgttgatgatgatcgcgacaaagccgtgcgttcccgagcagaccagggtgaccctcctgaagggagggaagagcggcgagcgtgagatatcgctggcatcgggggctgcctgtgcagaggcgctgagaggcgaaggttttcccgttgtcgaaatagacacggcagactccgacatgctgcagcagatcctcgattccaagcccgatgtggtgtttttggcgctgcacggtaaagacggcgaggacggctgcatgcagggctttctcgagctgatggaagtgccctacacgggacccggcgtcttggcgagtgcgcttgccatggacaaggtcaaggcgaaggtcatgtaccgtgcggcgggtcttcccactgcacaatcgctcacgctgttggctggtgaggactacaaccctgaggcgattattgagactgtcggcgagaagtgcgtcgtcaaaccagcgcgcgaggggtccgcgcttggcgtgcatatcgtcgagggtgcagcggagcttggggcagcgattgccgaggcgttccagcatgatacggaggtcctcgtcgagagctttgtcgccggaacggagattaccgtggcggtgctgggcaacgatcaccccgaagtgcttcccatcatagagatcgttccgcaggaatcgagcgagttctacgacttcgaggccaaatacgcgtcgggcggtgcaacgcatatctgccctgcacgtctcgacgatgagacgacggagctctgcaagcagtacgcgctgcgcgcccatgatgccttggggtgcaggtgcgtgtcgcgtaccgatatgatcatcaatgggcagggcaagccctggctgttggagaccaacacaatccccggcatgacggcgacgtcgctgcttcccgacgctgcatccaaggtgggtctcgagtttgggccgctgtgccgcaaaatcgtcgagctcgctcttgaaaacgctcgctagactctgcctgcaacatagttttggcaccagaggatgcgctctttcgggagcgcatctactcttttggtggacaatcggcgtgaacgtgccttttgtctgagccatatagaaaaatcccccgtccttttgcgagttgtttcttgtttgcatcgatgcgtatgagtacgctggaacagctttaccttttgtttgattcgagagaagaggaaaggagatacccgatgtctgaactagtcgagatccgctggcacgcacgcgccggacaaggcgcggtaacggcggcaaagctcgtggcagagacggcgctttcgcagggccgttacatgcaggcgatgccagagtacggacccgagaggacgggtgctcccctcaaggcgtacacccgcgtatgcgatacgcccattgaggtgcacaacaacattaccaaccctcagatcgtggtagttctcgacgagacgcttctcgatctcgagaacgtcaccgaggggatggcacaggacggcacagtcatcctcaacacgcgtatgacgccggcggaagcccgcgagaagctgggagtctccgataaggtcaccgtcgcgacggtcgatgcatccggcatcgcgatggcaaccatccaccgcaacatccccaatactcctatcgttgcggcattgtccaaggtcactggtgtaataccgtacaacgaatttgttcagcatctgaagaccacctttggcaagaagttcagccagcagattatcgatgcgaacctcgaatctgtgaaacgcgcctacgaggaggtgcagcagtaatgagcgagaagtggaataccgataacttcaccgagtggaaggcagaggatttcccgattggcgccgtgtgcgtggacggcggcaattccgtcgagtacatcaccggcggctggcgtgccgagcgtcccgtctggacgcagaaaaactgcaagaactgcatgctgtgctgggttgtgtgccccgactcctccatcctcactgccgatggcaagatgaccggcattgactacgatcactgcaagggctgcggcgtctgcgtgaaggaatgcaagttcggcgccctcgagctcgtcctcgaggccgatgccaaggaggcggaatagacgatggcagaaagagcagaacagaaaatcgtttccgcaaccggcaatatgatggtcaccgaggcgtttcgccaggctgacccggatgtggtgtgcgcctatcccatcaccccgcagaccactatcgtcgagggatttgccaagtgcgtggcaaacggccaggtccacaccgagttcgtgacggtcgagtccgaacattcctcgatgtcggcgtgcatcggctctgcccaggcgggtgcccgtaccttcacggcaacttcgtctcagggccttgcctatatgtacgaggagctgccgattgccgccggcatgcgcctgcccatcgtcatggcaaacgccaatcgcgcgatctccgctcccatcaacatccactgcgaccactccgacgtcatgggcgcccgcgatacgggctggctactcttctttgccgaagacgcccaggaggcctatgacaacacgatgatcgcgattcgcaccgccgaggataaagacgtgcagctgcccgtcatgaccacgctcgacggcttcatcaccacgcatgccatggagcgtgccgagctcatgaacgacgaggcggccaaggagttcttgggcgagcgcacgccgttgttcccgctgctcgacaccgagaaccccatcgccgcgggcatgttcgccgaccaggacagctacttcgagctgcacaaggcgttgcgcgatgccgtgacggcctccaagcccgtcatcaagcgcattggcgatgagtgggcagagctctccggccgcccgttcgacttcgtcgacgcgtggggttgcgacgatgcggactacatcatcgtcgtgctcggctctgcagccggcaacgcgcgccatcaggcacgcctactgcgcgagaagggcgtcaaggcgggcgttgcgcgtatccgcgtcttccgcccgttcccgtatgaggagctcgttgcggcgttgcacggtgcgaaggccgttgccgttctcgaccgttccgagaacttcggcggcgagtacggtcctgtcggtctcgaggtcgcgaccgcgctctacaacgccaaggagaacatcccgctcaagaactacatgttcggcctgggcggccacgatgtcacgctcgagcagatggagcaggtctacgaggacctggaaaagctcgcggcaggcactatcgacggttccatcgaataccttggaaacagataaggaggggaggaaacgatggcaaatctcaaagaactctccgctcttcccgagcgtctcgccggcgg

SEQ ID NO: 3505 - DNA, 16442 bp, Unknown
  16S sequences of unknown bacteria
gggtcgaagaggcggagcgctgttgtcgttgggatggcggagacttcggagtatggcgacgggctgaaagaggtttcggacgtggttgaccggcggttttcgctgaatgacgagatgcttggggtctgtgagtttctttgcgacaggacgttttgtactatgggagaggctgtgcaggcggtgttgcccggaggggcgacgggggcgctttatcacgcgaagagggatccggttgtgcggctttacagacttcatgacccgtccgctccggtgtcgcggcttggcgaggcggctagaaaggcgctttcgctgctttccgagggcggcgagatggatgaggatgagctcagggagaagaccggggtgagtccggcgacgctgaggtcgctggcatccaaaggcgtgctttcttcgcggcagaaagaggtgttccgcaatccttacgccgggcgcgggaggatcaccgacgacggtgagctgagcgacgagcagaggggcgcctctgacagattatccggactcgcggcagaggggaagccctgtgccgctctgcttttcggcgttaccgggagcgggaagacgagggtcatgaagtcggtgatcgacagtgtgctcgcgcgcgggaggacggctattctgcttgtgccggagatatccctgaccggtcagacggtcgatcttttctgcgggtatttcggcgagagggtggcggtcatccattcgtcgctttccgagggggagcggcttgacgcgtggaagcggatacgggcgcgtgaggtcgatgttgtcatcgggacgaggtcggctgtgttcgcgccgcttgagaatctcgggatcatagtcatagacgaggagcaggagcatacctataagtcggacatgaacccgaagtaccacgcgagggatatcgcgcggtaccgggcggctaagaataacgcgatgatgctgcttgcttcggcgacgccgtcgtttgagtcgtattaccgcgctgagagcggggtttacgagcttgtgaagctgaatgagcggtacggagaggcggtattgccggatgtgattgtcgccgacctcaaggaggacacggcgaagggcgtcatcactccgctcggcggggtgctccgcggggagcttgagaagaacctgaaaaacggcgagcagtcgatacttttcgtgtcaaggcgcggatataataatttcatgagctgtcttaagtgcggggaggtcatcacctgcccgaactgctcggtttcgctgacttatcaccgggacggggaccatgacacgctcaaatgtcattactgcggctatacgcgcgacgtgccggataagtgcccgaatcccgcctgcgggtcggagcatctcgggcggcgcgggttcggaacgcagctggtcgcgggcgagcttgccgatctttacccggaggcgcggatactgcggctcgacgcggactcgaccggggggaagttctcacatgaggcgatactctcgaggttcagaaatcatgaggcggatattcttatcggcacgcagatggtcacgaaggggcacaatttcccggacgtgacgctcgtcggcgtcataagcgcggacgcggcgctgtatctcgacgatttcagagcgacagagcggacgttctctctcctgacgcaggtgataggtcgtgccgggcggtcggttaagaagggaagagcggtgctccagacctacacgccggacaacgagacgataaggctcgccgccgcgcaggactacgaggggttttatcacagcgcgataaagctgcggcgtcagctggtttttccaccgttctgtgatttcatccttatcgggattcagggggcggaggagccggaggtgctctctctttcgctgaaggtggacgcgagactgagggagcttgtcgaaaaggagtattccgacctgccgctctatatcttcggaccgttcgaggcgccggtttataaggtgaataatatctacagaatgcgcgtgatacttaagtgtcaggcgacaaagcgtatgcgtgagcttgtttcgaggctccttctcgagttctcgaagagcaaaaaagcgatggtgacggcggacgtcaacccgagcaacttatgaaaggaaaggacgaaaatcaatggcaaaactcaatatagtcaaggaaggcgacccgatcctccgcaagacgagccggaagattgagacgatagacgacaggataaagacgctcgccgcggatatgctcgagacgatgcacgacgcgaacggagtgggactcgccgctgtacaggtcgggaaactcagacgcctcgtgatagtcgaggtcgaggagggcagaccgttcatcctcataaaccccgaaatcgtggcgaaagagggcagacagaccgaggcggagggctgcctctcaatccccggcaagtggggaatcaccgaccgcccgatgaaggtcacggtcagggcgaccgggcttgacgggaagaacttctcggtgatgggaagcggacttctcgcccgcgctctctgccacgagatagaccatctcgacggaaagctgttcaccgacaacgtgatacggatgctcgacccggacgagatcgagaactgaacctgacccgcgaaaggacttattcagatgaaaacgaagatactgttcatgggaacgccggatttcgcgaggagttcgctctcggcgctcgtcgacgccggatatgacgtcatcggcgtcctgacgcagccggacaagccgcgcggcagaaaacagataccgacgccctccccggtcaaggaatacgcgacagagaagaatatcccggtctatcagccgaagacgctcaggggagacgatttcgcggagctgcttgacagcctttcgccggatctcatcgttgtcgcggcttacgggaagatacttccggagaacgtgataaattacccgcggctcggctgcataaacgtccacggctcgctcctgccggagtaccgcggagcggcgccgattcagcgcgctgtcatggacgggaagaaagtgaccggcgtcacgatcatgcacatggatatcgggctcgacaccggggacatgatctcgaaggtcgaggtgccgatatatccggacgacgacttcgaaaagctgcacgacaggatggcggacgccggggcgaagctgctcgtcgacactatcccgtcgatcgaggacggcaccgcgaagagagaaaagcaggacgacctcaagtcgacctacgccgcgaagataacaaacgccgactgcgcgctcgatttcgacgccgacgcggacgccgtgtatgatcgtatccgtgctctgtccccgttcccgctggctttctgcgaccataacggaaagatgctgaagctcgtcggcgcgagaatcggcgacaccgaaaaggagcataagaatcccggcgaggtgctgaagctcgacgcgaaggcgaacttcatcgaggtcgcctgccgcacgggttccgtgtgcctgacccgcgttctgccggagggaaagggacggatgaacgcctccgacctcatcaacggcagaaagatagctcagggagacagactgaaaaagtatataatcgactgattgcaggaggtataaatccatgtatttttacggaatagacgcgacatatatcttcctcgtcctgcccgccgtgattttcgcgctgtgggcgcagttcaatgttaaatcaaccttctcgaaatattcgaagatcgcgagccgctccggcatgaccggcttcgacagcgcgagacggatactcgacgcgaacggccttcgcgacgtgcggatagctcatgtcgcgggggatctcacagatcactataatccgaccgacaatacgatatatctgtcggactcggtctatgcctcgaattccgccgcggcgataggcgtcgccgcgcatgaggcgggtcacgcggtacagcacgcgaccggttatacgccgataaagatacgttccgcgataatcccggtcacaaatatcggctcgaatctcgcgatgccgctgattattctcggcattattctgtccttcccgacgctcgcttatatcggcgtcgcggctttcgggctgtcgacgttatttcagcttgtgacgctcccggttgagttcgacgcttcggggcgcgctcttaaggctctcgaaggttcgcttgacggcgacgatctcgcgagcgcgagaaaggtgctccgcgcggcggctctcacgtatgtggcggcgctcgccgtgtcgcttgtaaacctgctcagacttctcataatcgttgccggaaacgacagacgcagacgcagatgataacaaaggatagaaaatgactgaaactccgaaaaagcacagaaacagcgataacaaacgtcaatacgacaaaaagagaacaaactttgtaaaacctggaaccgatcatcgctcccccgacagaaagccgaagaaaccggcggtctccgcccggcgcgccgcctacgactcgctcatccgatgcggaagggacgggaagtactcgaacatcgagatcgactcggttctgaaaaagacagggctcgagggcgcggagcgcggattcttcacgacgcttgtctacggcgtcatcgagagggcaataacgcttgactatgcgctctcgctcgtgtcagacaaagcgccggaaaagctcgacccggaggtgcggactgttcttcgcctcgcgctctatcagataatattcctcgaccgcgtgccggagagcgcggcggtcaatgaggcggttgtgctcgcgaaggacgttatgttctcgtcggcgacatttgtcaacgctgttctgcgcgggtatctgcgtcgtttcggtaaggggacggcggggctgttttcggagatttcgcggatagaggacgcggacgagcggctttcggtcaggtattccatgagtgtggatgtcatatcactgctcggtgaatacgcgggcgatacgcttgtctctctgctcgattcgcttgaaaaacagcctttcccggcgctgagggtgaacacgcttaagatatcccgggacgaaatgctcgggcgcctgaatttcggcggcgaccacgcgcggatatccgcggtttccccgttcgggctgaagctgaaaaatcacaacattaccccggaaatatcggaacttatttcggacggttacgtctatatacaggatgaggcgtcgcagatcgcggtcgcctgcgcggctccggcggcgggggagactgtcctcgacgtctgcgcctgcccgggcgggaagagcttttccgccgcgattctgatggaaaaccggggacaggtgaaaagcttcgatctgcacagaaacaagctctcgctcatcgaaaaaggcgcggagaaaatggggataagcatcatctcgaccgccgaaaagaacggcgcggagttcgacccgtcgcttgaaaaaacagccgacctcgtgatagtcgacgccccgtgctcgggtctcggcgtcatcgcgaagaagccggagatacgctacaaaaggcgtgaggatatttcgagactgccggagatacagcgcgcgatactcgaaaattccgcgaggtacgtgaagcccggcggtcggctcttctactcgacatgcacgctgaatatacatgagaacgatgaaatcgcggacagcttcgcggcggagcacccggagtttgagcggatgaccttcggcgtcggggagatacagagctgtgacggaaagataacgctcagaccggacgtgaacggcacggacgggttcttcatcgccggttacaggagagtaaaataatggaaaataccgaaaaggtcgaccttctcagcatgacgccggacgaggtcgcggagttcctgtcctccctcggcgagccgaaataccgtgcgaagcagatcttcggatggatgcaccgcggagaggacttcgacgggatgacgaacatcccgaaaaagctccgcgagacgctgaaagagaaggcggtcgtgaatatcccgaccgtcgaggaaaagctcgtctcgaagatagacgggacgataaaatacctcttcggtctgtccgacgggaatgtcatcgagagcgttttcatgcgctacaagcacggaaacactatctgcatctcgagcgaggtcggatgtcctatgggctgtaagttctgcgcgtccacaatcggcgggcttgtgagaaggctcgcgccgtccgaactgctcggacaggtcatcgcggcggagaaggacaccggggagcgcatctcgaacatcgtcatgatgggcatcggcgaaccgctcgacaactacgacaacacggtgaaattcctgcgtctcgtcggcgacccggacgggctgaacatcggctcgaggcacatctcggtctcgacctgcgggcttgtcgacaagatagacgaactctcgaagctcgacctcggaataacattgtcgatctcgctccacgcggcggacgacgagacccgctcttcgatcatgccggtcaacaagcgctggggtgtgagtgagcttctcgacgcgtgccgcagatatttcgcggcgaccggacggcggatatctttcgagtacacgctgatttccggaaagaacgactctccggaggacgcgagacatttggcgtcggcgctgaagcacgggctttacaggaagtcggaatccttcccgatacacgttaatctcatcccggtgaacgaggtcgcggagaccgggttcaaacgcagcggcgcggacgccgtcaagagatttgccgacgagctcgggcggcagggcataaacgcgacggtcagacgcaggctcggatcggatatcaatgcctcctgcggacagctgagacgaaataaaatgctcgcggacggttcgctcggcgggattcaggaaacactggtctgaggctgttttcgcggaaacccggattatccggtgtactcagatgttaatttttggtgaaaaaatggtttaattattcttaagactgtgttttgttcatcacaggtacatatgtttggtgtatgatagtcttcagtagttttcaggggagagcgcggtacggatgttcaccgtgaccgctttcgggaaagacatatacatgagaagaaatcgcggaaaagatcggctgtcgccgggtggcaccggcgcggcggaaaggcttggttctatggtggaactgtatttttacggcagaagcgacaccggcagggtgagaaacgccaatcaggacagttatataataacacgtctctgtgacaacgcgacgctcgcggttgtatgcgacggcatgggcggcgccaagagcggaaacgtggcgagcgcgctgtcggctgaggtcttcgcggagagcgtgtcgagatacgccgcgccgaggatatcgaatggggttctgacccttgacagcgacgacgcctgcctgattctcgacgacgcggcgcatgacgctaacaccgccgtttataagaagtcgcagacctccccggattatcaggggatggggacgactcttgtcgccgcgctcttctgcggggacatcgtgtatgtcgtcaatgtcggcgacagcaggctttacctgataagcgacggcaccatgacccagataacccacgatcactcatatgtgcagcatctcatcgacagcggctcgctcaccgccgaggaggcgcggacgcatcctttccgcaaccgcatcactcgcgcggtcggcatatgggagaagcttgaggcggacatttattcggtggatctccagagcctcgatatatgctatctgcttctctgctcggacggactttcgggtcagctgacgtctgatgagattctctcgatagtttcgtcggacgcggatatagacgtcgtgaccgacaccgccggggagctggcggataagaccgagcgtcttgtggacgccgcgaacgacgccgggggacccgacaacataaccgcggtcctcgtgaagtacacgagagcggaggacagaccggacacgtccgagatgttctcagacaagaacacgtccgagatcgacaccgccgagaccggcgagatgacaataacggcgcagaataacagaagccgcggcggcaggaaaaacaacgcgaaatcatccggaaagaccggacgcgccgcgaaggacgacaaaaacacgggagcggaggacgactgatggatcagtttgagagatacgtcgggcaggtcttcgacaaacgctacagaatacagaaggtaatcggcatcggcggcatggcggtcgtcttcgaggcgaacgatatgctcatgcgtcggaacgtcgccgtcaagatgctgaaggacgagataaacaacgacaaccagtcggtcaagcgcttcatcaacgagagcaaggcggtcgcgatgctctctcacccgaatatcgtcaatatttacgacgtgtcggtgaaggacgaccggaaatatatcgtgatggagctggtcgacgggatcacgctcaagaattatatactgaagaagggcgttctcagcttccatgaggtgataaacatcaccgagcagatactgatggcgctcgagcacgcgcactccaagggcatcgttcaccgcgacataaagccgcagaatataatgatgctgaaaaacggcgtcattaaggtcgctgacttcggaatcgcgaagctccctaacgcggagaccgtgacaatgaccgacaaggcgatcggaactgtgttctacatcagtcctgaacaggcgagcgggaagactatcgaccgcaggagcgacatctattctctcggtgtgacaatgtacgagatggcaaccggaaagctgccgttcgtcgcggacagcccggtgacagtcgctataatgcaggtcaagaactcgccgaagccgccgcgggagcttaacccgtcgataccggtcgggcttgagcaggtgatcctcggcgcgatggagaagaacccggacgaccgattccagagcgcggcgcagatgctccgccatgtggctcagctgaaagcgaacccgcacgcggttttccgtatgcagcggcatgacgctcccgcgggaaacgcggttcagtccggcggacagctgcctccgaacgtgaagaagctgacgacgccgccgaagacgagccgctcgatgttcccggttatcgccggggtcgcgacggcgttcctgattgtctgctgcatcagcgcggttgttgtgctgacaaggcttatggaggtcacggcgaccgacaactcgaagacgataaaggtgccggagctgcgcaacaccatctacagcgacggactcaaggagcagcttgaggggcttggatacgagcttgaaattgagtatgagtactcgaacgacggcacctacgaccggaacatgataattgagcaggatcctcttcccggcgaaatacgcaagataatcccggacaagcagacctgtctgctgaagctcaccgtatgctggggcgcggagacggtcgagatgccggatctcgcctacaaggactcgcgcgaggcgaagattgagctcagagacaaatacggtcttgtcgccgatatcgtcaccgaaccgcacgattatgtcagcgagggctgcgtcatccgcaccgatcccgaggcggggacagagctgaagaacggcgaccacgtcaccctctatgtctcgagtggacaggacataaaatatgtcgatatgccggaattccgcggctgtgacgagagcacgataatgaagaagctcgcgtcggctgagctgaagctcggcaaggtcacctacgagaactcggacaaggtcgcgaagggtctctgcatagaccagagccgcgcggtcggggcgaagactccggtcggcacgacggtcgatttcgtgatgagccttggtccggtcgaggagacaacagccgaaacgacagccgggacggcaagcggggacggacagtaatggaactttttccggaaggaatcatagtcaaggggctaggcgggagctatcaggtgaagctgaaacactccgacgcggacactctccgcgagaacggcgtcgagcctgacgagggcgacactatatattgccgggcgaagggcgctttcaggcatgagaagctgaccctgctcgtcggggacagagtgaccctgcgcgtcgacacagaaaccgcgattgccggcgcgcatgaggcagagaagaacaaaaagcacaccgacgaggcgagggccggcgtcatgataagcgacatcgcggagagacgcacggagctgattcgtccgccaatgtcgaatctcgacctcatgttcatagtcgccgccgccgcgaagccggagccgtcgccggtgcttatagacaagatgacaactgtagcggacttcaaggggattgagccggtcgtcgtcgtgacgaaggctgacctttctccggagacggctgagagagtcgcgggaatctacagaaaatgcggcttcaccgtgttcgtcgagggcatcgggtatgactgccatgacatcgagaagttcatccgtgacaattcggacaggatatccgcgttcgcgggcgcgtcgggcgtcgggaaatcgacgcttatgaacagactgttcccgtcgcttggtctgacaaccggcgaggtcagccggaagaccgagagaggacggcacactacccgtcacgttgagcttttcccgctcgagagacagttcgacggcgcggagggcttcatcgcggacacgccggggttcgggatgctcgatttcgttcagttcgacttttacacgaaggacgacctgccgtttgtgttccgcgagtttgagccgtatatcgggaagtgccggtacacgaagtgctcgcacacaaaggaagagggctgcgcgatactcgacgccgtgaaaagcggggaaatcccgaaggagcggcacgacagctatctcgagttctacgagacgctgaaaaacaagaaaagctggagctgagagccgccgcgtccgtggcggcttttcggcagtaatcggaggaaaaaatgaccgcatacatcttcaccggcggaaagcttgccgtcgggagcatggacgagctcggacttcatctgtctgaagccgacctcataatcgcagctgacagcgggtacaacaacgcgtcgcggctcggcgtcagaccggggcttctgctcggcgacctcgactccatcgaccggaagaagctcgcgccggacgagcttgagcacatcgagaagataatcgtaccggcgataaaggacgacaccgacacgcagctcgcggtcgacactgcgcttgagcgcggcgcggacgagatcatcataatcggcggactcggcgggcggctcgaccacacgctctcgacggttttcttactcgaatatataaaggacaaaggcgcgcggggagtgatcaccgacggccggaatcgggttcggatcatggaatcgggcgaggagctgacgattaaacgcgggtacaagtatctttcgcttgtcgggctgaccgatacttgcgagggcgtttcgataagcggggtattttatccgcttaaagacgcggttctggagcggaaatacgccttcgcggtgagcaacgagatcacggcggacgcggcggagatttcgctttcgaagggaattttactcgttatcgagagccgggactgacaaaattcaccgtccgcgcatatttctgtagtaagccgtatttggcggaaaggaaatggtcgaatgaaaatcgttgtcatgcgctcgccgaagctcttcgcgccgcttttgcggcggatgttcagaataaagaagaagtgaatttctccggccgggttttttcgtgaacttttcgcgttatgtgttgactttttccgcagggaatggtacaatattgtaagaaaaagatgaaaaggaaaagaaaagaatggaacagctcgtaaacatcgccgctcagaccggggacaagacgatcgtcatcgtgatcgtcgccgtcgcggctgcggtactcggatttgtttttgtaaaactcaagccgaagaaataatcataaggagaatcagatatgagaaagacaggaatccagtccggtgcctacgcggccgaagaaagatatgaaaaaatgcgcgccgacggctttgaggcggtcgactatcaggaactctgcgacaccgaaaccccgcttttcacaagcggaatcgccgagttcgagcggattctcaaaaacgagcgtcggctggccgaggcggccggagtcggaatttcgcagactcacggaccgtggcgctggccggtacacgactcgacgcccgaggaacgcgccgagcggatggaaaagatgaagctcagcctctgcggcacggcgctgctcggatgccgctatatggcgattcacccgatcatgccgttcggacacagcatggaggactactcaaagaccgcggaattcatgtcgatgaatcatgagttcttctcggagcttataaaagaggccgagagatgcggcgttgtgatctgctttgagaatatgccgatggtgcgccttccgatcgcgtcgccgaagacgacctccgatttcatccggagcttttcgagcactcatttcaaaatgtgctttgacaccggacacgggatcatccatggcgaaaagccgggcgacacgatccgccgcgacgccgatatcataaagatcctccacgtccacgacaacgacggaaagaatgatttccactggctcccgtacaacggggtcatcgactgggcggatttcaccgattcactcgcgcttctcgacgaaaacgtcgcgctgtcgcttgaatgccgcgtcccgccgaagatgcccgagcccgcgctgacctcctgccggagatccctcgcgaaggtcgcggagagcatcatcggcagaatctgaacgtccggctggaagaggattcctccgcgcctgcgtccgcatctacatccacattcgtaggggaggggcttgcccctcccgccgcaaaggctcatccggtcggatttacgcgccttctcagagatactgtcccagacgctcaaccgtctccttctcgtatctcagaacgtcgcgggcgagcctttccgcttcgccgcctccgtcgttcagcttcttctcgaggtttatgatgcccatcgtcgcgccgtttatcatcatttcggcaaggtgggacgtcgtcgtgtcgagcatcgtgttcatcaccatacccatcttcgcgcccattttcgcggtcatcggcagttctttcggtttgagtccgcgctctccgagcttttcggacgcctccttcgcaaagcggcggtagacggacagctcgtcggtcatctcggagcgcagaccgttgtctgacactttgtcgagaaggtcgattatcgagtcgccgcccatcttcgtgttcttgtagacttcgttcagaagctcttcgttcttgtcaagcatacttttctccttaaaaatcaagaaatgaagaggagctattcgtatgccgtcagcaacgagataacctcggacagcgcggagataacgcttgagcagggaaccatgcttgtgatcgagagccgcgacctgaacctctgacgcttattccgcatatcatgtattgaaggatcgtcgatacatgaaaggatgcgaagacatgaagatcgtcgtcatgaagagcccgaagcttctcgctccgctgctcagaaagatattcaaggtcaagaagaaaaagtgagatatcagctgtcagatgaatttctggcagctttttttataaaactactccgatagtattgacaaaccggaagatatgtgctataatagttatactatcgcgatagtacgcgtcagctctgcccgaagccgtcgtccggaagacgagccgggggcactgtgagacgccatgcaaggagttacaaattatggaagaaaccaacaaaccgataaagctcttcgattccgagctgaaggtgatgaaccttctctggaaaaacggggagatgacagccaagaacatcgcgtccgaactcggaaatgagatcggatggaatatcaacacaacctacaccgtcatcaaaaaatgcgtcgccaagggcgcgattgagcgcacagagccgaacttcctctgccgtccgctgatttcaaagcgggaggtgcagaacggggagataggtgagcttgtagaccgtctctttgacggcgccgccgaccagctcatcgcgggtctcatcgactcgaagcggctgactaaggctgagatagacgagcttaaaaggatggtggagaagctgtcatgatagctgtttttctgagaactctcatgtctctgacgatatccggcgggattatcgcggctgccgcggcaatagcgaggttcgcgtcgcgcgggaggattcccgggcgcttcatgcgtcttgtctggattgccgcggtgctgcgatttctcgttccggtcttcattccggtcagtgtgccggcgcgcgctgttcctgaaaatctgcctgtcgtcaggtatgtctacaggacacccgctgcaaacgcgcccggtcagacggaaggggacatgaacgctcaggtcggggaagcggcgaaaaagccggatgccgcggagattatcttcgccgtctggggaatcggttttctcgcggtctcgggtgttttcgcggcgtcgggaatccgcgcggtaatgtcgataaagggcagaccggcggaggacgatatacgtgacgaagtactgctgatcatgagaaaatccggcgtcaggagaccggtcagagtgctgacagggaacgtccggtgcgccgtcacctacggcgttatattcccgcgcgttgtcgtcccggagaaaatcggtatgaacgctctccggatatcggcggcgcatgaggcggggcatatacgctcctttgacgcgcttttcaaggttctctcggcgtttgccgtgtcggttcattggttcaatccgctcgcgtgggtgacgctcaggctgtccgggagagacatcgagctcgcctgcgacgagggcgtgctccgccggttcggggaagggaaggagattgtcattcaaagaaaggactacgcgctgtgtctgattgacgcggcgggcgcgggttcgcctctcccctccttcggcgggaacgccgtttacgaaaggataaggcatatcatggacagaaagaagataacgattggaaccgcgatggcgatagcgcttgttacgactgtctcggcgtcggtgtttgtcagagcgactgctgtagaagagaagacagacgacatttcgacagttccggaaacggacacgacgattgtaataccgtcagacgataccgactacaaaatcagagtaaacgacggcgggctggaaataattaccggagtaccggagagcgtcgagccggaatacggcaatctcccgatagaaaagaacgacacgcgatccccggagaacctgccggagagagagactcacccggacggggaagagccgcgggagcgtgaatttatctctccgctgacgacgcttgtcatgacatatggctacggagacagaacaactcccgccgggaatcttgtcagccacgacggaatcgacctgaaagccgacgccgggacgccggtattatcgtctgtcgacggaattgtcaccgacaccggttatgacgcggcgctcggaaactacgtcgttatctcggacggcgcggggcttgagactgtctcggcgcacctctcggaggtcagcgttaagagcggcgacactgtcagcgccgggcaggagaccggaaaggtcggggcgaccggaaacgccaccggcaatgtccttcatttcgaggtcagggtgaacggcgggaacgtcgacccgtcgccgtatctcgggcttgaatgagcgacataaatttacatattcccacttgattccggcgcttccgtgtggtacaatatccgtgtaaataatcggcgttctgccgggaaaaaacggagatatgtacaatggacaacctcatcgcttcagcggcgaccggcgacaacaagatggtcatcatcatagtcgcgtgtgtagccgcggcggcgctccttttcgttgtttcgaagctcgggcgcaaaaagtgaataatcagtgccgccgcggaggtatgccttcgcggcggtcatctgtgctgacggatagatcagaggaacgttgacagtctttctgccgtctctttctcaaaccgtaaaacatcccgtgcgagcctttcagcctcaccgtcgcctccgtcgttcagcttcttctcgaggtctatgatgcccatcgtcgcgccgtttatcatcatttcggcgaggtgggacgtcgtcgtgtcgagcatcgtgttcatcaccatacccatcttcgcgcccattttcgcggtcatcggcagttctttcggtttgagtccgcgctctccgagcttttcggacgcctccttcgcaaagcggcggtagacggacagctcgtcggtcatctcggagcgcagaccgttgtctgacactttgtcgagaaggt

SEQ ID NO: 3506 - DNA, 1785 bp, Unknown
  16S sequences of unknown bacteria
tcacgctgtcgccgaggcggtcgcgcagccacttcgccgaggtctcggcggaggaggataccgcgtggatcgggcttgcgtcctcgggcgaaacctgcgcgcatcccgcgaatacagaggcggcggtgaccgccgcgagcgtaagtgataaaattttcttcatttttgtttccgttcaggtaaatcggctgagattatttctcccaccacttccaccattcgctgacgacgctctgcgagtcggacagacgcgcaagcatctctcccggattctcttcaatattgaaatccgaaagcttaagttcgccgacagacgctccgtaccctccggcaaagtaatactgcgtatcgacggcaagatcgcggaagtacgtccatatctcggtgtagcgcgccttctgcgtctcgcttccgttcagataccgatcgtagtaggaagcaaacagcccccttgtgtacattgcgcagcttgcaaggcggacggcgtattccgctttcgcgctcggtgcatactttatcgcgtcctcgaacatcgagatgcaaagctcgaaatcgtcgcgcgttttttctatattcattgcgcctgccggactgcggtagcacgccatgacgggccagcatccgtctgcctcggatgctgcgatccactcataataatcgtagataagctttccgctctcaccgtagaggacatacatataatcgtcgatcattccccggtattcttcgtcggtcatatccgcgttccagagaagacgctgaataatgtacattgcaaggatatcgatgctttcgcgcttgccgtcattccacgggctcgggtctgcacagcagatccagaagccgtgcacgccgtactcgctgaagaatttgaaatcgtcgcgcagagttttgatcgtggagaatgtcagagatttgaagtcccaattcagcggataataccatacggtcacgcgcttggaaattctgcaccattccttgaattcctcggcgtatgtgtaatttgtggttccccaaccgtcaacggcgtgacgcgaacactcttcgccgttcagcgagtggtttccgcagacgagcttatttatgtcgttatagaagcagtaggatacattgacgttatcgcgcggcacggtctttttcggcggatccgaggttccccagtaagcaagcatcgaaacccaaagcccggggaaacgctctgccatgacgtccgccatgatgttcgtgaaatagagcaccggcgcggaattcgcccgttccgcggctattgcattcatacagtttttgcatttgcagaaatcgctgctgtcaggctgcgcaacatctaccgccgtgaattcttttccgatctcaagccctgatgcgatcatcgcttcgacctttgcgacaaagtatgcttccgcttcttctatgaaaagctcgtcggtatagcacggctgcggatcgcccatcttttcaaaggtgtattccgaaaacgctcccgcctgcgccgcaaatccgaccccgtggttggcggcaaggcatgtggactgaccgtatccgttgtatcttgtcgtattgctgaccgacgtgctttccttcattttgacgaaatgatttcccgaggagcggaatcttccgtagcgatacgggaacgtcggaacctgtgtatcgccgagacctgcgggaatgtcaacatggtcggagtcgtagaggtagtagaagctttcctcattcgcctcggtatatttttcggtctgccaattgaagaagaaccgccagccgatgtagcgctcgagaagctca

SEQ ID NO: 3507 - DNA, 8274 bp, Unknown
  16S sequences of unknown bacteria
atgttacttgttatagaaacggtcgttgcattggttcttattattgtattctatacatgtaataatagagagtcgattgtaaataaaaatggtactacaatggtagaggaaaagccaaatttttcttttaccaattggacgaactattatgaatatcaaaacatttttgttagaaaaaatattgtaagaatccatgaagaatatggccagtcaagtagagaacgtatctcaatagattattatgacgaaaatggtaacttaattgaaagtgtgaactaattttcatttataaatcaaacctaattgaacgagcagaaattatatagcaaagaaaaacctaagtgaaccgttccagagctcacttaggtttttgctgattgagaagaatactctatataaaacatcactaaaatagtgatagttaagtaagttagattttaattgaagatacatgttctaccatataatatttcaagcattttaatcaaataaatgaatgaataaatcgaaatattcttgggcaatttcttttgtgtttttttctgtatccaaaaagtcaattacggacataaaaccggtagcggcaaaagttaactggacttcactgtattcaatatgtaaatagtttagctttttcaccaacaacactttaagtgtatttaccaattttataacaaaactgttgctgccctgagagccacataatatcaaaaaagtatgataattttcttttaaaaagcagatcattttttgaatgacttcaaagtgctccggtgcagtcaagggacaacgaatatgttgtttatatattttttcgaattgatataagaattcattttcaatatcaatgactaattgttctatattatcaaaatagatataaaacgtgcttcgcgcaatacctgctgcttctgccaatttacgaacatttatggtagaggcatcttgggacgtaaccaaagaaagataagtaagatgaattttatctcgaatatcttgatgtttcatcttcttatatctctccactctgtaactattatttatttattttacatagaaatgattgaaattattttcttaaaaagaaaaataagcttatttgaaaaaatttaggcaataatctaggaaaaaatataaaatagcaatatttatattttcattttgtgttataatattttcaataaaatattcggaaacagtggtggactttttgaaagatcaacatttagaaacagaaatgaatcattattggacggaacgttccaaaagttatagtgaacaaaatagagcacagattgaaaacgaaaaacggcatgagtgggaaaatatgattttaaaatatgctcctcaaaaggagtgtttaaatattttggatgtaggtacaggaccgggcttttttgcgattatattggcacaaaaagggcatcatgtgactgcagtggatttaacacaagatatgttggagcaagcaaaagaaaacgcaaatcattataaagtggaagttgaatttaaattattggaaaatcaatttttaccttttccagataatacatttgacttggttgtttcccgcgatgttacttggatgctgcaagatgcagaaggagttttaaaagaatggtatcgtgtcacgaaaaaaggcggaaaagttctgtactttgatgccaattggtactactatttatttaatgaaaatgaaaaaaagaaacatttggaaaaccaaaagatggtccgggaaaaaggcggatttatttataataaatcaaaaattatggaaaatttagcaaaggtattgccattatcacaaacattcagacctgattgggatagagaaacattacctacgttgggataccacaacattgtgaccatttccaacgtcaattccattgtatataccgaaaaagagcaaatacaatatgcaagcaaacctgagtttttagtggtagccgaaaaataatatattttttaaagactgttccttatgtaacaacaaggaacaggctttttcgttttatgttatcgttattgataaaatttgcgcaatatgctcggacattttataatcatgtgtttttggaggtaatcttaacgatgttataatacaaataacgttgatatgtgttttattattgtgatttgggggagaaaaactatgcggaatcaacaattacagacagattatacagaggatatggtcggttactggaaagagcgttcacatacctatagcaaagataaccgcagtcagttagaaaatgagaaaaagactgtatgggagaatctaattttatctaatactacccaggaaaaacaattaaacattctggatgtaggaacaggtcccggtttttttgcggtgctgcttgctcaaaagggacatcacgttacggcagtggatgtcagtgctgatatgctggaacgtgcaaaagaaaatttagattattatcaggtacatgcagacttaaggttactggatggaaatgatttacctttttcagacgatacatttgatttggtgatttcacgagatgtaacatggacacttcaacaaccggaagagacacttttggaatggaaacgtgtagcaaagcctggaggacaaattttgtattttgacgcaaactggtattatcatctttttgatgaagaatggatgaaattacatcttgaaaacgaaaagataaaaagtcaaaatgggcttcctattcatgataaaggaaaagtaatggaagaaatcgcaagagaacttccaatgtccaaaaggttaagaccaacatgggatttagatgaattacctcagttgggttttcgtaatgtaaaagccttgaaaaatctgaattcagttatctatacggaagaagagcaattaaaatatagaagtaaaccggaatttctggtaatcgctgaaaaataagagaagggaacgtaaagacaatcaatgattaaaaaaggtattttacgcattgtaaatgttgtcattgtattaatcggtattacctttttatctttttctctattgtatttggcgcccggtgatccggctgaaacgtacatacgcggcggcgatggaaatgcaggtacggtttcagaggaagccatccaagcacagagagaaaagtggggattggacaaacctttctttgtacagtattttaattggcttggtaatattttgagaggtaattttggagaatcttatactacgaatcggcctgtactcgaagagattggttctaaaattggtcctaccttgattttatctgttgcagctttatttgttacattattaatttcaattcctctgggtgtgctatgcgcactttataaagatagactgctggacaatatttgcagagtattttcttttatcggaattgcggtgccatcgtttttatcatcgttactgttgctttacttttttgcaattcaattaaattggcttccggtggtgagtaaaggtggatttcaaggcttaattttaccggtcacagtgttaacaatacagtgttcggcaaaatttattcgtcaggttaggtctattgtactggagcaaatgaatcaggaatatgtacgtggtgctattgcgcgaggtgtaacaaagtccaaaatattattctcgcatgttttacgcaatgcatggcttccaattattacattaatcggcatttattttggtgttttccttagtggtgcagccattgttgaaactattttttcatggcaaggtattggacaacttgcagtagaggctgttggaaggaaagattaccctgtaatacaagcgattattttgtggcttggtgttttatatgtagctgtaaactttttggtagacctgtcttattcccttctcgatccgcgtgtgcggcttggaaagggggaaaacaaatgagttatctcataaaatcgcgcagaaaaaaagagagaaaaaagcgtccccaaatacttctgtacattatgatagcatgcattattacattatttctggtagcggttttagcgccggtcattgcacccaatgacccctataagacagacttgatgaatcaactgcaagggccgtcggaacaatacccgtttggtactgataatttaggacgttgtattttatcacggctgctatatggtgctaccacttctattttttccagtttaggaattactgctattgtatttatcataggaactgtattgggagtaattgcaggctatttcggtggcgtatttgatattgttatttctaaaatcactactatttttcaggcatttccgcgtttgatttttgccattgcaatagcaggtgttttaggaattggaattggtaacaccatatttgcgttgtgtgccatgtgctggacagaatatgccagattgtcacgcagtttggtgctgtccgtaaaagaaaggacttatataaaagccgcaagagtttgcggtgaaaatcattttatcatattgataaaacatgtatttcccaacatttttccatcattaattattacatctatgttgaatataggcgctatgttaatggaagtatcagcgctttcttacttaggactgggcgtaaaaactccaatggctgaatggggagatatgatgaatttaggaaaagcatatttgcaaacaaatccttggttggtttttataccgggtattgcaatttttgtcgcagtggtaatctttaatttgtttggagaaaagctgcgagatgctttagatttaaaataatttcattaaggagatttcattatgaaaaaagtagtttcattgtgtttggctgcggttttggcagccggaattttagcaggctgtggttcaggaggtacttcggaggagaataccggaactgcgtccacatcacaaacagcgggcgtttccagtatggtgtttgcagatacgcaatccccaaccaatttggattgtgccgttggatggaatggctggtatacttcccgttatggtattacagaaacattattcaatttggacaaagaaatgaaagcaaaaccttggcttgccaaatcgtgtgaagccgtagatgataccacatggaaaatcactttaagagatgatgtgacattccaaaacggtaagaaaatgacagcacaatccgtaattgactcttggaaccgtactatgaaaattaatacaagattgaacgaactattatttattgattctatgacagcagacagtgagacggttctaactgtaaaaacaacaaaaccggttcctgcatttgaatcaaatttgtgtgatcctattgcaagtattacagatgtaaactcaggtacaaatccggaaaccaatccggtaggtacaggtccatatatggctgtgaactacgatgtaaaaaaacaatgcaatgtaaaacgatatgatgggtattggggaggaactcctaagctggaaaccgcaacctttaatatcattgcagatcccagcgcattagcaatggcgcaacaatcaggtgaaagtgatgtgtctttaactattccatctacgagtttatctttatttgacaataattctaactatgtagttgacggtgcaaccggttcccgcggtcaagttatgtttatcaactttaaaaatgaattcttacaggatatcaatgttcgtaaagctttgagcatgtgcattgataaagagagttatgccaaaggtttaaataaaggcgcttctgaaccggcaaatggtttattcccggattcttttgactttggaggcaaagatttaaaaggttattcatacgacttggaaggcgctaaaaaattattggatgaagcgggttatcaagatacagacggagacggtattgtagaaaaagacggaaaaccactttctttacgtatttgtacttacagcacaaaagcagaattaccggtatttagccaagctttggcagatgcagcaaaacaaataggtattgacattcaaattgatatagaagcttatgacgcaattgtagaccgtcaggaaaatggtaatttcgacttaatgttaatcagctttacaatgtgtcctgaaggtgacccccagtatttctgtgaccttgcctttaaaaccgacggaagcagtaactatggcaactattccaatgccgaagttgacgctttaattgaccaattggatcaagaatttgaccaagaaaaacgtgtttctttggcaaaagagattcagcagaaaattttagatgatgcaggatttattgtatttggtcatgcgaaatttaccaatgtcttaaaatcatctgtaagtggttgtgaaaccaatccttctgaatattatttaattacagctgaaactactatgtcaaaagcataaaaggttcttataatatgaagttattgaatgttgactctttaagcgtttcctattctcatatacctactgtaaaagatattagtttttctatcagcccgggtgagattgttggtttggtaggagaaagcggttgcggaaaaagtactttactgcgtacgctgatgatgttaatggaggaaaactgtcaaattgataaaggcgctgttttctttgaagaaaccgatttgacaaagttatctgaaaaagaactccgcttacttcgtgggaaagatattgtaatgatatttcagaatgcagctttatccagtaatcctcttcataaaattgggcatcagttttacgaaaccattacgagccattcagggaaaatgtccaaaaaggaatgttatgcaaaggcggaagatatcttaaaaaaattaaagtttaaagaaccaaaacgtattttaaatagctatccgtttgagctttccggcggtatgaatcagagagtggctctggctttagcaattttgatgaatcccaaactaatattggccgatgaacctaccagtgcattggatgttaccgtacaggcacaggtcataaaacaaatgcgtcaattgagagaatcatatcatactgctatgttagtagtcactcataatatgggagtagtagcacagctgtgtgataaagtaggagtactgtatgccggtagaatcgtggagtggggaagtgtagaagacattttggagcatccaaagcatccttatacacaggcgcttatttctgcgatacctgagatgaatggtgaagacccaaccgggattccgggttctccaaaagaatttacgaaagaagaaatcggttgtgattttgctccccgctgtaccaaagcaaaagaaaattgtgcatgtgtggtaccggaaaaggttgtactttctgatgagcattgggctttatgtccttattgcagggaggagtgaatattgtatggaactgttggaggtagaaaatctttacaaggaattctataaagataaggtgaaatttgcagcggtagatcatattcatttctcaatccgtgaaggtgagtgtttaggacttgtaggagaaagcggttgtggaaaaagtacaacggcttctttaattgcaggattattgaagccggataaaggcactttccgatttttgggagaggagcttaccaaatcttcttcaaggcgtatacgaaaaaatattcaaatgatttttcaaaatcctatggattcttttgacccacgctatcatcttctttccagtgtacaacaaggcttgcgatatgtagaaaaatgcgataaaagagaactggaacgtcgtgcgcaagaggcgatttcttttgtgggattaaaggaaagttattataaaaagccaattcatcagttaagtggaggcgaatgtcagcgagcggcaattgcccgtgcaattattggacagcctaaattgttaatttgtgatgaggctaccagtgcgctggatgtttctgtacaagcgcaaattatatccttattaaaaaagttaaagcaagaaaaaggcatgtccagtctttttattacacatgatttaacgcttgcatcagttatgtgtgatagattagccgttatgtattgcggcaagattgtggagtacggagatgcaaaagaaattatttctaaaccgaaacatccatatacacaactgctactgcaaagtgtattgccggccaaaatagacaagaagttcgacattgctgattatgaaagcttgcgcgaacctcataccggaggatgtcacttttatgaatattgtcccaaggcttgtgaacaatgtaaacgtgagatgcctgaactaaatttgtgtgaccatagggaagtagcttgctttttacgagaataagaaaaacggtatctgccatatggcagataccgtttttttataatattt

SEQ ID NO: 3508 - DNA, 11256 bp, Unknown
  16S sequences of unknown bacteria
atgtggtataagaacagtctcgtgctgacactgacaacggtagtgctgaccttgcttgtctgctattttatcgcatatggactttccatgtataagttcaagctgcagggtttcctgttcttcatggtcatcgcgacgatgtccgtaccgtttgagattctgatgcttccgctgtaccaggagatcacaaagatcggtctggtagacaacaacgcaggtgttttcctgccgggtctgtgtgcagccggtacgattttcttctttaagcagtatatgacgagccttccgaaggagctgctggatgcggcccgtgtggacggttgtaccgaatatggcatcagtgtcaagatcatgatgccgatcacgaagccggcatttgcttctcaggcgatcatgtgtgcgatgggttcctggaacaacatgctctggccgatgcttgtattccgtgatacgagcaagtttactcttcagattggtctgaatacgctgctgaccccatatggtaacaactacaatgtcctgatcgcaggctccatgtttggtatccttccgatcctggcgatctaccttatcttcaatcgttacctcgtagaaggtatgacgagcggtgcggtaaagggctgatcggccaaaaggacaatacatagcattttcaataccccacggaagcgtggggtattgttgtatccggggctgtacttccgcaattcatattaacgttaatcggattattatacaaaaacagttatataagtaacgaaatagaaaagaagaaaaaagacagaatgcacaaaaatagaacaaaatacacgaatattttatacagaaagaaagaacaaaaacacttgtaagatacaagcgttttgtggtattctcaatttagcttgatttaaaatattttaattttttatggagtgaggacattatggcaaagtatgttatcaacacagaaaacaaaaaaagcaaaatcaacaaggaaatctacggacatttttcagagcatcttggacgctgcatctatgagggactttacgtaggagagaattctgacatcccgaatacgaacggtatgcggaacgatgtagtagaggcgctcaaggagatgaagattccggtacttcgctggccgggcggatgtttcgcggatgagtatcactggagagacggcgtaggtccgaaggagacccgtaagaaaatgatcaatacgcactggggcggagtcgtagaggacaacagcttcggtacacatgaatttttcgagctgtgccgtcagctgggctgtaaggcatacatcaacggcaatgtcggaagcggcacggtgcaggagatgtctgagtgggtagagtatatgacctttgagggcgtatctccgatggcggatatgagaaaggaaaatggtcatgaggacgcatggaccgttgattatttcggagtcggcaatgagaactggggctgcggcggaaatatgacaccggagtactatggcaatctttaccgcagataccagacctatgtgcgtgagtacaatcatgataagaagatcttcaaggtggcatgcggaccgaatgtagacgattatgagtggactgagggcgtgatgaagacctgcttccgccactgcccgccgcaggcacacgggttcatggatggactttcccttcattattatacacatccggagggatgggagattaagggcagtgcgaccgacttcgatgagaaggcatggtacaagacccttgcgaagacgctgtatatggagacactgatcaatcgtcacggcgcgatcatggatcagtatgatccggagaagcaggtaggcctgatcgtcgatgagtggggcacctggtttgctgtagagccgggcacgaatccgggatttttgtatcagcagaatacgatgcgtgacgcactcgtagcaggtatcaacctcaacatcttcaacaagcattctgaccgggtgaagatggcgaatattgcacagcttgtcaatgtactgcagtctgtcattctgaccgatggcccgcagatgatcaagaccccgacctaccatgtatttaagatgttcaaggatcaccaggaagcgactctggtagacagccatatcgagaccgagcagatcggactggaagacgagtaccaggtaccgaacctgagcgagtctgcttccatcgacgcagacggcagactgcagatcacgatcgcgaatctgtctgcaacggacagctatccggtagagaccagaatcgttggctttgcaggcgagaaggtcagcgcagagatcctgaccgaggaaatgcatgcgatgaataccttcgagaacccgaatgcagttaacgtaaaggcattcgacggagtagagagagttcatggcggactgaagttcacgatcccggcatgctccgtactgcatatcacggtagagtaagaggatggacggaaggccaatataagaagcaaagttttgctaagtcagataataattggctggagagaaacgtttatagtatatatgagtatagaagaaagaaaagatcagatcggtgcggcgccggatacatcggaaccgcgccggttctgcagaaaatgtctgactcgtgagatggaacagaccgagtattttcgtaccctgcatgagtatattgcgcatctggatgcagacctgaaggtggatgatgaggtctatgaggaacggctcgcgctttgtaaggagtgcgaaaagctgtatcaggggatgtgccggatctgcggctgctacgtggagctgcgggcagtgatgaagaagaatggctgtccgcttgtgaagccgatgtggacgcgggtgcaggaggagaatgtggcatattgattgctatatccagtctttcagacaactgacgacagctatagcatgaaataagaaaacaggaggaaaacatatgcagaagtacgcaaaaatggttatcgacaaggacttccgtatttccgagatcgataagcgcatttacggttcctttattgaacaccttggaagggcagtgtacgaggggatttaccagccgggacatccgtcggccgatgagaacggtttccgccgtgacgtcatggagctggtaaaagagctgaatgtaccgatcgtacgttatccgggtggaaactttgtatccagcttcgtatgggaggacagcgtagggccggtagaccagcgcccaagacgtctggagcttgcatggcgcagccttgagacgaatgagattggtgtcaatgagtttgcaaagtggacaaaggcagttgattccgagatcatgatggcggtcaaccttggtacccgcggtgtcgctgatgcctgcaatctgctcgagtactgcaatcatccgtccggcacaaagtattcggactggcgtatcagccatggagtaaaggatccgctgaatatcaagacctggtgtctgggcaatgagatggacggtccgtggcagctcggcgcaaagactccggtcgagtacggacgtctggcagcagagaccgcaaaggcgatgaagctgatcgacccgaccatcgagctcgtatcctgcggaagttccaatacgcagatgccgactttcccgcagtgggaggcgaccacgctggagcatacctatgactatgtggattatgtttctttacatcagtatttcggcaatccggataatgatacggagaacttccttgcacgttccatggagatggatcatttcattaagacagttatctccacctgcgatttcgtaaaggcaaagaagcgcggcaggaagaatatcaacctgagctttgacgagtggaatgtgtggttccatgcaaatgaggaagacggcgatacgatgaagaatcatccgtggcagcaggctccggcgcttctcgaggatcattatacctttgaggatgcgctcgttgtaggactgcttttgatcacgatgattaagcattctgaccgtgtcaagatggcgtgcctggcacagcttgtaaatgttatcgcaccgatcatgaccgagacgaacggaccggcatggaagcagacgatttactatccgtatctgcatgcatccaaatacggacgcggcgtggccctgcagccggtactttcctcctcgaagcatgacacgaaggagtatacggatgtcacagacgtagactccgtagctgtatggaatgaggagaaggatgaggtgacgatctttgcagtgaaccgtgacctcagtgatgacattacactgacttgcgacatcggaaattttgagggctatcagctcatcgagcatattgttctggagtgcgatgacctcaaggcggtcaactccgcagcagcagagaaagtagcgccgaagctttctgatgagacaaaggtagatggcagaaccgtgaccagcaatctgcacaaggcatcctggaatgtgatccgtctgggacgcagataattgagattatatcagatgatgatgttgttgggggcaaaaggcgagtggtaaagatttggcagatttgcagcagctgtcatgaataatgaaaaagaaaaacagcggtatcggtttaggcaaaaatttatgccgaatcgaggctgctgtttttttgtgtaaatcatgtaaagcggacattcgcaatccatccctgcagctctgctgacagggcctagcttcgctacttgctcatgaacgcagtcgcttcgcgatctgcgttcaaataatagagtgtctttctcttgcgaacacaagagaaggcaagaattccctgtgttttcgcttgcaagaagtaaaatggtgcgatagaatagaagacagagcggcatgccgcgcatcatttattactggaaaagaggattagatatgaaaatcgtaaaagcaaaagactataacgatctgagcagaaaagcagcaaacattatttctgcgcagattattatgaagccgcactgtgtactgggactggcgaccggatcgacgccgatcggcacatacaaacagctggtcgagtggtataataagggagatctggatttctctgaggtgacgactgtgaatctggatgagtacaagggactgaacagagacaatgatcagagctactactatttcatgaatgagaatttattcagcaaggtcaatatcgaccgcaaccgtaccttcctgccggatggcacggagccggacagcaaaaaggcatgtgatgcatacaatcagatcatccactctgtcggcggcgtagatatgcagctgcttggccttggacacaacggacatatcggtttcaatgagccgggaatcgctttcgagaaagagacacattgcgttaagctgaccgagcgtacgatcaaggcaaatatgcgtttctttgtttctgagaatgatgttccgaaggaagcttacacgatgggcatcaagacgattatgtctgcacatcggattctggtagtcgtgtccggagcagataaggccgaggcagtaaaaaatgcctttttcggaccggtgacaccggcagtgccgggctccattctgcagctgcataatgatgtgacggttgtggcggatgaggctgcgctgtctctgtgcgaggggctgtattaatcgacataaagtgtattttggaatttatctacatggatgaaagattaattccaaaatccagcggaaacttgattcgatgtcaattttccgcaggggcataaatgattttgcgataagagctgggattttcatcgtcctggctcttaccttttaactgaataaagaagtcccttgcttcaattgcggaaagaaataagcagtgggtgggggcttgtatcaggagagggtcaggccccaccgctttacaattaaaaacagctgtgtacgaatcatcttcatacgcagctgtttttttacatggatctataaacaggagagccggatcatggctgccagaacctatatcgttggccgtttacgctcggcccatcacagccgtgacatgatactccgtctttcctttctcaaacggaataatatgtccttcgatctctttgccgtctacgatcagctttttaatgcctttctgtacaccgtccgggttctggacgtcgatgtagtagcgggcgccgcggaaggaacgtgtaagacggaaatcgccgaagccctccgggatgcacggatcgataccgaggccatcgtactccggctgtacgcccaggatcgcctgcgagatattcacgaaggtccatgcggcggttccggtcagccagctgttttttgcctctccgaagaatttggcatccgcaccggctaccatctgagagtagacatacggctcggttcggtggatctcgctgatgtcctcaatgtaggccgggcaggtctttttatagatatcaaaggcgcgggagccatgtccgacaacggtctctgcgattgatatccacggattattgtggcagaagatacctgcattttccttatatcctggcggataagaggagatttcgccgagattcagataatactgagtgtaggcaggctgcagaatcatgatgccgtatttcgtgtcgaggcgttcttcgacggacttcaatgcgcgctctgcgagcccctctgcgatgccgactccggcgaggacgcagaagccctgcggttcgatgaaaatctgcccttccttacattctttggagccgattttctgagactgtgcatcgtaagcgcggatgaaccattcgccgtcccagccgtcctttaagatggcggaatacatcttgtcgacctcgtcaagtgcatcttttgcgagcttttccttgccgaggcgatgacacagctctgcgtattctctgccgtattttacgaacattccggcgataaagacggattctgccaccgggccttcagatggtccggtcgtctggaacggctcacccggagtgtcggagaagcagttcagattcagacagtcattccagtcagcacgcccgatcagcggaaggtcatgcggtcctttatggtcgacaatatagcggaaggagcgcgtcaaatgctcaaagagcggagcagccgtggcttcatcgttgtcaaacggaacctgctcatcaagaatggagaaatctccggtctccttgatataggcagcagtacctgcgatcagccagagcgggtcgtcattgaagccgctgccgatgtccatgttgccctttttggtgagcggctgatactgatggtatgcgctgccgtcctcaaactgagtggaggcaatgtcaataatacgttcctttgcgcgctccggaatcagatgcacgaagccgagcagatcctgacatgagtcacggaagcccatgccgcgtccggtaccggattcgtagtaggaagcggaacgggacatgttgaaggtgaccatacactgatactggttccagatattgaccatgcggttgaccttttcatcggcagaatcgaccgcatattttgcaagcagtgtattccagtattcattcagctttgcgaaggcggcatcgacctgcgcgtcggtccggaagcgggtgagcagctctctggccggtgttttattgatgatactcggcttttcccatttttcttctttggggttttcagcgtagccgagcacaaagatcaggctgcgggattctcccggcgcaagcgtgagactgatctggtgcgcggcgatcggtgaccagccgcttgcgatggaattgctgcagcagccattctcgacagcctccggattggagccctcgcggtaagcgccgataaagcagtcgcggcttgtgtcgaagctgtcgaccggagtgttgacactgaaataagagtagtggtttcggcgctcgcggtattcggtcttgtgatagatcgtagagccatcgacctcgacctcgccgatgcttaagttgcgctggaagttggtcatgtcatccattgcgttccagaggcagaactcaacgtaagaaaagagctccagggatttcggtgcgtcggtctggtttgtcagcgtgaggcggtttacctcacacgtcgcatccatcgggacgaaggcgagcagatctgcggctatgccgttctttgaagaacagaaccggctgtagccaataccgtggtggcaggcataagaatccagatcggtctgtgtcggcttccagccgggattccataccgtatcgccgtctttgatatagtaatatttgccatttgcgtcgtatggaatatcattgtagcggtatcttgtaatgcgcagaagcttggcatctttataaaagctgtatccgccgcaggtattcgatacgagtgagaagaaatcattgcagccgaggtaattgatccacgggagcggtgtcttcggcgtcgtaatcacatattcgcgattcgcgtcatcaaaatagccgtatttcataagttcagtctctcctttaccaatatactgaaaacgattaagtaaaatggcaaaaaaaattgcctgttcggttaatcagagtataccctgactttctgcggaaatcaactactgaaattatttttgtgaaaaatgctgagagaagcgcggaaaatactgacaaacggctatgtagatatggaaagacggagaaaaaagaaatgttgtgaaaattcataaaaatcattgtaatagaagcagaaaagtgataaaataatacagaaaacgctttcagaaagcaaataattgaaagaaagtaagaaaaaagagacaacgaaaacgtttaagtaaacagacagtaaaaagagtaaggcagaagatggggtgctgaaatggtttcaatgaaggatatagcaaagctgtgcggagtttccgttgcgacggtgagcaaggcactgaatgattacagcgatgtgggggaggcgacgaaggagcgtatccgtgcagttgcagaggaacaggggtattttcctaattcttctgcgcgggcgctcaagacgaaccgtacctacaatctcggcgtactatttgtggatgaggcacacagcggcctgacccacgatttttttgcatctgtactggaaagctttaaggtacgggcagaatcaaaggggtatgatattacctttgtaaatggaaatgcgagtaaccgcaggatgagctattatgagcactgccgctatcggggggtggacggcgtggtcatcgcctgcattgatttttacaatccggaggtacagaatctgattcagagtgacctgccggtcatcacgattgatcatgtatttgacaatcgttcagcagtactttctgacaatgtgaacgggatggaagagctggtggaatatatttgcagtatggggcatgagcgtgtggcctatatccatggcgcagattcttcggtatcgcggaaccgcatcagcagtttttaccggacgatggcaaagcgaggggtcaatgtgccggatgcctgcgtctgtgaggcacagtatcgtgatacggaggcgacacggcgactgactctggaacttttggatttgccaaagccgccgacctgcatcatttatccggatgatttttcggcgcttggcgggatcaatgcgatccgggagcgtggtctgagtattccggatgatatctcaatcgcgggctacgacgggattcttctttcccatgtgctggagccgaagctgacgacgatctgtcaggatacggcaggtatcggaaagacggcagcagaccgtctgattcaggagatcgaacatccgagaacctcgctgatcgagcatgtcgtggtgaaggggcgcctgcagaagggtggatctgtgaaaaaaatcgggtgatttagcggttttcaaacctgttttggtgtgataaaatagaaaaagtgtcagaaacagggaggttaagaaatggattgcattattataggaatcgccggaggaaccgggtcgggaaagtctacttttacgaaccgactgcgtgaccgtttcggagataatattaccgttatttatcatgacaattactataagcggcatgatgatattccgtttgaggagcgtaagaagctgaattatgaccatccggatgcattggagacggatctgctgattgagcatatcaaaaggcttcgcaatggtgagagcattgagtgcccggtctatgattacacggtgcacaaccgttcggataagacagtccgcattgatccgcgcaagattatcctcatcgaagggattttgctgctggctgatccgagactgcgcagcctgctggatatcaagatctatgtcgaagcagatgcggatgagcggattctgcggagaattctccgcgacgtaaaggagcgcggaagagacatcgacaatattgttgagcagtacctcacgacggtaaagccgatgcactatctctatgtagagccgacccgtgcgactgcggatattgtgattaacagtggtatgaatgatgtcgcgtttgatatcgtgcagtccaagatccggctaatgctcgaggaaggaaaataactctgcacagaagccggaaatgcggtcggatttcatagacagataaacaaaaaaggcgttgcctgtcagataaatgacggacagcgcctttttaaccgaatcaagcaagtaactgttcggttgtcggcaagtaggaaggtagattataaatatccgcttgacttcagcatctgtgtaattactgtgtgctggaagcgatcagggcattcagcttttctccgaattccggaccgaagccatatacttcctgaatcagtgcggaagcaacctccggaacatcctcccgtgtgatgccggaagcaagtgccagacgtactgcatactgctgacgggtcagtgccgggacgaagagacgtgcgcgcttcttgccgcttggtacggtgccgacctctgagatcatatggtttttctcaagaagagaaagcatccgaactacgtaagtgtagtctgcatgcggatcattcagaatctgcatgatatccatgctcgtgagcgacttatcgctcttccacaggatctccatgagctgctcctgtttttctgataaaataaatacatcgttgaatacattcttaggcattccaaagtcctcctctgtaatctggtccatcctgttagctatctagttaatgaaggacaacgtagattaaaatgattataaagcagttcgcttatcacgtcaactgaaatctgcgctaaaatagtgattttgtacaatttcaacagaagataaacagcagcatataatgatatcagggtcaaaaggtcatgcgtttcatgcttgcatgaaagagcatgacttattgacccgcaa

SEQ ID NO: 3509 - DNA, 10000 bp, Unknown
  16S sequences of unknown bacteria
aagagcgcgatggaacagctgacgaacgcgatggcgtcaggagtcctgaaaggagaagaactcagatctgtcctggaagcggctcctgaaatcggccgggcgatcgaagactatatgggaatcgcggaaggatcgattcaaagcgtggcggatcagggagtggtcacctccgacgtcgtgaagaacgcgcttttatcagcggccgaaggaacagaggagcgctttggggctataccgaaaacctggtcgcagatatggacttcgatgaagaatcaggctctctccgtcttttctccgatcctggctaagatgaatcaggtgatgaacagctctcagtttcagcaaatcacggcggcgctgatgacaggactggcagcggtaggaggaatcgcatctcagatcttcggtattattgccggaatcgcatcggttatcgtggacaactggtctatgatcggcccggcggttctcggcgcagtcgcggccttcggcgcttaccagattgcggtaaacgcggctgcggcggcaacgagaatcgcgtccatggccacggctgtatgggaggccgtacagcgggggtttaatgcggtgatgggtttgaatccgatttttctgatcattatcgccgtcatcgcgctgatcgctgttatctttcttgtagttgcggcgataaacaaagtactcggaacgtcattttccgctttgggcataatctgcgccgctgtagtaacggcgggagctatcatcggaaacctgatcatcggtttgtttaacgggatcgtgcaggcgctttggactattttcgtagaaccgtttttcgggattgtagaatggattctcaacgttgcaaatggtgggtttgacagtttcggagatgcggttctcaatttgatcggtaatataatctcatggtttctgtctctgggaaaggtggtcacaaagattatcgatgctatcttcggtacggattggacagcgtcgctgagcaatctgcaggatgaggtgctcgcttggggaaaaaatgaaagttccatcacgctggaccgcagcgcgcctgaaatttccgaacgtctgaattattccgatctcgccagaggagcttatgactggggcgattcgaagcagagtcaaatctcggacaagcttaagaacggcatgagtttcgacaatatttccgatctgctcaaaggatcggatctcagccaatacgggaatctgggtacaggcggcattgccggttctgtcaatcccgcagggctcgcggacgctgtcagccagacggcggaaaataccggatctgcggcggagaataccgatcggatcgcagggagcgtggagatgtccaacgaggagctgcagtggcttcgcgagatcgcggagcgagaagtgatcaatcgctatacgacagcggaaatccgggtggaaatgaataataataataccatcgcttccgatatggatatcgacggtgtcgtcagcctttttgaggcaaaagtagcagaagcgctggatatcagtgaggaaggagtgcacaactgatgtatcaattctatatggacggtgttctgctgccggttacaccgaaatctatgacgctgaagatcagcaatcaaaatgagacgattaccctgattaatgaaggcgaagtaaatattgcgaaacttccgggactgagcaagatttcctttgaagcgctgcttccaaaccggctttatccctttgcgctctacaaagacggattccggggagcgcagtattatctgtctcttctggaaaaactgaagacagactgcagatgcttttcctttgacgtgatccggaccgacagcggcggagaactgctgatggagtcgaattccatggatgtctctctggaaacctatgagatcgaggaggacgcggaggaatacggcacagatatatcggtaaaaatcgaactgctccagtaccgcacgtacggtaccaagaagatcgaatttaaaaagaaagacgggcagacttcagctgtggtatctgcgcagcgggacgcttctgcaaaggaaaagaaagatacttatactgttaaaaacggcgactctctgtgggggatcgccaggacagaattgggagacggcggcagatttcgggaaatctatactttaaatgcagatacgatcgaagcagaggcgaaaaaacgaggccgttccagttcctctgaaggtcattggatatatccgggatctgtactgaggctgccgtcataggaggtaatatgggaaaatatgtatggccttgtccgcagtacagccggatatccagtaaattcgggacccgtacctgtccttttcacggcaaagagcatcacgacggcattgatctcgccgcagcatccggtacgccgattcttgctgcagcatccggtacagtgacccgggcgggaaaaaacggcggatatggaaattatgtaagcattgatcacggcggcggtgtgatgaccttttacggtcattgcagggaaatctacgtaaaaaaaggacagtctgtaaccggaggacaaaagatcgccgccgtgggcacgaccggaagttccacgggaaatcacctgcatttcggggtgcatgtaaacggagcatcgaaaaatcctcaaaattatgtgagtccgtccgataccgcagccaattatgcgggaaattcctcttcaaaaaatcaagagaacgtgacggacggaacctcggccggggcgggtgggccgcaggcttcaaaagagatcaccacagtggtgatcaaatcggtaaccggcgcagccggatcacataaaagcgaactcccctctgccgaagcatttcttcagaacggcgctgaaattctgattcagaataaccagcagattgttcagaatccctgcgtggagggagagatcgtctgggagacctcgagaaaggggtctcccgcttctttaaagttcaccgtggtgaaagatgatacgctcagctttcacgaggggaatcccgtttcgttccggtttcagggggagaaagtattttacggatatgttttcaaaaagagcagatcgaatcgccggacgatcgaggtaacgtgttatgatcagctgcgttattttaaaaacaaagatacgatctcctattccgggaagacgtacgctgaactgctgaaaatgctggcggccgattatggactggcctgcgggactgtggcggatacgaaatataagattccgcagagaatcgaagacggaacgttatttgatattttagggaacgcttcggatctgacgctgctgaatacaggcaagatgtatgttttatatgatgatttcggacagcttacgcttaagccctacgaagacatgcttctgcctgtctgggtggatgagagtacagcggaggagtacgattatacatcgacgattgacgatgagacttacaaccgaattaaactggcctatgacaacggcgacagcggccagcgggaggttcacgtttttaacgataccttaaatcagtcgaagtggggaacactccagtattacgagaaactggacaaggctctttccgcggcggatctcaaggtgaaggctgatgcgcttctgaaatattacaatttgaagaaacgggagcttacgataaaatctgtattcggcgatatccgcgtccgtgcgggaacgcttgtctctgtgggaatgaggctcggagacatggatttgtcgaattatatgggcgtggaaaaggcgaagcatacgttttctgacgggattcatacgatggatctgtatctggccggagtgcggggggaatttcatgcgtaatatcaatgaaagtataaagaaagcggcgttgacagcgatggaagcggcaaagcccgtggaaatctgttacggcgcggtacagtctaaaaatccgtttcaggtgagactgtctcagaaactgattctcggacgggaatttttgatcgtaccgggagggatgacggcagattcctttgaaatcggcgatgttttgatcttgttccgcgttcaggggggacaggaatatttaatttttgataagaaagggggactatagatatgttgcctaatgattataacgatgatctcctgcaggactttaccgtagagatacagccgacgcgtacctactgtctgaatttttccggcgggcggtcctcgggaatgctcacaggccttgaagctatgaaacaggcgatttttctcatattacatacggaacgctacaaatatgagatgtattcatggaactatgggacagagctcagcagtctgatcggagagagtttttcacctcatctgcaggtacggatacagagcgtgatcgaaaaggcgctgctcgcagatgatcggattctcagcgtgggggattttcagttttcaaaagaatggaaggaagcgtatctcgtccgattcagtgcagagaccacacagggaaatgtggaatctgaatttacctgggaaggaggacaactttcatgattggaagatattcagatcagatgacctttgaagcgattctctcatccatgctggaccgcgttccgaatacggtggataagagagagggttctgtgatctatgatgcgctggccccggcagcggcggagatggcgaaggcgtatatcgaactggatgtgattatggacgagacgtttgtcgatactgcttcgatgcaatatctgatgatgcgttgccgtgagaggggcgttcccatacaaccggccacggaggccgtcatcgaagggactttcacgccggcgtctttggaactggaaaccggaagccggtttaactgcggtgaccagaattacatagtcacggagaaagtcggagacggaaaataccgtctggaatgtgaaactgccggtatctgcggcaatctgtattcggggtttttgctgccgattcagtatatcgagggtctggaaaccgcggagattacggatcttctgattccgggagaggatgccgacgacgcggatgctctgagaaaacggtattatgacagtctggacagcctgtcatttggcggaaatattgcggattataaaaacaaagtaaggctgatcgacggtgtgggaggagtaaaggttctgcctgtctgggacggcggagggacggtaaaactgacgatcatcgattccgaatatgaggcgccctcttccgcactgatcgcacaggtgcagacggaggtcgatccttcccggaatcagggagagggatttgggatcgccccgatcggacatacggtgacggtggaaggagtgacagcttttcccgtaacggtgaggagcgatatcgtctttgtagacggctggtcttttgaggcggcgaagtctcagctggaaaatgcggtgagagaatattttcatgagatatctgcagcttgggctgatgaggaagtttcggtagtaaggatttcccagatcgagaataagctgcttaacttaagttgtgttctggatatatccggaacttcagtcaatggcggaacggcaaatattcagctggcttacgcgcagattcccgaattatcttctatcgaggtgacaatatgagaaaagcattgatggaatatctgcctcaggttctccgggatacggcggaatttcagcagatcatgtcagtagaacaagaatcggccgatcggttttttgaagcgctggacagtgtgttttccaatcagtttatcgatactgcagatgaaacggggatccgaaggtatgaaaagatactgaatctgacgccgaaggatacggatcgtcttgatgaccggcgctttaggatcaaagcaaaaatcaatgagcagctgccgtttacaatccgggtgctgcagcgtcagctgacggcgctctgcggggaagaaggcttttccgtacagctgattcccaaggaataccggcttgtcgtcaaggtggagctgaccgcccggagtaattttgaagaggtacagaaaatgctggcccggatcgttcccgcaaatcttctgaccgatgtgcagctgaagtataatcagcatcgacagctgacggcatacacacacgatcagctttccgtacggacgcacggacaattaagagaggaggttcttaatctgaatggctacagagacaactaatctggggttgaaaaagcccgacacagacgatttttataatgtaaatgattttaactataatgcagatgtaatcgacgaatctttttccgatttgaagaaacagccgatagagacagtttcctgcgagattcgggacgggatctgtcaggctgtcatttcagacggaattacggttcctttcgcccaacaggctctggtcatcaaattgccggaagatctgccgcaaaacgccgcactggccctgaatggcggcgcttcgtatccgatctgtgccgcagacggaggttctgcgccgcagggaaacgcagcaggttcttatcttcatctgatctttaattctgatcagagccgctggtatgtgatgggcggcggcttttcccgcgtatttattcaggacagcgaaccggcgcagagcaattgtatctggatcaagccggtttcccgcgtggaaggctcttataccgtgtcgaagaaaagtacggactcggcgaacggaaaacgccatgatccagcaggcgggattatgaccgatggttctgcgtcggcagctgttttggaacggaacggtgagccggatgatgtctgaggcgagagcagggaagaaggaggtaacaggatgactgtaaaagaaatagacgggctgctgcaagtgaaggatgagaagggcgatgttaataccatttatccggtgacgaaggcggaaaacgtggaaggtttatatggcgaagatgggaaaattccggcagaccagctgccggagatggattatcttccgcttgccggcggaacggtgaccggggatattatttttagagatacaagagaaggaattggttttgcaaattctgtatctccgtttaataaacattctcctgttcaatttattcgagattatgtgggcaatgtaatgcttttattagcaactgatccatcacttacagttccatctttgcgaataggaaattttagtggagttacttttagtcctgagactccggttaaaggaatagctgatcctacagaagatactggggcggcaaataaaaggtatgttgatgttgcagtcgaagaaggcatgaaagattttgtcaaatacgaagtggatgtaagcagtacgccaatatgggaaacgtatgattacatatcaatctcagacgtcaaacccattgcgtacgttgcttctgacggaaaaaagaatgttgtcagcatagccgttaatgggagtggtcatgatatccattattctgctgattgcggagaaacttttttaaagaaatctgatccttggtttgctacgagcaaaagaaccagcggtgttgcgtacgtgtgtggttactttgttgttatcaacggaagcacggaaagcaatccagaattcctcatatccaaagatggaaaaacttgggagaaaaagaccctgaattggagcttgagcgatgatgatagactgaatgctaataaacgcattataggcgaagaaaattggggattcgtctatccttacgacgaatattcctattatcgtaccgcagtgcttataacgaaatcaggaaatgatctgaatttcactgaggtccctttcagtcgaaatgcaggcgcatcgtataacgatggatactatgtcacatgggggatggattcgcggtatcttaaatattctaccggaaagcctgattccagcttgacgagtattgaattacccacaagtctaaccagcaatgataagattatacattgtgtttattgtaacggctttattgtcctgttttatcggggttactttagcggtgaaaaaacaactatttcgttgtatagcatttctgagaagaagtggtatgagaaaatttatcagtccagcgatgatacaagttgccctgacatggcggcggtgagcgacagcaaagttcttatcctaagagaatcagatacaaatttaatagttgatacagaaacaaaagtcgttaccattctacaggcagattgtaacgcagatacaactatagctaatttatacccagatgattctgatattcgatctatttcgatgtttggcagcagacaaggtgtttatagatcagaatcattagcggaaaaaaaatataaattaacaaacttaaaaaatgactatataggggacggagttaagatagaaacgggttcatatataggaactggcacgtatggagaaggcgataaaaatatcataacactttcgttttttccaaaattatttattatatctggtcaaggctcaagttttttttcgagcggagcagcgtatgtacctgtatctgtcactgggtatgatagtgggggaatgaatgttaatatgtctggaaatacagtgtcctggtatgcgtcaaaagagtattaccagctcaatgaaaaagacaaaaagtacaattacgttgcatttggataggagtggtgatatgtacattcaaaaaatacctaatgaaagcggggcatatcctgctccgcagagcaactatgcagaaggtttgcttgttatttcagaagagtttttagaggtcttttttcaatataacggtttcgtttcgatagaacacgacggaactcaagtgaccgatatctcaccaaaaacggaagcgtgggaaaaatggaaggcatctcttcctcccgactcagagccggagccggtgacgtgggatgcacttgcgaaagcctacagagagggggttgaatctattggatagtagaatgattgttttgaatgctatgaaatctcaaggcgcgacagatgccagtatcttagcggaaaaatcggtatcgggggaagtagacggaacagggcttatttctgttcaacatcaaatcccgaaatggagacggagagattttacagacgttccaatcggtacaccatatcaatatgaagatcaaatatataaattatggcagacacacgacgctacgcaacagggcgattggacacctgacaaggcggttagtctgtggggtatttgtcataccaaagacccgaagttagcgaaactgttcgtcacaccatccggtacacgaggtatgtatatgaaagatgattgttgtaaatacgatggtaaaatctatcgcagtaaggttgacaataatgtatacaacccgaaagactatcctcagaattgggaggaagttgagatcctgtgaagggaggcattgaaaatagtggacatgttttcacagattttatgggcagcccttcccagtctcctcaccggcatcattctctcggtctggaattcccgtcagaagagacgcgaaatagtacgcgatgaaaaagaagcagaccgaaggaaaagtgagatgttacggataagtcttctcgtcgccaccgcacaattgagccgtgcggtggcgatggcaatcaagcgaggatctccgaatggagagattgaggagggcctggaacaatacaatatggcgatggaagaattcagagagttcgagagagaacagattgtgaagaatcagtaatggagggatacatatgagcaacagtaatatttcaacgggaacaattattcggacggtcgtactgattgtggccctgattaaccaggtgctgacgatgacaggtcattccgtgctgcctttcgacgagcggcagatcaccgatggtctgagcatgttgtttacagcggcagcggcactctgggcgtggtggaaaaataattccttcaccagcgaagcaaaagaagcagatacctatttaaaagaaaggaaggctgcgagataatatgcagattaaacagcagattatcccaaggaacagaaaaacgcagcggcccggtatcgctatgactccgcagtttattacgatccacagcacaggaaatccgtccagtacagcgcagaac

SEQ ID NO: 3510 - DNA, 13332 bp, Unknown
  16S sequences of unknown bacteria
gaacgatgaacaacctcaccggactgttcgataccgtaaacgaaaaggtcggggacattgcaaatcaagtgggacagactccggcgtcatggaacagcagcgtgtattcaaaggatactctgaattaatcgaatttttgcgataaaagtctaaaatataggggcttttgtcgcaaaaataaccttaaatcagaggcttcctatgattcacagcctgtcggagagcgtgatcgttcccatagccggactgattcttgcgtttgtgatgacgctcgaattcataaacatcatcattgagagaaacaacctgcacgattttgagataacaaatatctacaagtggatgttcaagacagcctgctcagtccttatcgtaacaaacacatggaatatcgttatggcagtgttcgacgttgctcagaatatcaaaggatactctgaataaatcggatttttgcgataaaaggctaaaatatagggacttttatcgcaaaaaaaccttaaatcagaggcttcctaaatgacgcgtcgggaatcattgtttcagatacgtccctgcggtttgagtcgctgatacctgacttggaagcacagcttgaagcaatggagcttggaacattgttcggcgtgtggatgcagtcgttccttgtcggaatttgtatgcacattctgacaatatgtattttcctcatctcgttcggcagaatgcttgagatatacgtcatgacgtccgtcgcaccgataccgatggcaaatatgctcggcagagacagccacatgtggcaaaactacatgaaatcactcggagcgctcggtttgcaggcgttcctcatcattatctgcgtggcaatatacgcagcacttgtgcagaacatcgcagtgactggggatatatcatacgcaatctggacctgcatgggatatacagtgctcttgtgcttcagcctgttcaagaccggcagcatggcaaagtctatccttggcgcgcattaggaggtgtaaccatagcatacgtacctgtaccaaaagttaaggaatgtctgatttaaggttgtttttgcgctaaaatcccctaaattttagccttttaccgcaaaaactctatctattcagacataccttctaacaaacgtaaaaacgaaattccttttcaacctaacaaaacggcagctcatctgctttggcggcggcgcaattatcggcgtaccgctttttttcattctacgaccgcatacacagacaagcacagccgctctcgttatggtgttcgtgatgctgccgttcttcctgcttgcgatgtatgagaaaaacggacagcctcttgaaaaggtggtgcggaacatggcaaatgtcctctttatcagagcgaagaaaagaccgtaccgcacaaagaacttctacatatcgctggaaaaacaaaatgaactcgacaaggaggtgtacgcgattgtcagcgggaaagctcacacgaagcgaacgaaaacagattgaagccgttatcgcaaaacataaaaatgccgataagcgaaagatgtctgcgcaggactccattccgtttcaaagaatgttcacggacggaatctgccgcacatgggacaacagttataccgaggaaactctgatttaaggttgtttttgcgctaaaatcccctaaattttagccttttaccgcaaaaactctatctattcagagtatcctccaaaccatacgctttgatgacatcaactatatgttaaacaccaacgaagacaaaaccgcgatttttgacgggtggtgcgattttctgaattacttcgacagctccatcggtttccagctttcgttcatcaaccgcgccgcaaaccgagagaacgcgtatgaacatatctgcatacctcagcaaggagacgaatttgacgaaatccgcgcggaatacacggatatgctgcggaatcagctctcaaaaggtaataacggactcatcaagacaaagtatctcacgttttccatagaagcagagaatctgaaagcggcaaaaccgaagcttgagcgcattgaaacggacattttgaacaactttaaaaggctcggagtttccgcggaagttcttgacggtcataggcgactggagctgctgtacgatatattccacatggacgagcagataccgtttcgcttttcgtgggattggcttgctccatcaggattgtctgtgaaggacttcatcgcgccgtcttctttttctttccgtgagagcagatacttccgcatgggagagaaaatcggaacagcgtcattcctgcaaattctcgcccctgagctgaacgaccgtatgcttgcggactttctcaatatggacagctcacttgtcgttaccatgcacgtgcgctccgtcgatcagattcaggcgataaagaccattaagcgcaagataacagacctcgacaaaagtgtgattgacgagcagaaaaaagcagtccgcggcggatacgataccgaccttgccacatacggaaatgaagcaaaaaagctcctgcaagacctgcaaagccgcaacgagcgtatgtttatgctgacttttttggttctcaacatcgcggacagcaaaacgaaactcgataacttcgtattccaggctgcctctatcgcacagaaatacaactgcattctcacaaaactcgactttcagcaggaagaaggtcttatgagcagtctgcctctcggactgaacaaaatcgaaattcagaggggacttaccacatcttctacggcagtgttcattccgttcaccacacaagaactgttccagaatggcagggaagcactgtactgcggtataaacgcactctcaaacaacctcatcatggtggatagaaagtatctcaagaacccgaacggcatgatactcggcacacccggaagcggcaaatccttttcggcaaagcgggagattgcaaatgtgttccttgtcacggacgacgacataatcatatgcgaccccgaatctgagtacggaacactcgtggaaagactgcgcggacaggtgatacacatctcgccgacgagcacggattatgtaaaccccatggatttaaacctcaactacagcgatgatgaatccccgctcagcttgaaatctgacttcattttatccctgtgcgagcttatcgtaggtggaaaagagggacttcagcctgtggagaaaaccatcatcgaccgatgcgtaaggaatgtgtatcgtgaatatctgagtaatcccatccccgaaaaaatgccgattctcgaagacttgtatgatgaactgcgcagacaggaggaaaaggaagcacagtatctagcaacggcactggaaatctatgttacaggctcgctgaatgtgttcaatcacagaaccaatatcaatatcgaaaaccgtattgtttcctttgatatcaaggagcttggcaaacagctgaaaaagataggtatgcttatcgttcaggacgcagtttggaaccgtgtcaccgtaaaccgagacgagcacaagtccacacggtactatatagacgaatgccatctcctgctgaaagaggaacagacggcggcatatatggtggaaatctggaagaggttccgaaagtggggaggcattccgacaggtatcacgcagaacgtgaaggacctcctcgcttccaaagagatagaaaacatcctcgaaaactccgactatatctatatgctgaatcaggcggcgggggacagacagattctcgcacagaagctgaacatatccccgcaccagctttcgtatgtgacgcattcgggcgaaggtgaaggactgctcttctacggctcaaccatcctgccgtttgtggatcacttcccgaaggatacggagctgtacaaactaatgacgaccaaattaagggaaaagaatattgaaatagaggtatgaatatggaaaacaacatgaaggtatttgaaaacaaagaattcggatttgttcggacagttatggtaggaaacgagccgtggtttgtgggaaaggatgtagctgccgcactagggtacaagaatccgcaggaagctgtcagaacacacatttatgatgaggataaaggggtgagcgaaatcctcacccccggcggcacacagaaattgacagtaatcaatgagtccggcttatacagtctcattttagcaagcaagataccgtctgcacgagcattcaaaaaatgggtaacatcggaaattctcccgacaatccgcagacacggcgcgtacatatccgatccgctgatgcagaagatggcggacaatcccggcttgcttgaaaaaatcgttgaaaccatgatgtatgagagaaagcgagcggacagcctttcagaaaagctgaacgaagcacagccgaaagcggactattttgactcttttgtgaatcccgcgaactgtaccaacatcagagacaccgcaaaggagcttggcgtaccggagaaaacattctgcaaattcctgcaaaacgagaagtatctctatcgctgccctgccggaaacctcatgccgtacagcaagaagagcaacgacggactgttcgtggtgcgcgactactaccgccgcggtcatttcggaacgtacaccctcatcacgccgagcggaaagaacctgttccgtatgctgtttggtcaggtgggaatgtgaaaaggaggagctgccatatgaaatatacctatagaacctgctgtcatcctgcgcttggcagaatccgcactatctgcgacgggaaaatgcttctgctctgtgcaagcgaccttggacgtatgctcggctttaaaaatcctgaaaaatatgtgaaaaagcactgtccgcatatgcaaaagtatgcttaccccggaatggagagaaagatgtactttgcaaatgccgcggaagccgatgttttgctcgcggaaacggatagcagaagcgcggatatgcttgaatactggctgtgcaatactgtaattccggatattttcggagaatgccgtgacagagaagccgagacaggtctttatctgattcatgcgcgtgactactgccggtacgtgtttgatattctgaaaacgtgccgctgtctgtatgttctcgcaaacactgtatcggacacagaagcaagtgattccgcgaaatactgcgccgaggtgatgctgggacagtgcgcggaaacattggcggcgtatggtttttccatggaagatatggagtgtgcacgccgagagagaattgaagctttgtttgagcatgatgtgatctcccctgaggaaggcggatatttcccgtgtaacccctatgccgaagcgtaacattcgtctagagttcaccgcagaagaacggcggaatccctcactaaaaaagctgatacgcaaagccgagaaagccgcggaaaagctcgataaagttcaagccaaactccccacaaaaatcaacggacaggagaaaaagccgccgtcaaagcttgtccacatcacagccgatactcctatcgacgtactcgccacacagttccaccgtgaagcaaaggaatccgacaataccgccgcagaagccgtggatgccggaatcggtgctttgcagacagtgcacgaggtgtcgtatcacaaaaaactgaagccgtacagagccgcagtgcgtgcagagaaaaaagcggatgctgctaaccttagcgcactcgggaaggaaacgcaggagataacaaaaagctcccgaatgcagcagaaacgctacatcaaaagggagtacatgaaagccaaacgctcatccgaaaataccgcaaaagcatcggagatagcggcacgtgcggcggcagatacggctgaaaaagcaaaacaggctgtagaatttgtccgcactcatccgaaaggcgtggttatcgcacttgccatagctctcgttctgctcatttttacctcacttgtttcttcgtgttccgttatgcttgagggaatgcttggcggcgtcggcgcttccacataccaaagcgaggaagaagatatgcttgaagcggaggaggcataccgctcaatggaggaggaattacagtatacgcttgataattacaaatttctgtattcgggatacgacgaataccgaattacgggagaagtgagcggacacgacccatatgtgctgacttccatcctctcggcaatgtacggaaaatacaccatagaagatgtgcatgatatgcttgagagaatattctcactgcaatatctgcttgaagaaagagtacgcagaggtgtttgtacggtaaagctcactgtgaagccgctggaagatatagcaaagtcaatcctgacggacgagcagtacgagcggtacaagctctacatggagacaaaagggaattatcctgagctgttttcatccgaacaaaccattgcggtcatgagtatgccgctcgctgaatccgacacattcacaaaagtcaaagcggaagcggaaaaattcctcggctatccctatgtctggggcggcagttctccagaaacctcctttgactgctccggatttgtttcttgggtatacaaccattcgggatggagtataggaagatgtaccgcacagggactgtacaatatctgcactcacgtgtccgaagacgaagtacagccgggagatcttgtgtttttcaagggaacatacgctacatacggtgtatctcacgtcggaatctacgtgggaaatgcggaaatgctgcactgcggagatccgatttcctatgccgacctgactctgccgtactggaaacagcattttttcgcatacggaagactgccttgaggctgaaaggagaaatatgaatcccaaaatatccaaactgaaagcggagaaagagaagaatctcaaaaaaatcgctgacatgaacgcaagaaacgaagaaatcgacaagctgattacggagctcgaaaaccttgacataatcggacttgtgcgtgaatgccgcatcacacccgaggaacttgcgaaactgctcaaaaatatcacggaggaaaaagcatgacaaaaagaattctttcgcttaccataacgctaatctgtatcaccctgttctcccttccgtcctatgcaatggctgaacctgacgcggaagaaacctacccgccgctcacggaagagggaaacatgacggtgacggacgacatatatcagctcattgtcgagaaaatcacgcagacgggagaggacggagcggaagttatcgagacgactgtgattgaaaacaagcagttcatcacggttcacacacgctcaggtgctgaattttacatcataatcgaccgaagccgtgacagcgagaacgtgtattttctaaatcaggtagacgacgaggatttgttcgctctgcttgaagctaacgactctgcaacgccatgcacctgtgcggaaaaatgtgttccgggagaagtgaataccgactgtgacgtgtgcaggatgaatatgaagtcttgtacggggaaagaagtgcaaaaagcggaggtaacggaaacttcgccggagcctgagcagaaaaaagcaaatcctatgccgattgtcgttctcattctgctgatcggcggaggcgcggctgtgtatttcttgaaattccgcaagaacaagccgaaaacgagcggaacaacggaccttgacgattacgactacggagaagaagatgaaacggaatacgaaggagaagaagaaaatgagtaagttgattatcgcggaaaagcccagcgtcgcacagtccattgcaaaggttcttggtgcaacttctcgaaaagaaggttacatcgagggtggaaattacatagtaacatggtgcgtcggacatcttgcggcaatggcaaacgcggaggtctacgacgaaaaatacgcaaaatggagatacgacgacctgccgattgtgccgcagaaatgggagtatattccggaaaaagacaaaacaaagcagtttgaagtgattcgggagcttatgaaccgagatgatgttgacgaaattatcaatgcctgtgacgcgggacgtgagggggagcttatcttccgaacggtctactaccttgccggatgcacaaaaacgatgaagcgattgtggatttcctctatggaagacgaagctattcgtgagggaatgaaaaaactgcgtcccggcagtgagtatgacggactgtaccgttcggcactgtgcagaagccgcgcggattggcttgtagggataaacgcaacgagactgttctcaatactgtaccatagaaaactgaacgtaggacgcgtggtgtccccgactttatccttgatagtacagagagagtgcgatattgacgcgttcaagccggagcctttctatacggttcagctgagttgcgataacttcacggcactttccgagagattcaaagacagaaatgaagccgagcaggttcttaactcctgtgcaaaccatactgtcaccgtaaaatcaaccgaaagaaaggaaaaatccgaaagaccgccgctgttgtttgacctgacaacgcttcagcgaacggcaaaccgcgaactcgggtatacgtctcagcaaacgcttgactatcttcagtcgctgtatgagaaaaagctctgtacataccctcgcaccgacagcagatatttaacgtatgatatggtatcacttattcccgagctcgtgcgcatatcagccgatatatgcaaggcagaacagcctgtaaccatgaacactacaatctgcaacagccaaaaagttacggatcatcacgccattgtgccaaccgtcagtgttatgagtgcggacatatccgttcttccgacaggtgagcgggagattctgcgccttgtgtcccgtcagcttttgtgcgccgtatccgaatcttttcaatatgcggaaactgtggcagtgcttgactgtgtgggacatattttcacagtaaaaggaagagaaacgcttgcggacggttggaaagcgtacatcgatagtgaaccaaacgaaaaaattctgcccgaattaaaggaaaacggagaatatccagtgaagtctgtctcactaaaagagggaacaacaacacctcccgcgcattttatggaagattcactcctgcacgcgatggagacagccggaaacgaggatatgccggaggaggctgagcgaaagggactcggcacacctgcgacaagagcggcgattctggaaaagctcatacataacgggtttgttgagaggaaaaagtccggtaaaagtgtatttttaatgccaacccattcggcagtttctttaattaccgttcttcccgaaaaactgcgttccccgtctctcacagctgagtgggagtatcgtttgaagcaaatcgagcataataaactttcttacgaggaatttcttgacgatatatccgccatgatgagtgagattatcaaaaattacaaggtaattcaaggagcagaggttctgttcccgtcaggtcgagacgttatcggtcgttgtcccagatgcggaagcgaggttacggaatcaaagaaaggctttttctgcgagaacacacagtgccgttttgggatgtggcgcgacaacaagttctggaaaagcaaacacgtgacgctgacaaaagcacaggcttcggaaatgctgcaaggtaagcgggtgcatatgaaggggctgtactccgagaagaccggcaggacatacgacgcatacgtaaagcttgacgacaacggagagtttgtacgctaccgcatggaatttgacagggggagcggcaaatgaatctcacttccgccgaaaaagagacgattatcttaacctccgaagcggacgatactgcgagtgtgtatacctttgatgtgcggctgaaaagaaaactcgccaatcttcataggctgttccccgataaaatccacccgataaatgaagaaaaccacggtgcggtaaactacacggtgccgaagacttgtatcgtgatttacccgccgcatacggaagaatggaaaaagaaagcaagagaacgtgcaaagataacgggatttaagtcaaagaggaaatccacataaccgaatactgcccttgcacgtgctgcttaccggtcagccatgcaggggctttttttgtttgcgaattcaaagaaggaggtaacaatgccagagacaaaatacacatcctacgccgaacttgccgatactacactgcgccgtatcacggaaaacaccgacaactggactgcttttctttcgtcatgcgcgaatctgtacaagtatccgttcacctaccagctcatgatatacgcccaacgccctgatgcgacagcctgtgccgattttgacacatggaacaagcgtatgggacgttacgtgaagcgtggctcaaccggaatcgcactgattgacgacaatggtgacagaccgagactccgctatgtgtttgatatatccgacacgggagcaagagcaaatactcccgaatttcacttgtggcaatgcgataaggaacagtttgacgcggctcttcgtgatgcatacggagttgaaacaggagaaactttcagcaaaatcgaatcgatatccgaaacacttgccgcggaatactggacagagcacaagcgtgacattgccgacatcattgcggaatcctttctggaggagtgcggaagccgctgatttaaggttgtttttgcgccaaaagcccctatattttagccttttaccgcaaaaactcgattaattcagcgtatccgatgatatagatacagtatccgttcgtttcagacaggctgcggcggcgagcatgacatacgcagtcctgcacagatgcggcatgaatccggatttgtacatggacagcgaggattttcgctcgattgtagagttcaatacaccagaggatactctgaattaatcggatttttgcgataaaaggctaaaatataggggcttttatcgcaaaaataaccttaaatcagaggcttcctcaacactgcgacagcgctcggtactgccgtaagtgaaatgagcgaaaagatactgaggacgatagagaaaaccgtaaaaaatgcagaaaggacagaggaacatgaaaacagggctgacttacacgagtgtaggggaatacagtctcccgaatttgaagctgagcgggacggagaaaatcgggaagtacggcagaatgaggagggaatacctgaaaacacaccgtccgatactctacaacaggctccttctctcggagaaactgtacgcgcatctttcggagatagacaggacagcgcaggagagaacagagcggataatgagcgagctgatgaagcaaaacggagtgacagagaagatgaaagaggaaaatccgatgctttgggtgcagatgatgaacaacttgaaagcccaagcggaagaagtgatcatgaccgagctgatatacagctgaccacaagcggagagcagataagtctgtttgacgggattgtattcccgacggaatcggaacaaatcgaatacatagacaaggcggagacggaagcgttttccgctttttctttgtctcaggaagagattgacacggttcttcgctatggcggcaacgcggacgacagcagaatgcgtatcacagcggagtttatgaaagacaaaccgacggaagcacatgcggaatatctgaaatccctgtttcgcggaggcaacggatttcatttaggtatgcgagatatatcggcatggcatgcggaagacggaattcgtattgcttttggcagacaggcggaaaatgcacgcgatgcgcaggttatcttgtggatggacgcggtaaagcggatagacgagcttttaggtgcgggagaatttactacagaaacagagcttgcggaagcggagggcaacgaacgtagactggcggcgcaagagcttgtgtatttgcagagagacattcgtgaggacgtgcgggacaagtattttgaaaattcatggtttgagggcatattcagcgagtcatgcgaccgtattgcggatatgctctcgaatgataaagcacgtgatattgtcacggatgctgcgtcaaggtttgccgaggactatgcgagagacaaaagcctgcttcttttccgctatcacaagccggaggagacagcgcggaaactgcgggaactctccgacatgaagcgcacattccgtggaggactgacagaaatgccgcctgcggaagagttcatcacggaggacgagataaaccatgtcttctcaggtcgaggcagtggagtctcaggcagcagggcgagaatatacgaatacttcacagcggagcacacggcaaaggaaaagcatgactttttgaaaagcgaatacggcacaggaggacattctcatgctctgtcaggttcgtcgggaagcagtgaatggcatgacggcaaggggattcgtctgcaaaagagcggctgtcacgacgtgcagatctcctggcagaacgcagtaaatcggatacaaaatctcattcggaacgatagatattttaagccggaagtgaaggatgttccgaaaacagttgagcctgaacctgaggtgatgcctgaaaaaacagcagaaaatccgcttgtaacgcctgaaaattatcgtattaccgacgacacactcggcgaagcaggtccgaaagcaaaattccgcatgaacatggacgcgatatatgccttaaaaatccttgaaaacgaaaaccgaaatgcaacacccgaagaacaggagactttggcaaaatacgtcggctggggtggacttgcagaagcttttgatgaagacaattcctcatggattcgggaatacaaggagctgaaagcggcgctgaccgatgaagaatacgctgctgcacgtgcttccacactgaacgcacactacacaagccctactgtcatcaaagcaatctacgaagctgtcggcaatatgggatttaagacgggcaacatactggagccgtcaatgggagtcggtaacttcttcggacttctgccgcaggaaatgagcagttccagactgtatggagtggagcttgactcaattaccggcagaatcacgcggaagctgtacccgaaagcggacataaccgtggcgggatttgagacgactgacaggcgggatttctttgatttggcagtggggaatgttcctttcggaaactacaaagtgaacgacaagctgaatttttccatacacgactactttttcagtgcgactcgttcctaagtgaaaagcttaggtgcaaattggaaagcgaggtgaaacagaatatttgcaaactaacaattcgactggtggaatgatggggtaacgcccagaaacgccaaccttaatactccgactggctctgctcaaaaggcagatgttcagaagctcggtgaa

SEQ ID NO: 3511 - DNA, 14776 bp, Unknown
  16S sequences of unknown bacteria
aggcaattttttctatgctataacaacctagcaacaaatacaaaatcaaagattttgattgttgactagaacgttttaacgtttataggatagaaattgcacagcaatttcttttatgttataatatttcaatataaatttacaagtttagaggaggctctccatttgaattatcatgccggaacttacgatgttatcgtaataggtgcgggtcatgcaggtattgaagcagcgcttgcttctgcacgacttggctgtaaaacagttatatttacaatcaatatggacgctgtaggcaactgcccatgcaatccgtctatcggcggtactgcaaaaggtcatttggtacgcgaaatagatgcccttggaggcgaaatgggtcgcactgcagatgcctcttttattcaaagccgtatgttaaatttaggaaagggccctgctgttcattccttacgtgcgcaaattgaccgcagagaatacagcaagattatgaagcataaattagagttgcaagacaatcttcatttgaaacaagcggaaattatttctattgataaaaacgaagatggtacttggcaggctgttactcaaatgaatgcggtatatcaggcaaaagcaatcattattgcaacaggcacctttttgggcggcagaatttatgtaggtgaagtaagctatgccggtggacctgatggattatttcctgcaaatcaattgggagattctttaaagcatttaggattgcatttacgcaggtttaaaacaggaactccggccagggtgttgcgttccagtattgactttacaaatttggaagaacaacatggagatgaaccggtggtaccgttttcttatgatacattggagccgggagaaaataaagtaacttgccatgtagcttggacaaatgaagataccaaaaaagtaattttagaaaatattcatcgttctccgctttacagtggtcagattgaaggggtaggaccaagatattgcccaagtttggaggataaaattgtacgttttgcagataaggagcgtcaccaagtatttatagaaccttgtggtttggatacagaagaaatgtatctgcagggaatgtcttcttcgttgccggaagaagtacaattggccttttatcgcactgtaaaagggttggaacatgttgagattatgcgatgtgcatatgcgatagaatatgactgtgtagacccgttacaaatggaagcaactttggagtttcaagatattcctggattatatggtgcaggacagtttaacggaagttctggatatgaggaggctgccgcacaaggtttgatagcaggtattaatgctgctcataaaattcaagggaaagaaccgtttgttttggatagagcttcttcttatattggcacattaattgacgatttaattacaaagggtgtaacagatccttatcgtatgatgacttcccgttcagaatatcgtttggtgttgcgccaggataatgctgatgaaagattgactccaaaagggagagagattggtttaatcggagatgaccgatggaatcgttttacagaaaaacagcgccaaaaagaacaggaatatgcccgtgcgaaaaagacagtcatttctccgtctgaaaaagtaaatgagattttggttgcgtgcggcaccacaccaatccaaacagggacaaaattaattgatttgattcgccgcccccaattaaattatgaagtattgacagaagtggattccgaacgtccggactatcccaaagctgtgtttgaaggcgcagaaattgaaatgaaatatgatggttacatcaaacggcaaaaagcagatattgaagaaatgcgccgattggaacaaaaggttttgccgaaagatgtcaattatcatgaattggttggtttgagaaaagaagctcaagaaaaattacagcaggtgaaacctgcaaatattggtcaggcatctcgtatttcaggtgtcagtcccgcagatatatctgttttgctgatttggttaagcaaattataatattgtatagaaggtaagcaacaagcgtatactaaattcttggagacatttcgtacataataaagtaaagtgccatttccgagaggagggaaacccttggaaaaacaatcgacagaaaagcaatcaaactttaaaaaattcttcaagttttgcaagatgtttatcaccagagtatttgaacatggtattatgagcagaggcgctgaacttgcgtattattttctattttcgtttttgccgctgattatatttgtggcagcattgatttctgccatgaaaattgatatttcatcttttgcgggcttggaaaaactcattcctcaggatgtgctcagtattatatcggagtattatcactatatctttggagcaaaaaacacgggactgatggtctccggattggtattgagcgtttatttttcatcggctgcggtacgttcacttatgagaggactagatgtggcttaccatgtaaaagaaaacagaccgtttattcgtaagctgattatgtctattttctttgctattattttattactgatgatttctttgagcatggtagtattggttgccggcggtaaaattattgagttgattatttatgtattccctgagtacgaaggtttcgaattcatgaccaatatactgcgttttgctttgccggtcattcctatgttatttgtgcttacattgttgtttatgtttgtaccgaatcaaaaggtaaaatttcgtgaggcaattccgggcgctttattcagtttgattgcatggatggtagtttccgctattttttccctttatgtttctactatgggcaattattctgtattatatggttctttgggagccattattgtgttaatgctttggttttatttaataggaattatatttgtaatgggcggagaattaaatgcattattatttgaatggaaaaataaaacaccggaaccccgcactatgaatatgaaatttctggtgaaatcaaaaggaaaattagtgaggtcattgcagcattttcgcactgcagagaaggataaatcagataaaaaagataaaaaataacagaggagaacctatggaagatattagagcatttttggcagaaaatgctgaaaaaatgggtatttgtttaacagatgagcaaacagaaaaatttcagacttatgcagaattattggtagaatggaatgaaaaaatgaatttaacggcaattaaagagccaagagaaattgctgtgaaacattttgtagatagtcttactattttttcctgtattcagccaaaaaaggaagcaaaggtcattgatataggaagcggcgcgggttttccgggtattccgatgaaattatatcgagaagatttgaagttgactttattggacagtttaaacaaacgcctgacttttctgggagaggtaagcgaccgtttgcatttggatacaaaacgtattcatgcaagagcagaagaagcgggcagagatttaaatttgcgtatgaaatttgatattgccacagccagagccgtagcacctttgaatgtactatgtgagtattgcttgccttttgtgcggttaggaggtatctttgcggctatgaaaggccccaatgccgaagaagagttggaaggcgccaaaaacgcaatacaagtacttggctgtgaactggaagaagtaaaaacatttacattaccggatgacagcaaaagagctgttttaatcataagacgtaaaaagtcgttttcgggagaatttccgagacatggttcaaaaatcgcaaaaaagcctttataagcgacataattgcaaaaaaacatacagaaatatttttttacaccactaatatttctacataaaacgcattacttccgtgataatctgaatacacacattaattgtaataatttggaaattaattttgtattcacgttggaggtggtgcgttttgttgattttatcacaagaaaagagaaaagtagttgaaattccgatagagaggattgtgccaaatccatctcaaccaagaagaatttttgtgcagactgagttggacaacctctcaaacagtatcaaagaaagcggattgttacagccgctgaccgtacgccgtctaggggcaaaccaatatgagttaattgcaggagaacgcagattaagagcatgccgcattgcaggctttaaaacagtttcatgcattgtgaatgattgtgatgaaaaacagtctgcaatctatgcaatgttagaaaatttacagcggcaggatttgcagttatttgaagaagcagagggaattgcccgtttaatatcggaatggggagtcactcaggaagaagcggcaattcgtttggggaaaagtcagtctgccattgccaataaattaagattattaaaattatcattggaagaccgcaaaaaaattgtagaggcaggtcttaccgaacgtcatgcaagagcactgctgagaattccaaatcaagcaatgcgcagtaaagtgttggacaccattataacaaatggttataatgtacagcgcacagatgcttatatagaacagttacttactttaaaagaagctgaagcaaagccgaaaagcaaaggaaaacgtacttttattgtaaaagatattcgtatttttatgaatacaattaatcatgcaattgaaacgatgaaactttccggtattcatgctgttactcataaatgtgaaacggaagattatattgagtgtattgttagaataccaaaagccaaatcttctactgctgcttcttaaacttattttagacagtagttttcacacttttagaaacacgcagcttgtgcgttgtatttctaaaatttaaatttgcttacgagaaccctttctttctttccataacttttgggaaaagccgtgtacaggaaactgtatgcggctttttcctattgaactgcatatacgaaaacttccaaatgtttcacgtgaaacatttatggttttcctcgaaatggtcttttccttctatataaaaaatggtataataaataaacgattatagtttcaagcattttgatggttgcatcagttacataggaggaaacagcatgggcaaaatcattgccattgccaaccaaaaaggcggggtaggaaaaactaccacatctgttaatttggctgcagcaatgggcagtaatcaaaagaaaactttgctggtagatatggacccgcaaggaaattcttccagtgggttgggaattgatcgcagaacattggaaaactctgtttatgaagtactggttggacaaaaacaaccaaaagaggtgattcaatctacagagtttgagtgtttagatattcttccctccagcattgatttggcagcagcagaaatagagttggtatcattggataagcgtgaagccattttaaaaaatgctttgctgccgcttagaagcgaatacgactatatttttatagattgtcctccttccttgggaattatcacaaccaatgcactttgtgtggcagatactttattggtaccgattcaatgtgaatactacgcattagagggactttcacaattgatgaatacggtacgcagagtaaaacgccagtataatgaacagttagatttagaaggtgtacttctgaccatgtatgacggaagacttaatttaacacaacaagtagtggaagaagttaaaaaatattttccgaaaaaagtatttagaacagtcataccgcgttctgttcgcctttccgaggcgcctagttttggtatgccaatacaatattatgataaaagttcaaaaggtgcaaaagcttataatgagctggcagaagaaatgattcgtgggaataagtaataagaaggtgaaaatctattatggcagtgaaaaagaaaagtggactgggaaaaggtctggacgctatttttgcagaaaatgatacggaagcaaattcttcatctacagtcatgcttcgtttggatgaaattgaacctaaccgagaacagcccagaaaagaatttaatgaggaatctttaaccgagcttgcagattccattgctcagcatggagtaatacagccgttattggtacgacctctcatgggtggaggataccaaattgtagcgggtgaacgccgctggagggcatccagacgtgcaggtttatccgaagtacctgcagtaataaaagaattaacggataatgaagtcatggaaattgccttgatagaaaacttacaaagggaagaccttaccccttgggaagaagctttgggataccagactttgattgatacttacggttttacacaagaagaagtagcaaaatctatgggtaaatcgcgtccggcaatcacaaatagtttacggttgctgcagttaccgggttcagttgtagattttttgaaaaacggtgatatttctgccggacatgcaagggcattgttatctttaaaggatgaaaaaattatgctccagctggcaaagaaagttgtgaaagaagaactttctgttcgtgaattggaactgttagtaaaagcggagaatgaacaaaaaacagaaaaagagaaaaagccttctaaaccaaaaataaaatattttcaggaagtagaattggcactccatgaccatttgggcagaaaagttagcgtagaaggaacaaaaaagcgtggtatgcttcaaattgaattttatggtgaagaagatttatccgaattgattaaaaacttacatcttgatacataatgataaacagaatgtttcacgtgaaacatttgaatatacatattgattagaggagaattgagcatgttagatattaaagtaattcgtaataatccggatgcggtaaaacaagcaatgaaaacacgtaatatggatgcggatgcaattatagatgaaattctggatatagatgtacagagaagaaagattacaggggaggtagaagcaaaaaaagcagagcaaaatgcagatacaaagcaaattccattgctgaaaaaagaggggaaagatactactgctcttatggagcaattgaaaaaactatccgatgaaattaaagtattggatagtcaactttctgaattagagaaaaaacaaacggatattatattatccattccgaatataccaagtaaaacaactcctgttggcaaagacgacagcgaaaatgttgaagtgcgcagatggggtgaacctaagaagtttgattttgaaattaaagcccactgggatattggaaaagatttaaatattttagacccggaaactgcagctaaagtcacaggcgcaagattccacttttaccgcaatcttggtgcaaaattggaacgcgcaattattaatttctacttaaacacacatagcgagcacgggtatgaagaaatcatgcctccgtttattgtaaaccgttcttctatgattggcacaggacaacttccaaaatttgaagaagatgcatttcgtctggcaacaaaggtttcggaagaagattattatttgattccaactgcggaagtacccgttacaaatatgtatcgtaatgagattttggagggtagcaaacttcctatcaaacattgcgcatattccgcatgtttccgtgcagaggcaggctcagccggaagagatactcgtggcttaattcgtcagcatcagtttaataaagtagaacttgttaaatttgttgaccctgaaacttcttatcaggagctggaggagctcaccaatgatgcagaacgcgtattacaggcgcttggtcttccatatcgcgtgattaatcttgtaacgggagatattggcttctcatccgcaaaaacctatgatattgaagtatggatgccttcttacggacgttatgtagagatttcttcttgctctaactttgaagacttccaggctcgccgtgcaggaatccgttttaaacacaatccgagagataaggctcagtatgtgcatacattaaatggctccggtgtagcagttggcagaacggtagcagcaattttagaaaactatcaaaatgaagacggcagtgttactgttccggaagtattgcgtccgtatatgggtgtagatatgattaaataatgtgaagagaaaaagggaaacaaggacggtttgtttctcttttctttctatcatgaagaaggatagtgtttcattatgagaattatgacagattatacggcgacaagaaaaattgccagttatgaagtaaatttgtttggtgaattacggttatcgaccgtacttagaatttgccaagaggtagcggaagaacatcttaccatgtatcagatggatcatgtaacattaatgaaaacacagaatttggcttttcttatcttaagggtaggtatgaacataaaccgcttacccaaagatggagaaactattacagtattaacgcgtcctgaaggaaacagcggggcacaattttatcgttcttataaaatttgtgttggtcaggaagaattgatggatattatgtattctaacattttagtggatagtactacacataaaattgcgcatccaagtagactcgattatttaaaaattgatattaaacagacactgtctcccaaacaaaagctgaataagttaaaaattcctgaagatatggaatcatggggaattcgccaaattcgtttttccgatttggattttaacggacatatgagcaatagtatttatggtaatattatcgaagattatttgccatataactatacaaataatagtaatatatgtagaaaagagttatataaattacagattaactatgtaaaagaaagtaagcttaaagatgatatgttgatttgtggaaaagaactggaacagggatttattatgataggcagcgtagaaggatgtcgtacatttgaatgtcaaggacaattccgtttttagcaggctgtattgattttttatcaagtatagttttctatttggttgttagcagtttataaattgtagtctatttaaggtttgtattgatactgtaagaaacaaatctttttataaacgacaaagtatgtcaaaaaattaggcaaagttacttatttctgccatattcacaagggaaatgtctggtaacatttttatattgaaagtatgtatgcgcagtgttataataataggaataaaaacatggtagaatgtaagaataaaaaaggaggaagagaatgttaaattctaattatgctgaaaaatttgtaaaagaaggacttacttttgatgatgtgcttcttatccctgcggaatctaatattttgccaaaggaagtggatttttccacttatttgacaaaaaagattaagctgaacacaccgctaatgactgctgctatggatactgttacagaagatgatatggcaattgccattgctcgtgaaggtggtattggtatcattcataaaaatatgtccatcgaggcacaagcagaccttgttgaccgtgttaaacgttcagaaaatggcgttattgtaaatccgtttttcctttctccacagcattctgtatatgatgcaaatgcaattatggctcgctataaaatttcaggtgttcctatttgtgaaaacgataagctggttggtattattacaaaccgtgacttgcgttttatgacaggtactgattttgaacagcctatttccgcagttatgacccatgaaaaactaattaccgcaccggttggtactactttggagcaggcacaagagattttgcgccaacatagaattgaaaaacttcctttggtagacaatcagggtagattaaaaggtttaattaccattaaggatattgaaaaagcagtgcagtatccacgttcttccagagacgccaacggacgtttgttgtgtggtgctgcggttggtgctacacaaaacgtattagagcgtgtagaagctctggtacaagctcaggtagacgtaattgcgctcgactctgcgcatggtcacaacagcggtattatcaatgctgtacgcaaaattaaagaagcatttccggaagttcagctgattgcaggtaatgttgcaactgcagaagcaacagaggcgttgattcaagccggtgccgactgtgttaaggttggtattggtcccggttctatttgtacaactcgtgttgttgcaggtattggtgttcctcaaattacagctatttatgacgctgcatgcgttggtgctaaatacggtgttccaattattgctgacggtggcattcaatattccggtgacattgtaaaagctttggcagccggtgccagcgtagttatggttggctctttggttgcaggctgtaaagagtctccgggcgagacagaattattccaaggccgtcaatttaaggtatatcgcggaatgggcagtatgggcgctatggggaaaggcagtacagaccgttatttccaagaggatgccaaaaaattggtaccggaaggtgttgaaggtcgtttgccttatcgtggtccactatcagatacggtatatcaattaatgggaggcttgcgtgcaggcatgggttacacaggctgtgcaaccattgaggaacttcacgaaaaagcacaatttatccgtattacaggtgccggcttaaaagaaagtcatccacatgatattcagattacaaaagaggctccaaactactcttttcattccggatattaattcattttatgtaaaataaaaaaatttaaattttctttaaaattgttattgacaaaatgatatttatataatataatagaactcgcttcgttcgaccgaatgtctacgaagtgaggcatatggcggcatagctcagctggctagagcattcggttcatacccggagtgtcgatggttcaagtccatttgccgctaccatgtggctcgttcgtcaagaggttaagacaccgccctttcacggcgggttcacgggttcgaatcccgtacgagtcaccagatgaaaaaacacaccaacagaaatttctgttggtgtgttttcttttttatataactatgttattctatctattcttaaacagaatagaaatatcaaaacacaaatataaagaatacagttgtcgatactttattgcttttataaagagtaaaaattatttacaacttaaattcaaaaaattgattatattatatctttctcataacccaaactaaaattttgattgttaaaaaatgctttagtaaataaaagttaaaagttgtattgttacttattttatgttataacatgcttataaccatgacaagataacaaacgcgaattgttatgagactacagtaatatttcgtttgttagaaattgcattacaattttttttatgttataatatccccattcatgtgaacgtttattaagaaagaggtttatataaatatgaagaagagagttttactggtagttgcagcaatgtctttattggtagccgtgggtttaaccggttgcggcggaacaacggttgcagatccaaatgcagcttccagtgctgcggcgcctactgcttctatggctttatcagaggtatcagaggacaatttaaacggtatgattacctacctaaaaggcaatggtgttatcaaagaagcaacaacagatatgaaagcagaaatgataggtgctgtttcagggaaaatggttcaagctatttatggagatagtgtggctttggttgagatttatgaatttgataaagataatttaaacgaaagtgcacaagaagtaatccaaaatgccaaagaaaacggaaaattcaaatctatggatggagaattaacagccactttatccaataacgaaaaatatcttatgatatataaagatgtttatacagatgatacaaacagaccaattcaagaacgccttttaactttatttaaagaatttgaaccaacaggaacttcttccagcgctgacaatagtgcttcttcaactgaaaattcttctgaaagtcaagaccaagagaataacagcacttcctctgcaactgcagaaagtgcagctcaataagaggattcatcaaataaaaaaagcaagctcactgagcttgctttttttattcctcatctaattgtttggataatgcatcagtaattttctgattccacatcatcaatttttcctctaaatcattccaaacaatttctttttccgtttcatttagtacctcatgacgcatatggggataaatttgataggaaatattatcatatccaacttgacgtaagatatctattgcctccaaaaagcgttcttccgaacccatgcatgggtcatcttctcctgaaataaaccagataggtagatttggttttgtgactttccatccttttgggctataaaccatctccatggttttaaataacgcttgatatccgcttagcgtaaaatgaaattgggtcagaggatcattgtcatattctgttagaatatcaggattgctgcatacccaagcgtttggggaatcctcgcccgcaaaacgtccgtcatctttatatttgcttaaacggtcaagcatcttgctgtgaccatggtctcctttaaatgcttccaaaaactttacaatggactgacccattttacaaccgggtacataaacagggcatccggatataatcaatccgtctaatgtaaaatctaatttttttagataagcacgtgcgattaaagaacccatactgtgacctaacagatagaaaggcaatcccggatgtttctttttcatttgggttcctaccaaagcgacatctgcgattaatcccttttctccgccttgatagaaatagcctaaatcttcttcagattttacactgccaccatgtccgcgatggtcatgaataatacaagcaaatcctttggaagctaggaattccatgataggaatatatctttctttatgttcacacataccatgcgatatttgtacaataccaaccggtgcacaatccggtgttattgtcataacactcagctgcagaccgtctactttagaaggaatataaaatgattctgttacaactgccattgtaaatacctccttaattcatttctctttttttaatagtagcactctttttctaaaaaagaaattgacataccaaacaaatttaatttttattttatataattcgattacaacagtaaaatcttaaattctgtcgctagtattaaggttgtaataatgtgagttggaaatgacgtaagaattgcttataataactttaacaataatagttttgatttgttttagaagttttcatacatgaaaagaaaatatatatggaacactatcttatagttaaaacgaacgattttattagtttgccacattcaaacagaaatacacgcagatattcatttttcttcaaataaaaagaactctcctcatagttgtggaaagttctttcgatatgccgaaattaagcacaaaaacgatgttctcctattacagtaagaacaggtctggaaagcatccattgattgctggtctttgcaggattatagtaataaatagcaccgcctgtcgggtcccacccattaatcgcgtctcttgcagctctataagctgactcggcaaccgtatggtttacaccgccgtcatagagacatgaaaaggctccgggttgataaataacacctgccaatgtattgggaaaactgggatgttcaatacgattcataataacagctcctactgcgacttgtcctacatattcttctccacgggcttcggcagaaataatacgtgccaataagtctacttcgctttgtgtaaaggaaccgttaccaccggtgcttgtcccgctatcagtattggtattagcgccaataccaagggcagccaaagttttctcccctgcgataccatcagcagagagaccgtggtctctttgaaatgcagttacagcttgttttgtctggttaccataaattccatcaacatttccctgtaaataacctagctcttttaacttggtttgaatttgtctgacttcttcaccgcgagaacctaagttagaaaaaacagctgttgtctctccggtagaggttgattcgctggtatctgaatcctctgcctttacttttgcccccacatattgagtgagtagcacaattacaataatatttaccaataaaacagccaaaatagaaagtacatattttaagctgatacgtttcatataaaagctcctttcatttatatgagatattgctcttaaagaagtgttccatatttttaaaaaattatttgttttttctattttcttttctatgatatgaaattaatttttctaatatgtacaagcgaacagagcagtttttctagataaaaaaatattttaaaataattgaaaaaaagtgttgacttatgtcgaactatttgatattatatataagcgccgtttgaacaggcgctaaaatctcaaaaagttttaaaaaaacttaaaactactacttgacagagaagaagaagtgtggtaaagtagtagagctgccttgagaggggcagtaagataggaccttgaaaattaaacaacacaagacaaactagaagcgtgaaatacagaaatgtatgacgaattttaggaacccgtaattctaaaagaattaagaaaaagaaaaagacgttagcaaacgtttgagcagagaacactctgaaataagatttaaacagcgaaagctgattagataccaaattttagagagtttgatcctggctcaggacgaacgctggcggcgtgcctaa

SEQ ID NO: 3512 - DNA, 4973 bp, Unknown
  16S sequences of unknown bacteria
ggctgcgccgcctctttcgtcccccttacgcaggggagccttttggatagtggtatgccgcagggagtagcactggccaaaagcctccctttggaaccaaaggggcgcacgaaggccgccgccagtggcggaaacaggccgtagtaagcccagtgaaacagggaacatcgcaagtgcgctttgcgcacgaagcgaggcgaccatgttgaactgtggaacggtggcacggcgcagccgtgacggagggattcaaagaaaccaaactttggtctttttatccctgccgcctggcgcgcaggcggtgcgccagattgagaatcacggcacacagcgcgctgattacgccccagcgcagcagcgtgccaaagaagcagacgcgcgcgtattcggcggtttgcaccttcacgggcttggccatggcggtagtcagttcccagaagcgcgcctccagcgaagaccattccacaatcacttccggcacccattccgtgaacacgtaaagcggctcgatgagcaacgagagcagcgcgaaggccgcgcccaaaatggcggccaatcccagcagccacagcgccgcggagccgaacacctgcctcatcatgctgcggaaatactccaccttcagccgcgcgcgccattcgcgcacgcccgcgccaacgcggcgcaggagccgcttcagcaaaaagagcagcacggccatcgcgaacagcaccaccagcaggcgcacgatcatcccggcgcgcattccttccttggaaagatcgtaaaaatcgccgccggagcgccagtttcccgccgcctcggtgaagaacgtcgtcgcgcctgtcgccgggatgggtacgccggaaagcgtcaccacgtccatctgcacaaaatcccgcgccagccgctggatgggcacatacgcgcccatggcgtccgtatcgcccacctggcgcgtatggcgcaccacgccgatcacctcgtaccagatgccgccgatttgcagctggctgcctacggcttccgccccctggaagatggcgaaggcgagcggctcatccagcaccaccacattggctccctcgcgcagctcggcctcgccaatcagccgtccttcgagcagaaagcggggatacacatcgaaccagcccacgcccacgcctgtgagcgtgccgctgccgctgccacccgcctccgccgaaaacgactgcccataggcaaaggcgctgatggtggcggccgaaaggttctccgccagcgtttcgcgctgggtttcccaggattcgatcaggccatatagcgcgcttttggcctcctccgctttgccctcttccccactgtcgctggacggttgcgtttccgtgggcgcggggatggcgtattgcaacaggttcggaacgcgccacagccccacggccccgatcgccgcaatgcacagcgccacgatgcacagccacagcgcgcagattttcttgttccgcatgccgccaccccgctagttcgtgtactgcatgaccgtcatgttttcggaaatgggccggtcttccatgtaagcgatgtcataatagctgatgtcctcggcaatggagcaaacgccgtcgatttccgccagcacggtcaccgccagtttttccgtcaccatgctcatggcgccaaaggtgctctgctgctggcgaatgatgtacacatagcgctcgtccccgctgccgcgcaccgcgctggaggcgatcagggaagtattggtctgcgcccggtactcgatggtgatgttcgtggcgttttgcaaaagcgaatacgcgccgcccatgtcgtcaatcaggccttcgtccagcgcgatgtccgcgtagcggttcccgtccaccgtcacgcccgtggaggccacttcgctttccagttcgcggccccggctggtggagaacgtcgccgccatgccgctggaaatgttcacctcgatatccgaaatatccgcccgcagcacgggcagggtttccagcgggcaatagctgtaggccgcgccgctgggatcgaagctttcgcccttcttcacatccacgctgacgatataaccgtccactggggcgcgcaccgcgcccagctccttttgcgccacgctgagggccagcatatcgctttccagttgggcaagcttatcgttcaattccttgcgctgggtgatataggtgcgcgtggcttcgggcacggaatagcgcgaggcctgctgcatggcctcttccgcctccgcctggctggccttggccgcgttccaatcggccacggcctgtttgagctcgtcgctggctgtttcgggagccgcgccgttttcgtccagatcgaggttttcataggccagcagggtttccatggcgatttgcttttccagcgcggcctgcgtagcgtcgctgagcgcataataggcctccgcccacagcgtgtccgtgcgcgaaaggcgggtggaaccgttggcctgctccagatccatcagttccatatagctggattcgtactccgcgcgcttatcgctcatggtcttttcgtaatcggcgatttcggcctcgaagatcacgtcgcccgccgccacctgatagcccggcagcacgttcaccttggtgacctgcagcgattgcccgctcgcgtccacgaacacctcttcctcctccaggaaggtaagctcgcccgaaagcgaaatctgctggcgcattttgccctgctgcgcgcgggtgatgcgcaccttggccgtcgcaatcgtgcggatggtgccggaaaagaacatgcacagcgccaccaccacggccagaatgaccaacccacgaatggcaaatttcttcgtgttcattgctgctccccaatcctttatttcagttccgtgagctgcacgcccatcaaaatatcctgctggaaatacaggtagataaacagcgcgggcaggatgtacagcgcggcgcccgcgaattccacgcccgagctattctccgtgagctggttgaacatcacggaaagcggcatcaggtccgcgcgctgggtgagatacgtcagcggttgctccaccaggttccagcaatccgcgaaggaaagcgccgccgccgcgcccagaatcggccggcacaccgggatcaccacgtggatgaagctgcggaacgtgccagagccatcgatctgcgcggcctcgatcagttccttgggcagccccaccatgaactgccgcagcaggaaaatgtaaaacggcgaaaataccgtgggcaggatgatggaccagacggtgttcagcaaccccagccggcgcagcgtgagcacgttgggcaccatcgtcacctggaacggcagcaacatcagcatgatgatcatgaagaagatgccgtcgcgccccgggaacttgaagcggctgagcgcgtaggccatcaaaggaatgaccagcgcctgccccaccagaatggctgccgtgtacatggcagaattcaccagcagccgcaaaacggaaacatcctcgatcaggatgttgtaatactggctgagcgagaacacttgcggcgcaagcttgatatccatccacacctgcgcgtcgtaatttccgcgcgttttcataaacgcctgaatttcctgcggcgaaaagaaggaatacagcgccgttaaaaacaccggcagcaggatgagcagtgccaccagcgtgagcagcgtgcgcgaaacgatgtgcgctttccgcctgcgctgcctgcgttgcgcgcgtgaaagccggatttgcgaattctgcatgcgccgtccctccttatgacaaattcttttgtaggttccgctgaatcaggaacagcaccccgaagagcgcaaacacgatcagcgcgaaactgtaggccgccgtggtaacgttctgatagttcagcttggagaacatgttgttcatatagttttgcagggtgtaaacggcaggatcgggatacgcgccgccgatgaaatacacttctttgaaaattttgaacgcgttgatccacgcgagaatgagcaccagaaaggccgagggaatcaccagcggcagcgtgattttaaacgcctggtagcggaaactcgcgccttccagccgcgcgtattcatacagcggctctggaatggcctgcagcgcagccaggaagatgatcacggcaaagcccaggttcttccacacgaacatcaaaatcactggaaagcgcagccacgcgccctccagccagttcacacgctcgccgcccagcgccaccaccagccggttcaccgggccgccaaaatcaaagaataccagccagataagcagcatagcggaggacggcatcagatagggcatcaaaatgctgttgcggaaaaacgcgcccttgggcttgagctggttgagcaaaattgccaccagaaaggagagcacccacaccagcggcgtgcaaatgcaggaaagcagcatggtgtttttcagccccagcaggaacatctcgttttgccacacgcttttgtaattgtcgaaccagacgaaggcgttcttgtagctgccatccgtaaaagaataatagatgccgctgataaaggggacgatatagaaaatcaccagccccagcaggcctggaagcaggtaaagcagcaccgattttttccgcgtaaacaatggttaagcctcccgtgccgccgcgcacatgcgcggccatgatggcgccgccgcgccagggattgtagggcttgcgcgcccattttgttagacgaagcaagaggaaaaaagttccaggagaaacacaaaaaatccttgtttgtagaaaaacgccgtgggtaagacaattgccatcgcggcagtattgcggtttgtcaatcccgccgtcgcgggcgctggcatgtttgttccaatccctccgtcgcggctgcgccgcgccacctccctttggtcccaaagggaggcttttgggcagtgctgcttcctacggcgtaccacttcccaaaaggctcccctgcgtagggggagctgtcggcgttagccgactgagggggcg

SEQ ID NO: 3513 - DNA, 2303 bp, Unknown
  16S sequences of unknown bacteria
tttgccacagtgtctgttgtaattgtcacatagactctgaacgaaccgcttctgtctatccctgtaaccactttgctcatatatatccctccgaattgtctgctcttaaaattaacacttaattatatcacattttttgagcattagaaacactaaaaaactcatattttcaaaccaatttccggacagcttctgtatttttctaggtgtttcacacaattgcaacacaaaaaagacatattctaatgtataatattaggtaagcagagattacaatagattaagacagattttaaggaaggtaacagtatgggagatttcaaagactcgatttacggcaacaaccctgaaacccggtcattcatagacaatctttacggttcaggcaataaggattacagcgccggagcagatacggccaatgaatatgaattcgtatcatcatatgaggaaaagcctcacaaaaagaaaaagaagaaaatgagcaaaaacggcaaaatcgccctgcttgtgtgtataagtataatactgtcgggagctttcggttttgcaggagctgcggtatataacggggtgtttgacggttcgcaaggcgggggcaattcgatttcaaggaccgacggctacacgcttgaagatgctacgggcagctcgcttacggtatctgaaatagttgaaaaatcagcagactccgttgttgagatagtgacagagtccgtagcaacagactcatggatgatgcagtacattacagagggcgcaggctccggagtaatcatagactcagacggatacattatgactaacaaccacgttatatcgggagcaagaaaaataacggtaaccttaagaaacggcgatgaatatgaggcaaagctggtaggcacggactcgacaaacgatgtagccgttataaagattaatcctgacggcaaggagcttacggcagcaacctacggcaacagcgaccagctggtagtcggagagatggcagttgcaataggcaatcctttaggccagctgggcggtactgtttcaacaggtatagtcagcgcgctcaacagagatataactatagacggacaggaaatgaacctgctgcagacagacgcttcaatcaacccggggaattccggcggcggactgtttaatcagtacggacagcttatcgggcttgtggttgcaaaatcctcaggctccgatgttgagggactgggatttgcaatccctgtaaatacggccgcagaggttgcacagcagattataaagacaggcggcaatgtcaattcgcagacggcttcaggcaatgccgtaataggcgttacagtagcaaacctctcaagccgcgagcttgcgcaggagtacggttttgatactcccggtgtatatatctctgcaatcagcagcatcaatgcacaggaggcaggcttccagataggcgaccgtatcgcaaaggcagacggcaggaagatttcagattacgatgacctgtcggcagctctgaaaagtcattctccgggagataccatctcggtagttgtagaaagaaacaacgagaaggttactctcaaaacaaccctgacagcctcatcagaaacagctaactaaattcaagatgtatatatatgaatatcccgcactcatcatcacaggtgaatgcgggatatttttatgccctaacccgacagattttacaactccaacccgattaatttcatattttcaacccgattgattttcattcttaaggcaaaataaaaaaagtggaaatgtacggaattgaaattcctatttccacatatcactttcaaggtgatttctttgaaacatacgaaaatatctacaagtcaatatttcccatattataaaaagatgcattactctgcatctcttcatttcatattatatttatacacagatttagtcttcgggtttgcttgcgtgctttattgctctgaccctttcaaactctacttcaaatctctctatggcggcgtttataacacgctctgccattcctgccgtatctatctgaagcactttttctgtaacctgcgctattctgtcctcaggcacattgtatagcaccatacagcatctgatatatcttctcagtttctgctccatcgtaaagtctctatcgcatggctttgccatatatcctcttgtaattcccgcagaagctatatcaagttcataaaaatctctgtcagtcgcctccggcataaactctctgaatataaatttgagttgatatttcacatattttaggaaatttaataactgttatatttgattatcaa

SEQ ID NO: 3514 - DNA, 3408 bp, Unknown
  16S sequences of unknown bacteria
cgtagaatctgccgaagagttcgtagaattcgaggcggaggacctggatgcagactatcatgccttcgaagcctattacgaagaggttgcctattatgaggattaccgggttgtagccggtggaggtttgtgctaacaggaagacgacgctcatcatgcctacatgggagagggcgaatgcgcctatacggatgaaggagatggtgttggtcaggaaggagaggacgacttcgaagagttcgaagaagttttcgaggacgaagtcgaggactgattcgggttcggtgttttttctgccttcgacgagtcttgttaagggttcgcggaggaagattacggcgagggcgaggacgatcagggttacgaggagccatgtgggggcggcgaattttacgtagccgagcatggcgaggactaagattactgcgcctgcgtacattatgagaccggcgagaccgttttgcgagaagaagattttgccggggtctttttgtctgatgccgttgattatgttcattaggatgacgaggatgatcattattgcgcctatggctacggcggctatcaggacggtgttgatgttttcgctggggttgaagccgtggatgaggtcttccatgccgaagactgagccgtagaagaagccgaagatgattgaggagacgccgacggtcatcaggactttgccgagggacattttcttgaggaaccacatgagggcaccgacgaggatgataacggcgccttgtccgacgtcgccgaacatcattccgaagaagaggaagtaggtgatcgcgacgagaggggtggggtccatttcgttgtaggacgggaggccgtacatttttacgaagtcttcgaagccgccgaggaagccggggtttctcagtttggtcgggggttccgcggcgccggtcgttttcgcgttctctaaggtgcaggtgacgccggggatggcttcgagctttttcttcaggtcgtcggcgtgggacgctgttacgtagccagctaagatgaagccgtctttggtgtgcatgaccttttttctgaggtcgaagacgcggtcgagctttgctaagatggtccgcttttcgacgaggtcgtcttttatgttgttcttgtagtcatcgagagccttttcggcgtccgcgagacgttttttgtcggattcgatttcgctcccgagagttgttattgcttctgccggcgtgccgtgggcgcgctccgaaattcttacgcgctcgaagtgcagtgactcgaacagggcgtcgattctgtccgctttcgtcttcggtgtgaagtagagtccccagacttctttcttctcgaccgaggacgcgtagaagaacatttcgttcagatccgccgtgtaggtcgagagattgtcgtagctttccctcggcatatgtccgaagcggaaacggaagaattcgcaggcgaatatcttgtcgaggtccgcgctcgtttcctttatgtggacgagctgtccgacgatgcgctcgtcttcgtgtattctttccgcgatctggtcgcgctcgcccgcgagactttttaattccttgtcccacgtgtcagcctttattctcgcgtcgtcgagaaatttcagtctctcttcgtcggtcgacggcatctttccgccggacattccgtctggtgcgttcaggttcaccgtgccgtcagtctttattccggcggcggacgctacggcgtctatctcggagagaaccggcgagtacgggttcgtctcactctgaacgaccgatatctgtctgccgcgcgccgccattatctcgcccgcgtcgtccatgtggaactccggctcggatatgcatgccagcatcgtgtcggcataagccgcctgatcgccgttcacgcttatcagttttagttttacaacagccatactttctttgcctttctatctgatttatgactatctgtaccggtgccatgatctttcacggcacattcacgctattaccgcgctttttatttcatcctccggcattccgtaacgcagtgcctcgaggatatagactatattgtcaatctcgaattttttcagcgacagcacgccgaggaccacgtcgaacgacggtcccgaattcgagtacttcttcgcctgcccgtaaagcagcgccgaaccgtattccccggtagacgtccgctcggtgaacatctctgccggcttcctgtaaagccccgcgaagcgcccgatcgtctccggaatgtctatctcgtcgccgcaaagcgccgcgatatccggctccttcagcttaccgaacgccggtatcagcatcggcaggacagccgtgaaatcgagcttcacccggtctttgccctctctcagcgccgcgaaacgacgcagacggacaatgcaggaaatattcataaggtcaatcttagtcgagatcatctcccggacccgcttccgctcctccggcgggaacaccgccgaatacttcgtcatcagccgtgtataataagcccggttaatctcagcctcaatccccgcgaacgacgtactcccgctctcaagcaccggcttcagtatctcatgatactcagtcccctcaagcgccgcgagtatctcatccttcgaatccgtccggaatatccgcacgaaatctatcttcgcgtgctccatgatgaacctcggaacccgatagaactccatagaatcatcatactcagtcgcccggatagcgtcaagcagataccctatctcatactcctcaagcagatgcccgagaaacttccgctccgcgcccgaagtgaacgtatacagcttcgcgtacatatttataacgtcagtctcaagcagcccctcaagccgcgcccggtgcaccttagccggctccacaccgtcaagcaccaccgaatacgccggagtatccttcagccaggcgacagcctccgcaagactcccccgcgacaccagcgccgcgtaatcatccttcgtaaacaaccgccccgcaagacaccgacacttagccgtaacagcgtcatacctgaacatccgcaacatctcccacaacattccggaatataagctcagcccactccgccgaatgcgccgccgatgcactctcaagcctcttcatctgctcgtcatgctcagcccgcaccgcgtcaagctccttcgaaagcacctcagcctccgaatcccgtataaccgaaatccgcttctcagcctctttaagatacttctcacgcatctccgaaagccgcctctcaacatcccgcggcaacgcatcccgccggtcagcagcttcctttactacttccttcgcctgcgcctcaagcttcaatacaagcccgagcacctgctccatactcatttcttccattttcttcttacctcagtttgcggggggaggaaaggacctttgaaaaggtcctttcctc

SEQ ID NO: 3515 - DNA, 18305 bp, Unknown
  16S sequences of unknown bacteria
atagcgcggtggctgatatccgttcgccttgtactccgcgagcttttcctccggtatcctgccgttctcgaacgccgggtctacgccgccgtagccgtattttatcgagaggcggagcagctcctcagccatgccgaagataatctgctttccacgtccgttgcacatcgggacaaagaagttgacaagtccgagggtcgcgagccctccgagcttctgtgacttctcgacgagaaggacgcgcttgccctcccttgccgcctggacagcggcagcgacgccgccgacgccgccgccggcgacgattatgtcgtagtgcgctttttcgaagatttcttcctgaagtatcatcttaaaatatcctttgcattaaataaaatatctgagcagtattttcgccagtccgtaattgtcgtcatacggcgggtatctcagcgggttcaggtctatcctcggcgaggacatcatgaccgacgactcattgctgaacgtgtcgaagcctgccttgccgtgatatcttccgaatccgctctcgccgacgcctccgaacggaaggtgcgggttcgcgagctgcatcaccgtgtcgttcacacagccgcagccgaaatcgaggttctcgagcaccatgtcgcgcgtctcgcggctcttcgtgaagagatacagcgcgaggggcttcggacgctttctcagcgtgtttataacgatattgatgtcgttgaactcgaaaaccggaagtatcggaccgaaaatctcctcggtcatcagcttgctgtccttcctgatgttctgcatcagggtcagccctatccggcagttctccgcgctgacgtcgcctccgaagattatctcgccgtcgtcaaggtactttctcagacgctcgaagtgcattctgttgattatcttcgggtagaacttgttctcgcacggcgagagcgagcagaacttatcgtgatagtccttgacataaccgagaaattcttccttcacgctcgagtcgacatacagatagtccggcgcgacgcaggtctgtccggagtttatcagctttccggcgacaatgcgcttcgcggcgagtttcaggttcgcggtcttgtcgatgatgcacgggctctttccgccgagttccatcacgaccggggtcagctgggtcgccgccgcttttgatattatgcgcgcgactgtgggtccgccggtgtagaagaccatgccgaacggttcgtatcttatcgccttcaccgcctcgaaggaatccgtgtacgccgcgatatattcacggtcgaaatacttgtcgatcaggtagcagagcagcttcgtcgtgtgcggcgagtgctccgagagtttcagtatcgtgcagttgcccgcggcaattgacgagataagcggctgcattgtcagcaggaacgggtagttccacggcgaaaagatcattacgagcccgcgcggatggctgagcttgcggctcgacgccggccagaggaagtacggggtcgcggtggttttcggcgaggtccacgttttgaggtatctgagcgtgtggttgatttcctgttcgaccatgcctatttcggtgaggtagccttcgctgaacgacttgccgaggtcagcccggagggcttcgagtatcagtccttcgttgtcgcgtatcatgaagcgcaggtttttgagaagcccgcgtcggaaggtgacgtcgcgcgtcttgccggtggcgaagaactcccgctgagcggagatgatctcgcggagcgcggggtcgagcgttttctgcgcggttctgccgttatcgtttggtttttcctgaagtgacattctgtgccctccataaataatgattctacttctattatacaccaatcatagggtaaaagtcaaccgttatccgtaaaaatttcaaaaaaagcgggagaccggtaaaccctttctcccgcacagttatttatcgaagatggatgtttgatgtggcagagccttcatccgactgtagccgaaacattgactatcgggtccaggggctggcccctggttagtccatgccttttttgacgttttcttctgcttctttctgaagctcaggatcgtaagagtacatcggctcgatatccttgccattgatcttgcggttgacgaagttcttcgttatctttccgaccagcggggcgagggtgaggacgcctatcaggttcgggatcatcatgcagccgttgaaggtgtctgagatgtcccatgcgagggaggaggtcatgaccgcgccggagatgatcaggaggacgaagatcacgtgatagactttgactgctttctcaccgaaaagatactctacagccttcgagccgtactgcgaccagccgaggacggtcgtgaacgcgaacagcaggagcgctaccgcgacgaacatttcgcccggacggccgaacagattgccgaatgcctgcgcgacgagtgtagcgtcgtttacgccctcaaccgcgagacctgtctcgagatcgatgaagccggaggaaagaactactacagctgtcatggtgcagactacgaaggtgtcgaagaatacctcgaaaatgccccacatgccttgctttacaggctcgttgacgttcgacgcggagtgaaccatgaccgaggagccgagtccggcttcgttcgaggagacgccgcgcttgcaaccctgggtgatgacggtcttgatcgcgatgccggtgacagcgccgcctacagccttgacgccgaacgcgaagcggaagattgacgcgaacaccgcgccgacctctgtgatgtgcgcgaagaagactatcagcgcgcctatgacgtacagagcagccatgaccgggacgagtctctcagcgacagccgcgactctctggagaccgcctattatgattaccgccgcgatgatcatgagcgcgacgccgatgatgatgtttatgatcgatatgccgccgatctcgggcgcgtctactccctggaagaacgccgagtggatgttcagcgtgattttgttgatctgacccatgttgccgataccgaaggacgcgaagatacatacgatacagaacacgaccgcgagcaccgcgccgagctgcttgcagtgcttcttcgcgccgagaccgtccttaagatagtacatagcgccgccggaccactcgccggcggagtttctgcgtctgaaatagataccgagcacattctcggagaagttcgtcatcattccgaagaacgccgcgagccacatccagaacaccgcgccgggtcctccgacgcatattgccgccgaaacacccgcgatattaccggttccgatagtcgccgcgagcgccgtacacagcgcctggaactgcgatatcgtctggcggttggtcttctttttcgcgccgccttccttcgtgaagatgccgccgatcgtggctttccaccacgtcttcaggtgtgatatctggaaaaatttggtgacacaggtcatgatgatgccggtgccgattaacagcacgagaccgatcttcacccagatgaagccgtttatggcgtcgttgatctctgtcagcttgtcgaagaagttctgcattcttttctctccttaaaaattggacttaaaaaagcgccgtcacccgacagcgccctgaaaaataaaatactaaaaaatccgcgtccgacagaaatcgggcgaatctcgtctccgtacttttgcctgagagattggcggggaaaaacaccgctttgcaccttcggcacccactccgttgtgggattctccagagttccctccgcgctcagtttcgaaaacagggacgcacagtattgtacgcccattccctgtccggcgggctccgccatggaaccatccgaccgatcctgagaacttcatcggggtatcgctttattacactaaatactataacacattttcttcacattgtcaagggctttccgcaaattttggcgaattaacgaatattttctgacgattcagcattatttgcggtttcggagcaatattacacaatagtttcgccggagttcagaaagacgcgaaaaagcacggcttgaaattatgcctgaccgcgcgccgcgaaaacgcccgtgtgttgtcaaaacgtcgaaaattgttatggacacaaattatgccttgacacgggaatgccggtgtgctataatattatcgtgagataaaaatctcgaaaccaaggatgaaaggcaggcggctcgtgatggactacggtcaacgaagcgatatacacatacggatgtcggaacggtggacatgcggtcatttttcgcgcgcctgtgaaaagtcaaacagctgacgcggggtgacttatgcttttatgccgtcgttctgactgacaaaggtcatgacgatggtttttttgcgcccttttatcctataactatagaacaaagagaggtgagaggaatggacgcgggaagtagtggcggtaccggctctgtcgggcgaagttgtaccgtctttcacagcgaggacgtaccccctccgggtctgttcctcaacaactgaataatggtatgtcttcattttgcccacgtgtgactatcgcacggtgacagaaacagtgctgtaccctttccacaataccggtgagagccggcggcggtaacacgcctggaataacatctattgtcaggcttcagaaaagccaataaagaaagagaggtacacaaaatgaagaacatcaagagaagaccaaaaaccgcggcagaatcgctcatcagaacagatgacgccgcaaagagactccttttcgcgacaacctcggaagcatctgacgtcatcgggaaatacggcgcgccggacggtctcaccgacgagatggtcgaaaagtcccgtgacgagtacggagaaaacgtcctcacctacggaaagaagaacccggtcgtcaagcggctcgcctcggcgttcataaacccgttcaacatcgtgctcttcgtcctcgcggtgatatccatattcaccgacatcgtgctcgccgcgccggaggacagaagctacgcggcggtcatcatcattttctcgatggtgacgatctccggcatcctgcgcttcgttcaggagacgagaagcggcaacgcggcggcaagcctcaccaagatgattcacactaccgcaactgtagagagaaatggtgtgcgccgtgagattccgctcgaagagctcgttgtcggcgacattatctggctcagcgctggcgacatgataccggctgacgtgagaattatctctgcgaaagacctgttcatcaaccagtcggcgctcacgggagagagcgagccggtcgagcgttacgccgtctccttcgcggctccggacagcctgacgagcgcggaaaaccttgcgttcatgggctctaacgtcatcatcggcagtgctaaagctgtagtgctcgccaccggaaacgacaccatgctcggcgccgtcgcgaagagcgtcggagcaaagccccctaagaccacattcgaaaagggcgtcggggctgtctcgtggatactcatccgcttcatgctcgtcatggttccggtcgtgctgttcgtcaacgggttcacaaagggcgactggacgcaggctctgctgttcgctatatctgtagcggtcggtatgacgccggagatgctcccgatgatcgtgacgacgtcgctcgcgggcggcgcgctcgctatgggtaagaaaaaggtcatcgtcaaggacctgaacgccatccagaacctcggctcgatcgacatactctgcaccgacaaaaccggcacgctgaccgaggacaaggtcgtgctcgaataccacctgaacgtcgacggcgaggaggacgacagagtgctccgccacgcgttcctcaacagtttttttcagaccgggctccggaatctcatcgatatcgcggtcatcgataagcagaacgaaaagggctcggaagatataattgaccgctatacaaaggtagacgaaatccccttcgacttcgaacgccgccgcatgaccgttgtcgtgaaggacaagaccggaaagacgcagatggtgacgaagggcgcggtcgaggagatgcttgactgttgcagctttgtcgactgcaagggcggcatacacccgcttgagaacgagacgagggactacgtgctccgccgctcggatgagctgaacgataaaggaatgcgcgtaatagccgttgcccaaaagaccgacccgtcgccggaaggacagttctccgccgcggacgagaaagacatggttctgataggcttcctcgcgttcctcgacccgccgaagaaaagctcaaaggacgctataaaggcgctcagggattacggcgtcagcgtcaaggttctgaccggagacaacgagaaggtcacgacggcgatctgccgcgaggtcgggctcgacacgagacacatcctgctcggttcggacgtcgacaatatgagcgacaaggctctcggggacgaggctgagaaaacgacgatattcgcgaagctctcccccgccgggaaggaacgggtcatccgcgttctgcgtgagcgcgggcacagcgtcggatatatgggcgacggaatcaacgacgcggcggcaatgaaagcatccgacgtcggaatctcggtcgacacagccgtcgatatcgcgaaggaatccgcggcggtcgtactgctcgaaaaggacctgacagtcctcgaggctggcgtcatcgaggggagaaagacctacgccaacatgataaagtatatcaagatgacggcgtcctcgaacttcggaaatatgttctcggtcatgatagcgtcggcgttcctgccgtttctgcctatggcgtcgatacagctgatactgctgaacctgatctatgacatctgctgtacagccgtgccgttcgacaacgtcgacccggagtacctgaaggtcccgagaaagtgggacgcgtcgggaatcagccggttcatgctctggatcggaccgacaagctcgctgttcgatataataacctatctcgtgatgtattttgtcgtctgcccgatattcaccggcgggatcacctactctcacctgaccggagaggcggcgcgggatttttacaccgcggtgttccagaccggatggttcgtcgagtcgatgtggacgcagacgctcgtcattcacatgatacgcacgccgaagattccgttcgtgcagagccgcgcgtcgacgccggtgacgctcctgaccttctgcgggataggacttgtgacggcgcttccgttcctgccgttcgcgcccgcgctggggcttaccgatctgcccggagtgtatttcgggtggctcgcggttattgtcgccgggtatatgctgcttgctacggttgtaaagacgatttatgtcaaaaggtatggtgaactgctctgatggatgattatcaactataaaaggcttcctttgcgggaagcctgattttttttatctggattcgtagtactcgtcgagtttgtatacgtcgctgtagtcgtactctatgagctcaattgacaggaaacgcgagcgctcctgattctgtccgtacctcgaccgcacttccgtgtatggatattcgtcatccggcaggacggtgagcttcagctttgccgttatcacctgcgttccgtcaaggtcatatgtgcggacgttgatgaagtattccctgtcggtcagcgtgtcctgcaagactatctcggtcgcgttcgtgaactcgcctatggggcagacattcaccgcgaaaggcggcagggcgcggaaggcgttctccactatccatttcgtgccgagacccggattcatcgggtcgtcaaggctgtgcgcgagccgtatgcggtcgtcgttcaaagggtcggtgtcaacctcgataaccccgtcacagtcgagccagatattcaggttgttacggtaatcgtagccgagaggagctaagacgcgcggcttgttaagttcaaggcgttcgatgctgaatacttcgtcgttcgtgtattcttttccgtcgtccgagacccaatagccgtggtttttatgcacgcttgtggcgtcgtatgcgaagtagcctttcccttcgaggtcggagttcagcacatacgcggttatcttcagtgaatccgccatcctcgcgcccagatcctcccgctcgttggagcaggcggcaaagctcatcgtcagagcgagcacagcggagagtataagtcgtctcatcatgacacctctttcccatagtactcgtcgagtttgtagacgtcgctgtaatcatactcgatgagctcgattgacaggaaacgcgaacgctcctgattctgactgtacggcggcgaatatatctcgctccacgggtagccctcgtccggaatcaccgtcagcttcagcttcgcggagattatctgcgtgccgttgccgtcgtatgtgcggacgtttatgacatattcgcggtcggtcagcgtgtcgcggtgtccaacctctgtcgcggggctcaggtactcgccgatcgggttcactatgaccgtcaccggtgctgtcgcgcggaaggcgttctcgtctatcttctcgccgagccacggttcctccggagaatcaaggctgtgccgcagacggacattctcgtcgccctcatcgctcaactctatctcgactattccgtcgcagtcaaaacgtatatttatgtgctcccggaactgaaatcccatcggcgcgaggacacgcggcttgttaagctccagacggtcaagcgtgaaggcttcgtccgcggcaatctcttttccgtcgtctgtcagccagaagccatagtcgggcgggtcggggctgtaggtgaagcgaccgtttccctcgagggattcggagaggagccatgtactgattttcagggaatcgcggatgtcatcttcgttcaattcgttttcagattgaccgcaggaaatagttaaagcgaatagagccaaaagtaaaaagaagcatatgttttttttcattgttttacttacatagtatgccttgcagaaaaatccacaaggcatactatcagttctctctatcagtggttatgcgggcacggacaataaatacccgtccatgtatcaaatatcttaccgcacttcgggcagtaagtctgaactgtagacgtgcagtcctcgcctgacttaaagtagtcaagaattctctctgctctcccggcaaacctcgagcagcaaggcgtgtacgccgcggtctcttcaatcgccgacgcggaaaggattccgcaggtaacgatgataatcaccgcaaggataagggtcacgagtctttttgcgttcatgattctttcctccatgaattgttttttgtattcgtctttatttggcgcacaggcttaaacggtcatgcctgcgcgcggcgttgaatacgtttcatgggatattctatcttccggatcaggtcatagtccggaatgctggtcgaagcggcgtgcgcttcacatttcggaaacatagccatatcctgcacctccattcataatccgactgatcccacggactctgacgctgcccctttcttagttgctctacgtctttctgattacattatatcatactacgttgaggttgtcaatacaaaataatcaaaaaactataatttgtcgttttctacaattgcaatttacaaatttgtgcaattacgccaatttcaatcccatctctccccttgaatctctctccagacctctttcagctcgtccttcatccgttcatattccggacaccacttcctgacctccgcccagaacgccgccgagtggttcatgtgcctcatgtggcagagctcgtggatgatgatgtaatccacggcttccctgtccgccataaccgcgtaccaagtgtagtttacgcttcccctcgacgagcaggagccccatcttgtcttcgccgagttgaccttcacagccgacggtttcagccccatcatccgcgcgatttcgtatgtcctcgcggtcaggtagttcctcgcgaacagcttgtatgcctgaatcaccgcccggcgcagattctctccctcgaatccttccggaacatagaacgcctcattgtcgtacgaaactgtcatctccgggtgcgtgcgtataattcttccctctccgagacacctcacggtatcgccgattttcagctcaaagtccccgcggctctccatcagctcctcaaagctcttcgcgtgctcatctatccatcccgcgtaccttccggctatatgtctcagctccatgtcggttatgaaggttggaacgagcagctccggcacgccgtcccccgctacacgtatgcagacggtctttctcctctccgagcgtatgacgcggcattccctgccggatatctctgtcatttcagtcagcatccggatgcctgagcctcctcgaaaactcgcagccgcagaagtcctgcctgtagagcgaatatttatgtgacagctcaatcgagcgcttatacccgttcctcttcttgaagtcggacggaagatatctgacgccgtacttctccgccagttcgaagccgatttcgttgagcttctccgcgttcttgtgcgggctgacggtcagggtcgtcgcgaaatagtcgtaccttcccgggtgctcagccatgtatctcgcggtcttctcgaggcgcaggcggtaacagtcaaagcatctcgctcctccctcgggaaggctctcacgcccctcggaaaggctctgaaagcgctctgtctcgcgctccgggtctatgactgtgattttcctttcgtgcggcatcatggctgtcaggcgatacatctcgccgaggcgctttccgtactcctccccgcttgttatgttcgggttgtagtagtaggcgtcaatgtcgaaatatgatgtcagatactcgagaacatagctcgagcagggcgcgcagcaggcgtgaagcagcagtcgctcgccgcccgtcagaccagacagaatccgatcggtttctgtctgataatttcttttatttattttcaaaacagtattgaagtccggcattttttgtgttataatattattatcaaagttttgtgaaaggatccggcaagagaagtgaacaacagcggaggaaaccgtggacagcgtcccccacagcaatacaacagacaacagaattattcccgtcccacgtcaggataccgcccgggcacccacgaaacaggcggagtgagacagaacccgtaccgcatgacgccgccgaagccgaagaagaaattcccggtgatacagctgatagtctgcctgatagcggtcgccttcgcggttctcttcgtgtcgctcgtctgcatgaattacaaaaccgactacggcgagacggtgaagcctatcacaagcaccacggcgtgcgaggacacagcgacaatcgagagcctgtcggtcagcgatattcccgagacgaccgtcgagacaacagccgagacagagccgccgctcccatcggatgagtacgacttctcgtctgtcgttccggagagtgaggaagaacctttagaggtcttcgcgaaagcggcgttcatcggggactcgagaaccgtcgggctcatcaagtacacgaagctccagacgcacgactactcgtcggtaggtctgaacatcggcgtgctcacgacgaagaaatatatccgcgtgagaaacgatgacgacagcttcacgaacatgaccctgctcgaagtgcttgagagggacaaggacgacattgactgcgtctacatggcgctggggctcaacgagctcggctgggacccgaatatgtatatcaagacctacacgaaggtgataggtcagataagagagatcgtcgacgtgccgatatacctgcaactgatactgccgatgacggacgccgcctacgaggcgtcagagttcggcgtgacgaacgacgaccagatcatattcaaccagaagctgacgaagatggcggaggacctgaagcttttcctgctcgacccgtgctctctcttcgagcttgaggacggaacgcttgacccggcggacgcctcggacggaatacacctgaacgccgcgtcgtatcgggtgcttctgaactactaccagacgcatcgggttgacgtctcgaaatataagaatattgaaaccggtgaatgaacccgcctcggagaaccgcaaggttctccattggaaaccccttggggtttccttgaccgcttatgagacattgtcttgtgggcggtttttctttcgcctgcacacgagaacacgatgatcacggctttttccaaaataccacaccccccataaaaaataaattccattctctgtactttttcactctttcagggggggagaaacaagcgtgtaagtcatgctgatcgcgcaagtggttttctcttatcaagcttatggttatatctgccttcattcctatgtctgagcgatatgtccggaacgggcgtccattggacgcccctgcaaagattgttcgttgaccatagattatgcgttgactgaagattgtacgttgaccgaagattgtacgttaaccgaagattatacgttaaccgaagatggtacgttaaccgaagatggtacgttgaccgaagatagtacgttgactgaagatggtacgttatcggacgatggtacgaaattcgtacgactaacggttccgctcagataaacaatctatcgcaaacctcgctgtggcaacggtcgcccgccttcgaagggttatatctacctttcataagatttcaagtgaacagcagaaaagataagagtaatttattttttatggggggtgtggtatttttcaaaaaggcgtgtacaacgtgatctcgtgtgcaggagctccgcagggtctgaccttgcggttctccgaagctcgccccatcgctctcaagccatcacctgtgcatccagattcacctgtgtgcatccagattcacctatgtgaatccagataattctgcaatataatctcagccgacagcgtatcaaccgccgcctttctcttcttccctctcgtgtcggtcatgttgagtatctgatgagccgccattgtactgcacctctcgtcgaccatctctatcggtatctccccgacccgctcggaaaggagggagacgaactccctcgcgtgctccgctctcggtccctcggtgccgttcatgttcaccggcagacccactattatcttctcaaccttgtattccttcgccttctcagccacgaggtcggcggtcttcacgatatacgtcgagttcacatacccgatgccgttcgccagcatcccgagcgtatcgctgaccgccagccccgtccgcgcgtccccgaagtcaaccccgagtatccgcggcttcaaagcctgattcctctctcgcgcatgaactcctcgacctcatccgccgtaggaagagaggtagaagctccagccttcgaaacaacaatagtaccgacagcgttcgcgtacctgaccgccttgacgatgtccccgctattcatatactcaagcgtcagagccgccgtgaaagcgtcgcccgccgccgtcgtgtcaacgacaggaccctcataggtcggcacaagctgtgagaacttcccgtcatgtatataagccccgcgcccgccgagctttataacgacatatttagtattcaccctgcgcataagctcagtcgccgccttcaggcaattctccgagttgttcggcaatataccggtcagcgcgagcgtctcgttctcgttcggcgatatcacctcaagcgcgccaagcttatcaagcgggtaatcctccctcgccggtcccgcgtcaaggaacaccggaatcccacgtctcgccgcgaacttagtcgccgcgataacagcctcgtccggtatctcaagctgaacaaacacagcgtccggcagacaagtcatagcgtcctcaacgtcgtcctccgaaaggctcgagttagcgcccggataaaccacaatgcgattattcccgtcctcctcgacaactatagccgcaagaccagtaggaaccccgcggtcaaacttcataaaccgcgtgtcaatcccgttgtcaacatacagctccttaagttttctcgcgttctcgtcagtcccgagccgcgcgcagaacacgctgtcagccccaagacgagccaatgcaagcgccgcgttagcgcccttcccgcccggaacgtaatcatagctccggctctcaacgatagtctgcccggcttccggaagcttcgccatgcgcatcacaaagtccatattcgcgctgctgactacaagtattctcttcttcatttttttgacctcctgttattgttagcttgcaggggagaaaactttttcggagaaaaagtcttctcccctgcacccctttttcaaaaagctttatacactcaatactcaaacgcctgtccgagcgcttttatggtaacatgattgaaatcgtcagaagacctctcacaatgaccgacaaccttcgcgtccactccgaacgacttcgcggtcgtgatcatgtactccgcgtcctcgggcgagcagtatatctccatcctgtgccccatgttgaagtcctgatacatctcgcggtcggatatgtcagaattctcgcggatagccgcgaacagcggaggcatcgggaacaggtcgtccttgatataatgtatctgtctgccaaaattcttgcacttagcctgtccgccgcccgtgcagtgaatcataccgtgcaccgcgcttctcttctcagagagtatcctcgacagcaccggcgcgtaagttctcgtcggcgagagaatcgcgtcaaccaccggcacgtcagtacccggaagaatatccccgaccttatacttcccgcagtaaaccttcgatatgtcgatagtatccgaataagtctccggatatttctcagcgtactcatgcgagagaagcagatgacgagcggcagtaagcccgttcgagcccatcccggcgttgtatctcttctcgtaaaccgcctgaccgaaggacgccagccccacaatcacgtcgcccggctttatgttgtcacagtcaatgacgtcagacttctttatacgcacgaagaatgtagagtcagcgatgacagtctgaaccaagtcgccgacatcagccgtctctccgccggacatcgttatatcgaccccgtaccgaccgagcatttccgtgaactccgtgtaaccgtcgatgacagcgcggatagcctttccgtccacccggtgagcgttgcgcccgatggtgttagacagtacaaaaccctttgtagcgccgatgcagagcagatcgtcgaggttcatgacgaccgaatcctgcgcgatatcatagaacgccgagtaatcgcccgtctcgcggtactttatataggcgagcgaggactttgttcccgccccgtccgcgtgcattgccgcgcagtaatccttatcgccgcacgggtcctcgataagcttgcagaacgcgcccgggaaaactcccttgtcctgcttcgatatggcgctgtgcacctcgtcttttgtcgcggaaacgccgcgtgaagaatacgcctctgacataatttttactcctttattataattcaatctgctgtgccgacttgatgttcgggtaacaggtgatatcgagaatacgctggttggaactgccgcggaagtgaagattcaggtcgcggagctcatttacgtaccgtccgtcaacaagatagttcgtgaccgtgagaagctcctttaccgacggctcggtctccgccttttgcagaagatgctcatacgtgaatccggtgtaggtcataacgtcaagccccttgtcgcggcacttttcggcgagaaccgccagctcgtgcccccagagaaacggttcgccgccgctgaaggttatcccgcgggtgagcggatatttctgtatgtccgcccatattttgtcggttgtcgtcagcttgccgccggtgtatgagtgcgagccgggattgtggcaccccgggcacctgtgcgggcatccctgaacaaacacgacgtatctcattcccggtccgtcgacgatggaatcccgcacgacgccgaaaagccgtatcggcaggctctcgatagtcccgccggaatcaaagctccgtctgagcatttataactccttctctcatcagaattcgcccatgacagcgaaaatcaccgaaatcacggtcagtatcaccgcgaagatgtacccgccgacgattcttacgaactcgttctttttctgcatacccgcgtatggctcggtcctgtaggcgacagtgtcgacaattgtcatagcccacacgccggcggcaatcaccggaagcgtccagaccgccggctcctccccgccgaacacgagcacgcacacgacgaaaacgagcagcacgcccgcgataataagcccgataagtctttttcccttcatcatcagtcctcgtcctcactgtctttcttcttgctcagcagtacgacggtcatgacggtcgcgaccgcgacaagcagtccgccagccatccagagataggtcgagtaacccgtgacggtatccggcgagcgccttttagcccgcgcgtccgcgacgacgctttcaagcgactcatccgcgaaatcccggctgtagccgacaatatccctgaccgacagcttcgcgtagccgacattctccgctccgaccgagattctgatcccgtcgatgttcttcgcgcagtcgaacgagccgacgtcaacataaatagtcgtccactcgcctgccttcaccgtcgcgtcggagattatcatgtcgtttccggctgtaaacgcaagtctgagcggtatctcatcgacgctcccgaccgattcctcgtcggttatgtccgcgtctgccgaggctccggaatctgtctgaacatttccgacacgaagtgtaaccgcaacaacgggtgtcagcgtgtagtcgtccgggtaatcgaacagcgtctgaatccccatgcgctccgctccgccgtccccgccatacgccgccctgtcgagcacagccacaatagccgaagccccggtaggcgacgcgacgtttgtacaatacggtccgaccccgaacccgagcgtgtcgcccggcgtcgtgaagcggtaataggcgtaagagcctttcgtcccgcccggaagctcatataccgcgtccgccgtataatcccgcttgaccggaagcttcttcgcgtcgaagtttgttatgacctcgttccatgaagttatcccgagcatagccagagccccgccgctgagcgtcagcgaatccggagaatccagcccctttatataatccgcgatgccgtcgagcctgtcgccgccgtaaacgacaacgatatacgcgtcaatccggtcgtcaatcaccgcgcggtagtagttttcaaacatatactcgcacatctcgccgagagttatcttcgggaagtcgaaacgggagtcggtgaaaataaggtctgtctcagccttcctcgtcccgagacgagagattatcctctgcgcgtcctttgtcgagacgagctctccgccgttatcgagcctgtagaaactctcgaccgcgatgccgtagcggaaatcgccctcgcgcgaggtctcacgcgccagagcgtcgaggtactgctcaagcccgatctcgctcgttccagccgccagcgtcaccgagtacatatcagtcaccgacgcgtaaaccttcgccgaggagttcacagacataagctcaaacgcgacagcgcgtatatcctcagcgtcagacgccgcgagctcagtcaggtttttgaacccgtcgccgcggtcatagaagttgagccccatgccgagaataacgccactgacatcaccgcccgcgcaccatttctccgcgatataagccgccgccgcagcgagatacctgtcccccgccggagcgtcatcgaacgaataactatactccgcgagactgcccccggaaaagccgtcaaaaccggtgagccttatcagcacgtcagcccccgagccgcgcgccgccgaaatcatcagtccgagccgccgtgtctcgtcgttcctgaaataatacgaagccccgccgtaggtgaacttctcggtcgcgccggtcccggagtaaagctcatccgccgacgtctcaatgatcgttatgtccgccccgagctcgccgagcctcgagatatcgctgaccgcgacgcccttcttcccgccggaaacagccgaggacgaagccgcgaaacgctccggattgtctatatatctcggaagtgcgatgaaatacgcgctcccgtcggtgtgcctcgataccactacaaacctcgagcgaaggatgctgtcctgctcaagcttgattgtcaggtcgaatttggtcgtcatcggactt

SEQ ID NO: 3516 - DNA, 2478 bp, Unknown
  16S sequences of unknown bacteria
gtcccagggcattaccatcgacacctgccgctgctttttcaaaacggaaaagcgccgctatattatcattgacgcgccgggccacatcgagttcctgaaaaacatggttaccggcgcttcccgcgccgaagcggccctgatggtgatcgacgcctcccacggcgtggaggaaaacacccgccgccacggctactatctgtccatgctgggcatccggcagatcgctgtgctggtgaataagatggatctgatcggctatgatcagaataaatatgaaacgatctgtcaagaatatactgcattcctgaaggaaatcggcattgtacccaaaacatttatcccagtttccgcccgggtgggtgacaatatttccgccccttccgacgaaatgccctggtatcagggcatgaccgtgttgcaggcgctggacagttttgaaaatatccagccgtctcatcaactgcccttccggatgagcgtccaaggcgtatacaaatttaccgccggcggcgacagccgccgcatcatcgccggcactgtggattccggcgtgctgcacaccggagacgaagtagtattttatccctccggcaaacacacccgtgtgaaaggttttgaggtgttcaacgccgccccccccgcggaagcgcgggcggacgaggccgtgggcttcaccatggccgaggaaatctatgtccgccgcggcgaaatcgcctgccgcgccggggaaaatgcacctcatgtggctgtgcgcttccgggcaaacctgttttggctgggccgggaaaaactccgccctggaaaggaatatcacttcaaatgcggcacccagaagcttcccatgcacttgctgcaagtggaacgggtgatcaacgcctcaaacctgaactgcgaggaccggcagtgggtcgagaaaaacgaggtggccgtgtgcacattccagcttgcttcccccgcagcctttgacaccaccgataaattggccgccacgtcccgttttgtcattgtggacgactatgagcagtccgggggcggaattattgtggaagccctggaggatgaagattacgaccgacggaatatccgcaccggagcaggcgctgtggacgaagccgagcgccgtgccctcactggccaaaaggggcttgtggtgtggttcaccggtctctccggcgcaggcaagtccactctggctgcccgagcggaacgccagcttttggctgcgggcgtccccgcgtttttgctcgacggcgatacactgcgcaccggcctgtgccgtgacctgggtttttccgacgacgaccgcacagaaaaccagcgccgtgtggctgaggccgccctgctgctcaaacaggcgggccacgtggtgctggtaagcaccatctcgcctatgcaggcccatcgcgactatgcccgcgcacgcatcggcgaggatttcatggaagtgtatgtgaaagccgatctcgccacctgccaaaagcgcgacccgaaaaaactctatcaaaagctggccgcagacggtattgaaaacttcaccggcgtcgattccggctacgaagcaccccagcacccggacttggtgctggataccatgacggaaagtgaagaatactgcaccggcgcgctgctggaggctgtggccaaaaagcgcggctgagtcccccctatttcgataagaaacggaaaacgaccttatgtttgaactgttcatatgcatcgccgccagcttgggcgctggtgtcacagcgggtttggccggcatctccaccgccacagtcatttccccgctgctcattgctctgctgggctttgacgcatacgaagctctgggcatcgcgttggctgcagacgttttatcctctgcgctggcggcagtaacctacgggcgtcaaaagcacattctgtataaaaagagcctgctggtgctgatccctgcagcactgttcaccttgttgggcagctatgtgggctacagcgtgtcccggggatttctctcctatctttccttgattggcatgatcctcatgggcgtaaaattcctgaccaaacccgtcaaagaagaaaaccagcccctgcgttttgtcaattcccgcccccgcgaagtgctgtgccacctgggtaccggcgtcatcatcggttccatctgcggcttctgcggcgtgggcggcggcatgatgatgcttttgattttcactgtccttctgggctatgatatgaaatctgccgtaggcaccagcatcttcatcatgactttcatcgccgctgtaggcgctgtgagccattatgcctttatcggcactgcacaccatataacggcactggcggtgtgtgttgtcaccacgcccattgccgcagtgatcgctgcacgctacgccaaccgggtaagcaaccgggttctgaatctggctgtaggcgtctcgctttcaatgatcggcgcgctcctgctgttgattcatgccttcggataacccgcaggaa

SEQ ID NO: 3517 - DNA, 32759 bp, Unknown
  16S sequences of unknown bacteria
tatttgagatgaattttcttctttttttgttacctatctattgtaccataacattcgttttacaagatttatcgcgcttttcggatattttcaattttcccttgaaaatttgccgattcggggctataataatattataatgatatagaatgaaataaggaggcgcgaatatggaaaacgatgcacttgccgccggagtttcccgcataggcggtcttttcggcacagcggatatacgaatacttatctgctatataatttcatccataggcgagcctgttcccggcagactgttagccgatattttgcattatgaaggtattgccaactgctttgaggttaacgattccatagccgcgcttttgaaaaacggtcagctctcgcttgtcgacgagtgtgacgatacctacattgccaccgaaagcggtaaaagcatcgccgaaacactcaaaacctcacttgcaataagtgtaagggacagggcgtataccgccgcgctcaaaatggtcgcgcgctttaagaatgcaaaagaaaacgacattaaaatttcaaaggaagacggcagaacatttataacctgctcggcaatcgataacggtcaaccgtttatgacggtaaagctgcttgttggagacgaggagcaagcgctgtttattaaaaaccgttttttaaacgacagcagtatatattccaaaataatagagcttttaacaaaggaataattttaagcagcaaaacatcacgccgcacccgtttgatcggatgcggcgcggttgcattatttcaaatcatattttaacctttttacggtattcatcataatccctgttccaaagagaaaagctcttgtcggttcgacggtcggtgagctcgtaattgcgactcaaataatctcctaaaaacagtgtgcattttctcgcgccgcggttgttgaggtggttgccgccgtcgcgcgtgtcggtcttccagttaaaatcaaaccgcgcgcggtctatgttcatatcgataaaaggaatatcgtaagctgcggcaaattcctttaccgcgttgtgctttcggtagctccatgagctttgcgaaggcagctctaacagtattaccttaatgccgtttgcgcggcaggctttaataaaggcgttagccgcggtttttgcggcaagcggtatttccgctttatctttgcttttaaccatatactccccgcccatatagccctttacatcgttgctgagccactgacccttgggtgcgcagtgcgctgtaaaacgcggctttttcaaaagctcatcgggttttactcttttccagcgatcgtgatactgaaaaaccgaaaagcaggagccgagcgaggtgtttataattttcgcggcgctttccaccacctttgattttgtaaaaaagccgtcggtctctaaaattaccaccttaggcttgtggcattttaaaatatcgttcagcataacatacgcctgcgccacggtctgtcgcccctcgccgcttacatatgacgtgtagccgtaatttttccaaagctccataggcgaaaagccgctgtatgcatcggaattgcctataacggcaatgtcaattgtatttttcggttcggagtaaaagccgtgggcactcggatttactatgcctgcctcctttgtgttatccttaggggcaagcatatatgaaaacgacaccaccgaaagtataagcacggcaaaaaagcttaccgcgcgtataaggtttttaacaccttttttcataaaaaattacctcttaaaactcagtctgtcgaaaaagtcgacacgctcaaaactgtccgtaaataaagtccacagcctcatagcctatgccgtaagcgccgaagattataaccgaaagcacgagcgccagatacaccgcccagcgcacgggtaatgcccactgcgctatgctttcccttatttcaatgcccttttcctgcaaaatactgacggtgaaaattaccgccgcgcctatggcggttataagaaaatccgccttatccataccgcacagcagcgcgtcctttaaaaatgtgccgccgccgaaatcggtaactatgcgctttagcataaatatccagtcgcacacggtgtctgcacggaaaagcatcattccgcctattaccaaaattaaagtcctgaatattctgaatatatttaaaggtgccgactcacgctttattttaagctcggaaaagaatttcgctataagcggctctgcgtacattccgagcatcattattatgtaataataaagcccgtaaataatatatttccagcctgcgccgtgccaaaagcctatgccgaaccaggtgaaaaacagggcgaaggacgcaggaacgagtgatcccaaaaattcattcagatgctcctttgcaaagcgcgagagcttcataaacggctttgaaagcgagacggaatagaaaacatagtccttaagccacgcaccgagggttatgtgccaccgccgccaaaattcgtttaccgatttcgagaaaaacgggcggcagaagttttccgacattgtaacgccgaacagctgcccgctgccaattacaatatccatgcagcccgaaaactcggcgtaaatttgcagggtgtaaagcacgcccgccaaaagtattacgctgcccgagtatttgcccgcactgccgaacacctcggaaaccagtatgttcgcgcggtcggctatgaccatttttttgaaaagtccccacactatgcgctgtaaagaaaaggcggtgcggtcgtaatcaaaggaatgtccctcataaagattatcggcaagcagatcgtacctgcctatcggaccctctactatctgcgggaaaaagcttaaaaacagggctaattttccgaaattttcagtagcgcggtatttgccgcggtatacgtctataatataccccgccgcctgcagagtgtagtaagatattccgagcggcagtataaactttaatttcggcagatgcgccctaatatgcacaagatgtgccaaaaatttcgccgtgtgcaggaaaaagtccgaatattttaaaaccagcagtatgccgaaaacaaaaagcaccgccgataccacaactgctttcttctgccatgcgatatttgctttcagtttttttcggtcttccttttcaagcccttttttagcaagggcaaagccgtcgtttatcttgtttataaacacgccggcaaaatacaccgccgcagtggtaataacaagaaaaaccgccagcttgccgctgtttatcatgtaaaaaatatagcttgaaacaagcagcactacccacttatattttttcggcgacagcgtgtaacataaaaacacgctgcccaaaaaaagcaaaagatagctgtacgaggtatagctcatagcggttattcttcctctaatcttttaaccattgcgtaaattgcctcggcacttttaaagttctcgggcacaatgtcaataggggttatttcaatatcaaattcatcattaagttcactcacaagctgcactattttaagtgaatccagaattttatcccctataaggtcggtctcgaccgaataatcgactcccggttttatttcttccagtatttttataacctgctccatcgaatattactccccatcagatatttttgtaattagccgtaagccatttacgatcggtcttgccgtttgcgtttatcggcattgcttttatgcgtattattttttgcggcagcatataatcgggcagtcggctttttaatgcgttcattatctccgatacgtctttttgcctgcctgtgtaaataaggattattttatccttttgcttatcatatacgaccgccgcagaggaaagcccctccgccgcatacgccgcagcctcaatttcgccaagctcaatgcggtagcccatatgctttatttgaaaatccttgcgtgaaatgtatatgagttcgccgttttcgtccagctttacaagatcgcccgttttataaaccgtttcggggtaggcggtgttcagagggttctgcacaaacgccgccgctgttttttcggggtttttgtaataccccattgccaaaaacgagcctcgggcgtataactcgccttcttcgcctatttttgccgcagtgccgtcctcttttactgcaaacacatcgcagttatcgcacgctctgcctatcggcagggtatcgccgtcggaaaatttgcggtcaactatataataggtgcaaatatcagtggtttcggtaggcccgaaaaggtttgcgaaaagtgcgtgcggcagcttttcccgccagtaattaagcggctttaccggcataacctcgcccgcgaaaagcaccttttcaagatactccggcataatgtaatcaagcacctttaaattcgcaactatcgacagcgccgatggcacccagtaaattgtgttgacttttctttcgttcataaaccttattaagtttaaggggaaggaaaagagcgttttcggtataatatgaagttccgctcccgcgtatacggtgctgaacacgtcggataccgacatactgaaataaaacggggtctggctgccgaaaaccgtgttttcgtttattttgaaagtatcggcgtaccatttaatatatgcaagcacgctgcggtggtttacaaccgcacccttcggcacgcctgttgagccggatgtaaaaagcacatacgcagggtcggtatctaccgtattatcccgtattttcctgagaacctctttattcggcgcatatgccgcagcctcattataatacagtaccgtgcccttaaaatcaatctcacaaattttggatttgcacgcgtccgtcaccaaaaccgcggcgggattcaatgtttcaaatatcgcctttatgcgttccgcgggcatatccgcgtctattaccgtgtaaaagcagccggcatataataccccgaacatggcggttaaattttcaaccgagcgctcggcgattaccgcaacgggggctttatacacccccgccgcagctattttactgccgatgctctgcgccgtttttaaaaactcgccgtaggtaacgcttttgttttcatcggcaaaaacggttttttcgggaaagcgctctgccgaatgttcaagcatttcaagaatatttttcattatctgccccttatggcgtctatcgggcgttttgacgctatgcgtttaacaggcaaaaagcttgccgcaaacgccacaaaaatactcacaatcaagagcaaagccacctgacgaacaccgaagctcagcaccgttacaagcacgcccatctcattgcggataatgctgtttattataaccgtagccgcaaatacgccgattgccgataaaacaaagtttatcatggcaataataaagctttccgagaagaatattctgaaaacatcgttgctgcgggagcctatggcgcgcaaaattcctatttcctgctttttgtaggaaatgctggtgcctataaagttggaaagcattacagcggcaaacaaggcaaagcccacgcctatccagaagaagtattttgaaagggctttaagtccgtcgtttatggaatcaagctggaaggttaccgagttttgtattgcgtagcgcacgccgctgtcctcattgtagcagtaagccacaagcgagtgcaccgcgctcttttcctcgggcattgtgcccacggcaaagccgtatattttatccgttccctcggtaagctcgttataaataccgtcggagcagacaacggtggaggtaagctttgatttattaccctcggtcacattatctataacgcctactatcttgcagccgcttatatcctcattgctgttttccttgccgaatacatttttccacattgaaacggtgtttttatttttaagcagctttgcgtaatcggcagcgcctgtttcgtttaccgtttcttcttcgtcgcgcgtgtccgactcatcggaaaggtttgaaagcgaatcggcggttactataatttccttatcgccgagggtctttttctcgccgtctatccaaattaccttttcgtttgttatatccgaaatacgggcaaggtaatttgagtcagcgttaaaattatcgccgtaaaaggaaatatatccttcggttatcggtaccattgcaggtctttcggaaatcatttgatccaaacagccatcgcctaccattgcaatttccgcgtagctgtagctcacctccgtgctgaattcattcataagaatcatatctcccagttgttcagccctgcttttgtggtcatttttctcggtaagcgacgcataacgcgacatatcaaaacctgtatctataacggcggtaacagtatattccttaccgtctaatgtgagctttttgcctattaaatcagtgccggtgctgattttggtgtaaacgggggttttggtaccgtcctttgcggtgttgtaggttttattatcaaaatactgcgcctttttaaacacctcgtaaatataatcgctcacggcaatttcatttttagtgccgtcgggcaaattacccgccagtaccttatagcccatttcctttaaaaccgcgtcgtttacggtggcaaagccgtttataaccgggtaataaatgttgtagtcggtttccgtaagctttatttcggggtttgtatggctcgatatatctccgttaaatttaagcggctgataaataccgtgcattttaacattcatgcccgccgatatatcggaaagctccttttccgaaaaacggtagccgtaatcacgccagtagtcgcccgtctttttcgattttgcgaccgcaaccgatttaacgcccgaatcgataagcgaatttgtgcaggtattaacatggttgtaagagccgaaggtatcggaaagcccgaaaagcccgaacgcaacgcaggaaagcaaaattgttatcacaagccttattttcttgtgtttaagtccgcttgcgcctattttaacggcgtttgacatgggcagctttgattttataagcttaaagcccgagccgtcggccgtcttaatttttgatacatcggtctttttaaagcgcgcggcggtttttgacttttcacccaccgtaagctttaaatcgcccgatttcagcttatctatatagtcgtttatggcggctctgtcttcctctgttaggtggtagccaacgggcacctctaccgtattgccgcaaaactcaatgccgtcgggtgtttcggcgtgttccgcctcgccgtcaagctccacatcgcttataacctgaccgtcggaaagctctattattctgtcggcatattgctcggcaaattcgcggtcgtgcgatacaactattacaagctttgtttcggataactttttaagcgtatcaaatacctgcttgcccgtagccgagtcaagcgcgcccgtgggctcatctgccattattatttcgggcttttttacaagggcgcgggctattgctacacgctgcttttgtccgcccgataattcgttgggctttcttgcgccgaagccctctaaatcaacctgatttaaaatatcgtttatttcactgtcggacgcccgtcttccctgcagctctattgcaagggctatgtttgcgcccaccgaaaattcgtcaagcacattgtattcctgaaaaataaagccgacataggtgtttctgtaggaatcgaaatgctgttgcctgaaattctttgaggaaacgcccttaattattatctcgccgccgtcgtatttatcaagtccgccaagcacgttaagcagtgtggatttaccgctgcccgatttaccgagcaggaaaaccatacccttttcgggaaacttaaggcttattttattaagcgccgtaaccggcacgccttttttcggtttataaattttaacaagctcttttgtttctaacataatagcctcctgtttttatcgtaccaaccgtactaacttgaatagtacagctgtatcataccacgggtttccccttttgtcaatatttattacaattttttaacctattcgttttttccctttttacggcaaatataattatatattgcaatccccgcaagacttataaccgccgtaagagcgaaaacaataattgcgaacttataatttgccattcccagagcgctgcccccgatagtggaggttatgaccgacggaaaccgtgcaaccgacacaataagcagaaatcttgaaagcttaatatcggtaagccccacggcataggttagcagatccttcggcgtgcccggcagaaagaagacgacggcggtaataaaatcgagccgtttttcatcctgcagaaatttaagctttttaattttttcaatatcaaaaaaaacttctaccagctttacaccgaatttgcgcacaagctccaaaaccataacgctgccgagcgttatgcccacaaccacaagtattgtgccttcaaccgcgccgaaggcatatcccgcgcctatttcaagcggctcgccgggcactaaggctattaccacctgaaaaataaccatacctatgaatataaagcgactccatatcccgtgggagtctacccactcggaaaacgcgccctttgaggacacgagctttatcataggcttgcctataaaccaggctaccgccgccgaaaaaacaatcaatgctattattacggctatacttattatcttcttttgtttatcggtcagtgcggattcatttttctttaagttcagcaaggcttgttttcacatccttttttaaagcgtcccatttatctgggttatttacatagtaaatggggcaaagcttacccgtaacatcgtagtgacgaataacattatcccccgaaagccccgtttcctttaaaagccaggcggtaagctttaccactgacgtataggttgcgtcgttgaactttcccgtaccgtcggggtggcacacctctatggaaacagtatccttatttcggttgttgctcgccgccgagcgctcccacaacggcaggcactgtataatttcgcctttcagccccaccacaaagtgggagcttacctcggtttcatccttatcgaaaaaatcgcggttgttctgcgccgtggtgccggggttgcctacatagtgtattacaatatcctttatatcctcaagctgtatgcctgttctggcagtcgtgtgaacgtggataagctgcgggtctacaaaatcgggtatttcaattttttgcagtctttcagctgctgttgtcttcttcgccgtcgggaaagccgccgtgccgccgctccgtgtaaagagccgctttattcctatgcccgcgcccactatgcaggcggcaacaagcgccgtgcataaaaatcttctagctattatttttctcctgcgttttttgcgccgttcataatatgcgcggcgttttccgtaattctcctcgtacatcctatccccgtcttatacattatattacgctgtgcccgaaacctcaaggtcgtttatcaaatcaaatttaagtgtggctttaaacagatcgccgtcaatatctattttcatatctccgccctgcaattcggtaagactgcgggctatggaaagccccaagccgctgccctcggtgttgcgtgaggtatcgccccgcacaaagcgctccataagctcgtcgcccgaaatattaagcggatatttcgatatatttttaaaggttataacggcttttccgttccttacggtcaaatccatatacacccgcgtaccgggcagagaatatttgcacacatttcccgtaaggttttcaagcacgcgccacaaatgccgcccgtccgccataattttaaccggcatatcgggaacggtaagcactggggtaagctccgcttttttgagtcgttcgtcaaattcgcccaccgtttgcgagagcaaaacgccagcgtcacactccgaaagctccacctttaagctgccgcttgacgcctttgaagcctccaccaagtcctcaatcagctttttaaggcggctcgattgacgatcgagtacagctacatattcctttattttttcgtcttcgggctgctcctttttaatcaaatcaacatagtttataattgaggtgagcggagttttaatatcgtgcgagacattggttataagctcggtacgcatgcgctcgcttttcattttttcatccaccgcgttctgcatacccgcgcttatgttgttaaggctgccgcaaaattcgcgaaattcggggaacatatacgaggtatcaattttataatcaatatccccctcggctattttttcaccgccgtttttaattctttgcagctgcacggcggtaaatattataagcaccgctattgcaaccgcattgagaacagcaagtaccaaaaagaaatcaagcgcccatgcggaaaggcaaatcactgttacaagcaaatcaaagccaagcaccgccgcacagataagcacggttttttttacaagcgaaagattttttaaaataacacccaaaaacccgaaaaccttttttaaaccgcgccacaatatgcacagcagcttatatataacgttgttttttaaaaatgttcccgctttaatgcgcaccgcaaagcttacggtgtaaagcaaggcgataaagtaatcaaacgagagcattgccgataaagcaataagctgaaattcggcgccggcataaagattttccacaatcgcaatgttcagcatacctataactattatgcaagcggtaaacaaatcaaagggtattttatcggtaaatgcaagttttacgcttccgtccgcctgtctgcccgccgcggcataaataaacaccatagttaaaacaaataaaagcagggcgagaagacctataaatataatgctataccttagcggatacaaaaaatccgttaatttaaggtataaaagattgctgtatgaaagcgggtaattctccgccgcgtaaacggtaatatccacgtcgcccatgtattcctcaatgtaaatctcatcggggctttcaacggttctatgaacgctcatatttttgaaaatcgctttgcctatatatttttggttttcataggtgtttataagcgtttctccggtttcgatatccgttacggtaaaataaatatcggttagacggtttgatgcctctgtgttgccctcgccgtaatattcggctatcctataagcgcttttgtagagaatggcgctgtacttatcctcctctatctgtttggaggttttggtataaaaccgttcggagtacataaacgcaccggcaagaacgcagcccgccgtcagcaccgcgaacacaaacgaaagaattaccgccgcggtttttgcggcgaggctgtatgtcaaccttttcattatttatcacccttttcaagcttgtagccgtgcgcccaaaccacctttaaatacttaggctcggaggggtttatctctatcttctcgcgcaggtggcgaatatgcaccgcaaccgtgctttccgcgccgaacggatcgccgccccacacactttcgtatatttctttgggggataacaccgctcccgcgtttttcataagcagctttaaaatttcaaactcggtgggagtaagcggtacctcctcaccctccgcaaaaacctgctttgttttatcgttaagctctattccgcccacggtgtagccgtcctctttttgggggttgccgccgcctaactgcatataccgccgcagttgtgaacgcacccgagctataacctcaacggggttgaaaggctttgtgatataatcgtccgcacccacgttaagccctaaaattttatcggtatcctctccctttgcggtgagaagaattaccggtatattcgaaatttcgcgtatttgggtcatagcgctgattccgtcgcattcgggcatcataatatccataagcgccaaatgcaccgcgttatttcttaccgcctctaccgcctcgttgccgttgtatgccgcaacggtagcgtagccctccgcctccaaataaattttcaaagcggatacaatatcgcgttcgtcgtcgcaaattaaaatgttatacattctctcccgacctttcacacctattgtaacagataaactattaagaataaagtcacaaaaatattaagatttctttaagaatacttgaaacgcccttaaataaatgatatattaagaatataatgcaaaacaggcggtgatacatatgcggctggaaattttaagcgcgtgccccgattttatccgtgattttttaacctacaacgaaaccatcaagggaaaatcctcaaaatcggtagagcagtattattccgatctgcgcacgtttttcaggtatatgctgcttgtccgcggtaaagcacagccgggtattccgtttaataaaatagatatatcgggcgtagatatagagcttgtgcgctcggtcaccgtttccgacctttacggctttatggtatactgcaaagaggagcttcgtaacaacacagccacccgcgcccgaaaaacctcaacgctgcgcctgttttttaagtatatgtcggtgcagacgcataggttagacagtaaccctgccgacctcttggaggcaccgaaaataaagcaatcgctgcccaaatatttgtcgcttgaagattcgcttgagcttttaaactcggtggacggtgaaaacgggcggcgtgattactgcattttaacaatatttttaaactgcggcttgcggctttccgagctttgcgggcttgatttatcggatatatcgtccgacggcactatgaccgtaaccggtaagggcaataaggagcgtatggtctaccttaatgattcctgcaaaacggcgataaagcgctaccttgaggttcgcccgcatgagggactgccggcggacagtaaaaacgcgcttttcataagccgcaaccgcaagcgcataagcccgcgcactgtcgaacatatagtgacctcatatataaaaaaggcggggcttgacggcagggggctttccacccacaagctgcgccataccgccgccacgcttatgtaccggcacgggcatgttgacataagggtgcttaaggatattttaggtcacgcaaacctcggcacgacccaaatttacacccatgtttcagatgagcagataaaatccgctatcgactcaaacccgctttcggaggttaaatctaaaaaataagtgaaaaacaagctcttaatttccgttaagtctgcgaaaaagctcggttatttcagagcgcagtcctgcgttttccgcgtcgtgaagcattgggtcgcgccttaaaagctcctctgcctccttgcccgccgagtgcagggtttcgcggtcggcgaaaatatcggcaattttcatatccggcagcccatgctggcgtgagcccaaaaagtcaccggggccgcgcagcttcagatcctcatcggcaattttaaagccgtcggtgttgtttttaataacatccaaccgccgctttgtatcgccggatttaacatccgaaataagtatacaggcggagctgtactctcccctgcctattctgccgcgcagctggtgaagctgcgaaagcccgaaacgctcggcgttttctattaccattaaggcggcgttaggcacgtctatgcccacctctattacggtggttgaaataagcagctgtatttctcccgcggcaaaccgccgcataacgctttccttatccttcggcttcattttgccgtgcagcagccctaaggtatagtctttaaactgattttcgcttaattcctcataatattcgcttgccgattttatacccaaagcctcgttttcatctacgagagggcagactatgtacgcctgacgcccctcggcgatgaatttttttatatagttatagactcgctcgttatatgaggaatcaacgcagtaggtcgcgattttctgcctgcccgcagggtattcgtctattatgcttatatcgaggtcgccgtaaattataagccccagtgtgcgcggtatgggtgtggcggacataacaagcgtatgcgggttattaccctttgaagaaagcctgccgcgctgacccacgccgaagcggtgctgctcatcggttacaacaagccctaagctttcaaactccacatcgtcggtaagcagcgcgtgggtgcctaccgcaacctttatttcaccgcttttaagccccgtctttacctcgtccttttgttttttggtaagcgagcctgtaagcagcgcgcatttaataccgctgttttcggtaattttgcaaagcgttttaaagtgctgctcggcaagcagctctgtgggcgccattaatgccgactgaaatccgttaccggcagatatatacataagcgcggcggcaactgcggtctttccgctgcccacatctccctgtatcagcctgttcatgggacgcggagacatcatatccgacaaacattcgtttataaccctttcctgcgcgcctgtcagcttaaaggaaagggtctttttaaattcatcaagcaggttttctttaaccgtgcagcccgcaagggctcttctgcggcgctttaaaaacaaaagccctgtttgcagaacaaaaagctcctcaaaaacaaggcggcgctttgcgctttcaagtgcctgcctttcaagcggaaaatgtatgcttttaagcgctgttttaaaatcgcatagtccgtttttctgtcttataccgtcgggtatggcgtcctgcatgctgtcggtatatacaagcgcgtttttcattattttttcaatcgttttggagcttaagccctcggttgcggcataaaccggttctatacccatatattccgccggcattatttcgggggaggacatttggcggagagttatcccatagcccaatttcccgtaaaacagatagctgcggccctctcttaaattttcggcaagatacttccggttaaaaagggtgacctcaatcacgccgctgtcatctgcggcggagaatttataaagggtcatgccgcggcggatatttgccgttttaacgggcgaggtgatttccgctctcacacacacattttcgccctcatgacattcggaaataggtgtgatattctgccaatcaagatatgcgcgcggataaaagcgcaaaagagcaccgactgtatcgatgcccttttttcgcaataattctgcccgcttttcacctacgccctttaagaacctgatatcggtggaagccgtcagcatagtctttctcctttattcaacggaaataatgtagtaataaaccggctgaccgccctttataaaggttatttcggtctttgcgccgtatttattccgtatttcctcttcaagcgctgccgcctgctcatcggtcacatcctcaccgtacataacggtaaggaaagcgctgtcgcgctttatcatctgctttaaaagcctcataacgctgcggtcaagctcggtatcggtaaatgctattttaccgccgatcatgcaaagcagctcgccctgctttatcttatgaccgtcaaaatcggaatcgcgtgcggcaaaggtaatctgaccggtcgcaacgcgctcggtcgccttctgcatttctatggcgtttgcctcgtcatccgtttcggggtcgtaagaaagcattgcggtaataccctgcggaattgtgcgggtgtgaataactattaccttgcgggtgcttatcggaatagcctgctccgctgccataataatatttttattgttcggcagaacatacaccgtttccgcgggggttgcctcaatagcttttaaaatatcatcggtgcttgggttcattgtctgaccgcccgaaactattgtatcaacgcccagatctctgaacagatccgcaatgccgtcacctgcgcaaaccgatacgaagcctacgggcttggtcggctctacaggctcaaaggtctcggtaaggtcggcgctcttcggcggctttttgcgtgcgttttccgcgtcatgctttgccctttcgtgctggtcgcgcatattctctattttaagatgaaccagctgaccgaaggtaagaccgttttcaatagcgttgccggggtggtcggtgtgaacgtgcaccttaataatctcttcgtcatccaccaccactacgcagtcacctatcgactcaaggtaagcccttaattcgtgcggttctttttcgcactcggggtcgcggtttactataaactcggtgcagtaggtaaaggttatttcggtttcgtattcgcccgcggcgtttacagagccgctgtcagacgcaggttctgcctctgcagttgcttcagagcggattattaccccatccttaaataccgagagcatcccctcaagtattgtaacaaagcccttgccgcccgcgtctaccacgccagcttttttaagcgtgggtaaaagctcgggggtttcggcaagcgccttttcagcaccctcgatagccgcttcaaaaacgccgagtgcgtcctttccctcattcagtgcggcggcggcatattcgcttgcgatacgcgccacggtaagtatagttccctcggtgggcttcataactgccttgtaagccgcttcaacgcccagggcaaaggcagccgcaatattctcggcggtggcgtattccgcaccgtcaagaccctttgcaaagcctctgaagagcagtgaagtaataacgcccgagttgcctctggcaccgcggagcagcgcagaggcgttgaccgaagccacctttcctgccgaaacgcccgcgagcttttcaagctcccttgcggagttcgcaagagtcatggacatattcgttcccgtatcgccgtcaggcaccgggaaaacattcaaatcgtcaatctgcttgcggttgttggtaagattattcgcggcggaaattatagcgtcgcgtaaagtatcgccgttaaacaaatgtaaacactccttacagccttaaggcttattccttaatgccgtcaatcttaatagtaacgcggtcaacggttatgcccgcgatttccttaacggcatattttaccttttcggtaatgcttgccgcaattgcgttgatattcataccgtaggtcacaacgatatgcagttcaaccgaaatcgtttcggcattgcccgtaacgcgaattccggtatcggctctttttgtctttgaaagcattcccaaaactttctgtcggctgttgctgggtatcattcccacaacaccgaagcaggatgtcacctcatgacctatgagcttggaaagatacgcctcggttatatctatctttcccagtcttgtttcataagctatcataacatatcctcctgtattaatttgattttgtgtgacgcgctttcagctcaccacactgtatgaatcaattgaaaaataaatatcactgcatgaagaattatttacattttcaatcttatcattgtagaaaagcacgccggttctgtagcaaataggtattaccggcatttcggtctgcaaaacggaagccagatccgccaaggtgtttgttccggcgtagaagccgttcacaagctctgccgcagtaagacttttttcctccgtctgctgattgcctgaggtatccgcagccggctccgttttcccgtccgcattgtttttatccgccgtttttattccgtaagcggcgctgccgccctcggttacgaggcttgaaatatccatattcggcgttattgcaacctctgccagataaagctgaaaattgcccgacgagagcgccgcggtataatccgcaaaggatttctccgccaccctcacggaaattccgtactcggaaagtctgcttgcaataattttagcggcagatacgcgaaggcggttttccttgttgaccaacagctcgaatttaagctttttgcctgcgctgtttgtgcgcacaccctcgctatctaacttattatatcctatttcttctaaattctcaacagttatttctttatttgcctgtaaatttatattttgaaccgattttaccgcttcccaagcggggttgaagaagccgtttgcgggcaaagcattgttgtaatatccgtcacgacatatctcctttcggtcaagtcccgatgaaattgcctgccgcaaagcattaagagaaagctgctcgtttgataggtttacgcccatatatatcaggtgattcaaattaatattcaccttttttccgctcatgcggagaatattgccgtcggatatatcgctgtaatacatatccgccgcgcctatttccacataatgacccacagcctcgctgtcgggcgcgtttataagccttatttcgctgattgcgcggtttttgccgggatcatgctcgttcacgacaagcctgtccgaattttcgttaagcttaaatctgccgcagcctatcggcgggtgtgtaacgccgtcggagtcggttatcttatcagaattccttttaataataggaaaatcaagcacatttgcaaagtacgggtccgcacggtcaagctttatcaccaccgttttactgtctctcgccgcagcggaaagtgcctcataaagcttgtaagcatattcggtattcgactttttcgcaagattaaaggaataaaccacatcctccgcagtgagagccgtaccatccgaaaaatatcggcttttaaggctcacggtgcactccttgccctttacctcggcgctttgtgccaaagaatagcttatattataggaattatccgtcttcaaaagcggctcgtataaaaggcggcataactggcggttaatatcggtcgcggcggtgtagggattaaaggtgtccgccgaggaataaagaagcgttaaatatcccctgcctaccgatgacgacgaagccgttcccgtaatctccgaaaacgaggaggtattctcgtcccttgcgcggcagccgcacagcagtattaaagccgataaaataatcgccgccgctttaaaccctttcaaacgcctcaattcctttcttcaatatatatccgctctgtatctacggttttgccgcttgcgcggtcaatttcaaaaatgcagccgttaagcatctttctgccgtctgcctgctcaaaccgcgccgcgcccccgtttttaagtctgtcaataataatttcgtttttaacccctaaacaggaatcggcaggtcctgtcattccgaggtctgttatataccccgtgccgtttttcagtatctgatcatccgccgtctgaacatgggtgtgcgttccgaacagggcggatattttaccgtcaagataaaacccgagcgcccttttttcgctggttgcttcggcgtgaaaatccacaataataatttcagcgccgtcagcccttgctttttgtatcagctcatccgccgcaataaacggattggatgcagcaacgcgttcaaggtagattctgcccaaaagatttataaccgcaaccgaggtatagccgaggtccgcaaggcaatatcccttgcctgcagcctccccctccaaattcgcgggacgcagcacgcagtcgttttcatcaagcaggctgaacgccgattttcttctcattgagtgattgccgccggttataacatccgctccgcaggcgaaaagcatttccgcgctctcgcgcgttataccgttgccgtctgctgaattttcgccgttaataacagtgaaatcaatccttttttcctttttaagtgtgggcagccattttcttaccgcctcgccgccgaggctgccgcaagcatcgcctattgcaagtatcttcaagctaaattacagtccttttgttttgttgaaggcggcgattatcgcgtccataacgctgcccctgaacgccgccctttcaagcgaatgaacgcccgctattgtagcacccgcggggctgcagacctcgtcctttaatttatccgggtgcttttcgccgccctgcattaaacgcgcggcaccgattacggtctgcacggcgtattcctctgccttgtcacgcgcaagtccgcactcaacgccggcagatgccaacgcgtcggcaaacatataaacaaacgcaggtccgcagcccgacagtgcacagacagcgtctatcagcttttcatcggttcggtcaaccgttcccgcgtggcgcatgcagttgcagaactcggttatttcatccataaagaccctatcggacgcagcgaaaaccacaacgccctcgccgaccgacacgggcgtgttcggcattattcttattatggggtactcctgccccaaaagctcgctgtagcgcgctatgggtacgcccgcaaccattgttactataacaaagcggtcgcgccgcgcggcaagctcctctttaagctctgcaagcgccgcgggcaaaacctgcggctttacgccgagaactacatattgcgcctctcgcgccacggtttttgtgtcggctgtgcggcagccgaattcggttgctaaggactgcgccttagcctcgtttttatccgataaaagtatctcgtgcccgggcagcgattttcttaccgcccgtgctattgccgagcccatatttcccgtgcctataaatccgaatttaacctctgacatttttaattttttccccccgattttatcttatgtgtccgtctccgtttataacatatttataagtattaagctcgcaaagccccataggtcctcttgcgtgcagcttttgggtggatattcccatttcgcagcccagtccaaactcgccgccatcggtaaaccgagttgacgcgtttacataaaccgccgccgaatcaacccgcgcggtaaagtgcgccgctgccgccatatcctcggttacaatacaatcgctgtggtgggtggagtgcagggctatatgccgctcggcatcttcaagactgtctaccatgccaaccgccattatataatccaaaaattcagtatcaaaatcctctgccgcggcgggaacggcgtttataattttgcaaaccgcttcatccccgcgaatttccacacggtctttaaatatttccgccagtctcggcaaaaatgcctccgcaatatccttatgcacaaggcaaacttcagccgcattgcaaacagacgggcgtgaggtctttgcgttattcactattttgagcgccttttctatatccgccgatttatcaatgtaaatgtggcaaattcccgttcccgtttcaatgcagggcacggtggcgttttctacacaggctttaataagccccttgccgccgcgcggaataagaagatcaatatacccgtccgccgtcataagctcgtttgcgctggcgcgcgtggtatcctcaatcagatttacataatcctcggaaagacccgcggccgcaagtccctttttaagcgccgtaactattgcgcgggcgctgccgtaagcctccttgccgctgcgtaaaacacaaatgtttcccgatttgaagcaaagcgccgccgcgtcggaggtgacattcgggcggctctcgtaaattatagccaccacgcccataggcaccgatatttttttaatatccagcccgtctgcccgctcaatatcctcaagcaccctgcccacagggtcggggagctgcgctaccgcgcgcatcccatccgccatggcggcaatgcgcgtttcgtcaagccttagacggtctatcataacctcgcttattttgccgcgggcgttttcaacgtctttggcgttcgccgctaaaatttccgtcgtgttttcacacaaagcgtcggcacaaagcatgattgccgtgtttttccgttcggttgtaagcggagcggaggaaagctccagcgcttttgcttttttaagtatttcgagagttgtcattttttctcacgccttttttgccaaaaattttgttcccacgcttttgccgtccaaaatatcataaagcagcttcgggttcttgccgtttgctattaccatatctattcccgcggcgtttgcggttacggcagcctttatttttgtggtcatgccgcctgtgccgagtttagaacccgccccgcctgtcattttttctatttcgggagttatctcctcgaccacgcttataagctgcgcgttttcatccttgtgcggatctgcggtgaaaagcccgtctatatccgaaagcagtataaataggtcggcatttaccgcctttgccactatcgcgcccaaggtatcgttatcgcctataactatttcgtcggttgaaatggtgtcgttctcgtttataataggcagcacgcccaattgcagaagccttaataccgtgttttcaaaattctgcctgcggttttcatgctccacatcatcgccggttataagtatctgcgccaccgtgtggttatactctgaaaacagcttatcataggtatacatcagctcgcactgacctaccgccgccgctgcctgacgtgtgggtatatcgtgcggcttttcgtggagcgacagcttgcccacgcccatagcaatagcgcccgatgacaccagtattatttcatttcccgcgtttttaaggtcgctcatgattttgcaaagctcctctacccgctttatattaagcagtcccgaggggtgcgccagcgtagatgttcctatttttattacaattcgcattttttcttctccgttttcaagcaattatgccattattataactcattacacgcgtgatttctactgttaattttaaaaattcataaagtatttcaaattgccccgatttttttcttgacaagtcatgcgaatattgatataataataaagctgttcaaacgattcattagctcagttggcagagcacttgacttttaatcaaggtgtccggggttcgaatccccgatggatcaccagcaagagcctcgctttttaagcggggttcttctttttttattcctctaaatgcagaataaaaaaatactgtgtctaacactttttctaacagattaagcaagtatatttgccatagtatccgcaacagctttttttcgctcaatatcaaaatgaccgtatatatttgccgtcaaagtaatatccgaatgaacgagccattcctgcacatctttgagcgtaaacccactcgataaaagaatacttgcgcaactgtgccgtaaatcgtgaaagcgaatatgcggtaagttattccattcaagcaaacgtttgaaatgttgacttacatattccgttgcgaaatattttttcataaacaactaaacaaagaacaagcagctgcctaatagcaactgcttgcactcaatttctcattttaactctttaccccagctattgacaaagagcctctttttataacctgtatttaaaacaaagaattatgctaaaccaaccaaatcataaacctttattccttttattactgcatacggagaaacgattatctgatctccgccggttgcgctttctattgaaaaaggataaacataatctattccgtattcatcaaggtctataacggttttatccgccaacgattttttaaaatgtatgtgttaaaatgatgtgatccaataaaaaaagaagttaacttccaaatatggtataatgtttttaccacaaaaccaaataccgaaaggaagcaacttctcatgaatataataacacaagaagctaagaaaaagcaagcacggcggtatcctgagctgctgacgccgggcgaaaaggtacaaatagatctaaaagaagtgccgtacaattgtctgcgaggcgatgcgctcaaatatggaaggcgtttttatcaatggacggcaatagatgaatgtacaaggtatcggtttgtgtatgcctttgaagaacatacacctgagaacaccgtaaaattcttaaaaatgctgttgaaagagtttccgtttaaaatacagacggataacggtacagagtttacttacaagtacatcatcgacaatgaaaataagtccattggataaggtgctgcaagcgctgcaaataccgcatatttaatgccgccgagggcaccgcggcataacggaaaggttgagcgcagtcatagaaacgaccaaagatatttttataattgggagaccttcaaaacgcttgatgaattaaatgaaaagcttaaaaagcatttagagtggagcaacagtaagataatgaggagactcggaatgaaaagcccggttcagctgttggcggagaagctggcggcgtgaaccgaccgttttcatccgcctttcactttgcctaaggctcgtttcaaggcggatgaaaacattataccattcattttcttctttttttaaagaaaatgggtcatatcactttacaacgcagaaaaaaatatcggggaaaattaaaaaaaatattgacaactctctcttgttttgatataataatcaagcgcgataattacagtgcgatgtttaatgcgagtgtgctggaataggcagacaggcacgtttgaggggcgtgtgtcaatgacgtacgagttcaagtctcgtcactcgcaccatacagagtgttgttatagtaatcgagaattactgttaacaacactctgtttttttgttttgtttcgcttatgctgccgtatttgcagctttttctgttcgttattataatttgtctgtagcttcgcaaaaatgtaatgaagaacgttctttttgtttgcctatacccttatttcaatttctgtacggagaggtgaattatcccctgaacctatataaatttaaaccttaccgtttttaagctcatacctgttattgcaagaaaaaatctttagctcgtcatactgttaacgctgtcggaaagataagggtctatcacaatttcggtattgccgctttttaatatatatccgctttgccctaaaaaccgtattttcattgtacactttttcccccgtcaacataaatgctctgccccgttatataccgtccctcgtccgagcataaaaggcttaccgtgcccgcgcagtcattgggagttccgtaaaagcctacgggaatactgtcggtcacctttttcgcgtattcgggatcggaaagcgcctcaacattgcggtcggtataaataacgccgggcgccatattgttgaccgttataccgaacggtgctaactggagcgacagcgattttaccatattggtctgcgccgccttgcttgcggagtatataagcatatcggggtggggctttgcctcctgcactgagcctacggttacaattctgccccaaccctttttcttcatattaggcactgccgtctgtataagcagcagtgatgatacaaaattgcagtttaactgttcataaacctcactgagcggtatttcctcccagtgatttctgtactggagtgaggcgttaagcacaagcgcgtcaatatcgcccatttcttcggctaaaagcgcggtttccgccgtatcgcaaaggttcgccttaataacctcggctttgccgccgttttcttcaattatccgctttgtttcctctgccttttcggtgtttcccgcgcagtggactatcacctcatagccgtcccttgcaagccttattgctattgctctgccaatgcctcttgacgagcctgttacaagcacacgttttctgtttgacataattttcacctcaattacaacgctgtctgggtatcgttcgggtcgccgttgcgggctaaatcgtactccttcgaccagtcaaggtcgcggtattccttgccgcgcgggtcggtttttatccagtcgagcagcatatcgagcatttcttccgaccaagtatttttgtctatttgagcggtggtgaacttaccctgacaaatcatttcaaatccgaaatcgtccttaacatgggtttttgccgcgccttcaacaacgtcggctacaaggtgtgacggaataaagagtactccgccgcccgcgccgaacacaatatcacccggcaggcataccgccccgccgaaattggttatatcgttccagtccttcataacaaattcgcgtatgggcgtggggtcaattcccctgtaataaacctgaacgtcgggaacttttttcatctgctcaacatcccttatgccgccccatattaccgcgccgcccgttttggtgcggttgtgcagcgcagttgtaaggttgccgcccaaaaacgtgcccttgtatattttatcgtacatatcgcaaactacaacatcgcgttcataaaggtgatctataacccactggttatagtttccctgcaatccgtcctcagcacctcgcgcaaactgcacatcgtgtaaatcgggacgggtcgggcagtaggtgcaggtaacggctctgcctactaactttctgccgtcgtcgtgcagggtgttaagcgggttttctccgccgcctacaaactggtgctcgtaacccaatacgaaaattggcttccacacttcttcaagcgtcattccgtaaagtgcgtcaaggtatttatcctctaccttcggtctgccgtcgggcagtctttcacctttccataaaggcgttaatgcaattattttttccctgtcgttaaagttcattttcatctctcgcttatatttcaattttaatttcgcggttagcttttttgccgaaatcggcaattatttctttatttacaccatcggcgtttacttttaatttatagcttccgtaaaatcctctgaaatcacattttccgccctttatttcagcgcttccctttgtatgccattcttcatttataagcttatcaagaaccttatatgcctctttttgtcttccatttctgcacagcccgccgaatgggagattttcatttgccacattgcgttttttatcgcataaaataccgttatcgtcaagattccaccaaaaaatacccgacatactttcatgagaaaagcaaaccctgtaaagccgttcggcggcaagcgcctgtatttcctcatcctcggtggaaagacctatttcggaaagcaccaagggtttacctaagcttccgtatgtatcaagcaatttgtaaagtctttccgaattgaatacatttttatagcatccgttatcgtatatatggcattgaagacctattctgtcaattttaacgcccttattcaaaagcttttccaaaagcagatagtacccgccgtaaacgcccctgaactctgcaaaagcagcatctgtaatttcgtttaaaataagcgcattatcggggaaatatttccttgctaacgcaaatatctgttcaatataaccgttgggcggaagtgtgcacttccagtccgtgccgcggtactcaaactgctggtcaaataaccttgcaggctcatttacgcaatcgaaaacaggaacaatatcggcataccgctccgaaatttccccaaaacgcttttctataagcgggtaaagttcatcccatttttccggcagccaacgcgcggtaaattcctgccaaaagagcgggtgtcctttcattgaaacaccgtttttacggcaaaaatcaacaaccctgtcagccggaggtctgcgatatacatcattgggggtatctgccgaataacgcaaatacccggcgcgcggctctgttccctcccagtataagggtattaccgccgtattaaacaggttaagccactgcttgtaatatgtttcctgctgcacgggatcatcgtattgatcgagcatgaaaatattacagccgaaatcaaagtcaattttttcaagctcataggatatgcacgtgttttctatcggtctgccgtccttataaacctttacggtaaaatcggatttacggtttttctctatttcttcattatatctcgctgaaaagtaatcctgactttcatctaaagctttctttatgtatgacactgttaagccctccttaagtcattaacctgcaaaaacatccagttccacatttcatcaagcgcatatgcgggatcccacgcgttatggtccgccttttcaaatacggttatttttgcgtttccgccgcttttgtttattctgtaaaccattttaatgctttcctcgggataaacatcatcatccagcgcgccgtgaaacgcccagataggcatatttttaagccgctctgcgttccagtacattccgccgccgcaaacaggaacgagcgccgcgaacatatcgggctttgtcattgcaagctgccatgcggcatatgcccccatacttaccccggtaagatatattctgcttttatcaacgccgctttcgttcgccatattcaggacaaaatctataagtgtttcaaaaagctcaaaccacgtgtcgccgcagcactgaggggcaatcattctcgccggtatatttctgcccttttcaagctcgcctatcgctcccgcgtgcgacagctgcgaaagctcagttcccctgctgcccgcgccgtgcagataaataataagcggtagattaccgtcggtattcggggaatagtataaatatttaagccctttgccggtttttgaggatacaaatttcttttcggaaaacatattcactttaattaaacccccgcttatttttcaagcacgatatatccgcgcggttcaagctctatagtgccatcggatattttttccgcaccgtttgtgaaaagagtcctgccgcccggctccgtattaaacctgaaagctgccttttcacagcttatattccctataaacactatttttttgccgccgtattccctcgaaaatgagaacaccttttcgggcgcagaattatcaacccataccgtgcttccataacagagtatatcactttcaagctttaaggcattaagccttttcataatttcctgtcggcgaatactgtaatcaagcttttccaaccctttgcggtcggtcacctcatatttacccatatgaaaacggtttgcaaacatactgtgattggcggaatccgcaagctcgttcccgcagtataccataggtatgccgtcaagcagataattgataacctctatctgctccataccgttatgacccgccaccttttcggtgcgcttgggccagtcggtaacggtatcgtggttatcgatatcaaatatcagcttagcgcccgacggtatctcattcgcaagcttttccaaaaaagccctgcattctgctgcggatatttcgcctgaaaaagccttatataaattcacatgccagtcaaagcaataggatgagtcaaatcccttaagcaggttgttccagttactgccctcgtttattaaaaccgagtcgggcttgaccgctttcatacgcctgcgagcctctacccaaaaatccgtcggtacgccgtcgccgacatcgcagcggaaaccgtccgcgtccatctcaccgagataatatatcatattgcaccaaagatactcgcgaagtccgtccgaagtataatcaagatacgggaaattccattccgtgcaaataatatttccgtccctgtcctgccttgcaaattcagggtgccttttaagtatcggcgcgttcggccctatatgcaggtaaaccaaatcgagcagtaccctcataccgagcctgtgcgcctcttcgataaactcgcgcagatcgttttccgtcccgtattcgctgtcgatcctaaaataattgttcatacggtacgggtttttggggttatttgtctccgattttttttgacgggtactccaaaactctctgttttcagagtcgtcctcctcaaaaatagggcaaagatacataaccctgaatcctaaatctttaagctttggcagctcatcggtaactgcttttattgtcccctcttgggaaaatgttctcgtgtttatttggtaaactgccgaacggctgagccattccggcgggcaaattgctttatatttcatattaaatcaactccatattctgtcgtttgaaaattctttattccattcgtcggtaggctcaaagtaaccgggtatttgcgggtttatatgttcctttattacttcttcgttcagctcgtcaaagcctataccgggcttttcgggaactttaataaagccgttttcaaatatcgggttgttaatgcccgttaccatatccgcccaccacggaacgtctaccgagtggaactcaagcgccagcacattgtgcattgccgccgcagtatgcaccgccgctaagcaggcaacggggctttccgccatatgcacggcaaccgccacgccgttttcatccgcaatatccgcaatctttttaagctccaaagcgccgccgcaggttaaaatatcggggtgaataacagacactccgcccgctttaataagggtttcaaagccctcctttaagtatatatcctcgcccgttgcaatcggaattgtagtgctgtttttaaggcgtacatactggtcggtatacatccatggcaccatatcctcaagccaggcaaggttgtacggctccatacggcgcgcaaaccttatgcagtcctcaacgcaaacgtgaccgaaatggtctattgccagcggcacctcgtagcctataacctctcttacctccttgacatagttctcaaggtagcagagtcccttttcggtaaggtgaatacccgtaaacgggtgcgcggtcgttactatcgaatagcttttctgcgcctttaccatatccgccgtaacagagccgccctgaacgtttaaaatatgcggcgcatattttttcatatcgtctataaagccgagcggcgcgtttatagttccgggttcatccaataaaagccctatacctaaatccattttaagaaatgtaaagcccatttccatacgcttttttaaggcaagacccatatcgtgacctgtgtgctttccgtcaacgtcggtatcgcagtagaccctcacctcatcacggaatttgccgcccaaaagctgatacatcggcacgccgtaagccttgcccgctaagtcccacagcgcaatttctatgcccgaaacaccgccgccctgacgggaaggaccgccgaactgctttattttgcggaaaattctgtccacattgcaggggttttcacccaaaatgcgacttttaagcataagcgcataggtttttgaggaagcgtcgcgcacctcgccgtagcccgtaataccctgattggtcattattttaagtatagtgcagcgcttgggtgcgccgtctatatccacaaagcgcatatctgtaattttaaggtctgtcgggtttgagtatgtatttatcattttaacctccgaaaaaaatacgattgacttttaacctcacaaaagctaaaatctaattgtattataacatttcgcgtaaaattttcatcaactatattattatatttgcaaactatattacgattgggggaattaaattgataaatgaattgggagagatcggcacatccggcggcgtgcttttaaaaatgtgggaggtaatcgtacaaagcggcagccgccctttggtaaggcacagccatatacgctttgaaattacccttataacggcaggctcgggaatttacacggtaggcgataagaaatacgcgataaagccgtatgaaatttttgtatttgcaagcaacgaacagcactgcgtaaccgaggtgggaaaagacgggcttaaaatgataaacctgcattttgagccgcgctatctctggggcagaagctttgacagactgagtaacgtaaataccaatttctgctttcagcacagcccgaattttgaaaactgcattcccgctgaccgcgcgcggcaaattcacgggctttttatgtctgctgccgaagaattttcaaaaaaagagcctgaatacgccctgcaaattaaaagtctgcttaatatgattattgttgcacttattcgtgatttcggatatttcgacggtgcattgtcggcaccaacggataaaaaccgcattatccgcaaggcgaccgaatatattgatacgcattttcaggaaaacctaacacttgaatcgctggctcggctgtcaagccttacgccgaattacttttcatcgcttttcagtaaggtaagcggtataaagctttgggactatataaattcccgtcggatcgaggcagctatgcagcttttgaaaaatgaaagcaaccttaatataattgaaattgcgtcaaagtgcggatttaataacacggctaattttaataaggcgtttaaaaaaacggtcggaatcacacccggagaataccgcttaaacgataacattataatataaatgttgaaaatataagctttgataactaaaataaccgccgtctataaaatgaagtgaaccccttttgttagacaaagaagtgatatgtacccagaatcccggacacattaaaactaagtggaacatatagatgctattctgtatttaacggctctatcccaaattttgtataaacgcaaaagtgcggtaaaaacagaaataaatattttaccggcggcagcggtgaatccgctgtcgccatattaacaatatagcacagaaacgtccggtaagtcaagggcggcaaagccgtgcatttaccctttacttaccggacgtgatgtgctaatccggcatacagtcagcatagaaaaccgacaattgcgcgtgaatttgactccaatcctgccgtttgcccgtccacttttcagtaatgtctatcattgccgaatacagcattttgaaaagactgtcgtcggtcgggaacacagatttggattttgtgacctttctcagctgacggttaaagccttctatggcgtttgtggtataaatcagttttcgcagttctgccggaaatttgaaataggtgcttaa

SEQ ID NO: 3518 - DNA, 32759 bp, Unknown
  16S sequences of unknown bacteria
aattctgaatttaattttttaggctattatgtccatttgcttgctcaaacccttcaagcatagattcaaggataataccttctggggaatcgggtatatattccgttgcggaaagcaaacgcgtaccgttatctttcaaagtctttttgtgtatagccgtttcatacttattacgggaaaatcggtctatcttgtaaacaagaacgtaatcccaatgatttctcgcgctgtcttttaacatacgttggaagtcggcgcgattatcgtttgtacctgtcattgctctatcgatataggtatcgagtagcaaaatgtcgttgttcttcgcatattcttgacatacgcgaagttgcccttcaatggactgttccgtttggttatcggacgagtaacgggcataaattactgctgtttccatatagtttttactccttataatgtatttattttgtctttcgacaggagcaaccaaaacgaaagccgcatttagaattacgcttttttatatgtccaaaacttttatacaagggttgcctaaaagcaatgcactttacccttgtataaaagggcggtttcgtttacgctccgacagctcgaaagataaaataggttaaagtcttttttcgtctgccaatgcaagcagtttttctcgcgtaatattttctataatttccccgtcggcgtttacgcatttgaaatcgtccgctaaaatttgcttatattcgttattttccaaaggacaaattatatcgtccttgaatacggataaattaaaatgcgtaggacaattacgactaacgattaacttttcacccgatttttccatatattttttgagatagtaataacattccgtcaaatgattatccgtcgttatcacttcaaaatccgttctcccgaatttatcgttaaaatgggtgttttgtatcgtcgtttgcatacgcttttgctttgtactgtaatcacgctgttcaaacagttcgcctatcatttgtccggcggggatatagacgagcgcgtggaaatgtaatcgctccgtagcgtttccgcgttcccatacgcctatgtatcgccaatttttacggttgacggcgtgtttgagaaagtttgtaaacgtcttgcggaaagattcttccgtatgttttttgctatcgtaagtaacggttatgaaataattaaaaggaacgttgttgagtttcttccataaacgggcgttgcgttgcccttgattatgtcgaacgcgctccaactgcatttctacgaaagctatcgttttcaaagtacgggcgcaagccgtctataattgcgttttttctttcgtgataggttttgcctacgttggcaagaaagagcgtgttaaaaatctctttcaaatcgactacgattttctttgtttgcgctttctttttctctttaccgtcgttttctgcgcacgccttttccgcatatttgactacttcatcacaaatatcgtctttttcattctcgcaagtcgtggttgcttggttgtacgtagggatttcaatagtttttagaaactttttcggttttccctttttgaacggacagggttggggaagctgggcaatataactactgccgtcgaaattgaccttgcaattttctatcattgcttgtccttttcttttgcgcggtagagttcaaatacgggtattaattgtagagcgtcataaacttccccgatgtaagtcttgttcgggtattttaattcggaaatctttgaatttggtaaaaacatatttccaagaagtgattccaaactctgtgatgtgtacgccgactgagaatcggggaatgatatttatagatgataaaggaaaagagtaccgttttgaacaaaagggggtaaatgtttggcgcgggtcgttcgattattggcttttatcaaaggcactcgaaaaaggcgcagaaatccttgaaaatacatcagtggtttcttgtttgcaaaatacaaatggtatcgaagttactctttcgggagaaaaagaacgcgttgaatattgtaaacatgttatcgattgtgaaggcgctgcgggaatagtaaagcgtcgcctattaaatatagagaaaaaatatattttcacgtatcaaactttttatgaaggagatatagaattagacccgcactatttttatgcttacctgcaaccggaattttcggaatatgacgcatggtttaatgtcaaggatgaacaaatagtcctcggagtggcggtaaaagatgcgaaaaaagccgaaacgtatcatcggcgtttcgtctgttatatggaagaaaatttcggagcgtcacttcgtcggaaatggaaaacggaaaaatggttgatgccccaaatctgttccccgtatgaaatttattacggaaaagaaggggtacttttttccgggaaagcggcgggatttcttaatcccatgggggaaggaatatcgtcggctatagagagcggatttcatgcggcttgttctatacttgaaaactttgggaattacggggcagcccttgcaagttatcgtaaaaaaacgcaggagttaaaagagtatatgcaacggcagtggcatttgttgtctcttttgtcgaataaattcagcttcatgcgaaagcggagtgaaatcggaggtgaaaatcaatgaatttgaatagtatccatcatctggcaattatcgtcagcgattatcaaaagtccaaaaatttttatgtcgataagttgggatttaagattctacgggaaaattaccgcaaagatagaggagagtataaactcgatttgaagatcggagaatgtgagctcgaaattttttcgggacaaaaaaacccgccgagactttctgaaccggaagcgcttggtcttagacatttggcttttagagtatcaaatatcgaagaaactgttaaagagttagaaactcttgaaatttttacggaacctattcgtatcgatccgtatacttgtaagaaatttactttttttaaggaccctgacggattgcctttggaactccatgaataaaaaagagcctgtctgtaaattagacaagctcggatacaaaaatgtatttttcagaaaaataaaaactgtgctaccttttttgtcgaaatttaccgaagcggaaacactgtaggtgactccctcaaagctacctcatggcacacacaaaaatccgcttagtgctgctacattcctgtcctgacacggttcacggcatcgtgttgcatgagaccttgctatcaacgttccttacagtgcgcagccttccataaataccgccgggaaaggcgttcggttctgctatagcggattgcagatacagggtgccgctaactccccacctagcacagcttaatcattatacactatttacagcttttttgcaacctttttacggcagtttttttgtcgcttttcgggaagtataaaaatttctttcgaatgccttttacgttgacaaaataggaaagaaagagtataatatcagattggaaacaagacagacgaggagaaaaagtatgtcggaaaataattgtacacacgattgttccagttgttctgcaaattgttcgtctaggaacaaggaaagtttattaaagccccttcatgtgcagtcgtccgttaaaaaagtgattgcggtagttagtggtaaaggaggagtgggaaaatcactcactacgtccctgctggcctcatacgcgcataaaagcggaaagtctgtggggattatggacgccgatgttacagggccttccattcctcgcatgttcgggatcgacgaacgcgcgacgggaagcgaggaggggattaatacggttttaactccttcgggaatccagatgatgtctatgaatttgcttttagagaatgagacggaccccgtactttggcgcggagcgctcatttcgggaacagtattacaattctggactgatgtcatttggagagatatagatttattatttatcgatatgccgcccggaacgggcgatgtccctttaaccgtctttcaaagtattcctattgcgggtgtcgtcatcgtcactacgccgcaggatctcgtcaaaatggttgtagaaaaggcagtaaatatggcgaatatgatgaatattcctgttttgggacttgtcgaaaatatgagctggctttcctgtccggattgcggccggaaaattgagattttcggtcaaagcaaagccgcggcaatagcaaaagaatatggaattcctgccattgccaaaatgcctttggattcaagaatcgcagaatatgcagattcgggccggatagaagattacgagacggaggacttaaaagaaatctataaagcgattgaaagagcataatgtatagaaaaaaggacggctttaagcggagtgtcatagggaatttaggtaatttgaggagcggtatagcggaaatgctatgccgcttctcttttgtcttgcgtggggataagtatctgtcccacataattgaagtaaagttcaatcttctgcgtccgctttccgtccatcttttccgcttggtggacgaccaccttgtggacgaactctctcacaatttcaggcgtgagttcggttatctccgtatacttgcgcacgatacggataaacttgtccgtgttgtcagactgttcttttgcgcggagcaattcctgtttgagcgtggatacttttccgttcaactccgtttgttcctgctcgtaagaaagactcaacttcacaaaccgttcttccgtaagattgccgctcaccttgtcctcgtagagatttcggataatgcggtcaagagtttggatacgctgttcggcttcttcgagttctctcgtcttgataagcaacgcttttttacttgtctgctcgtcgtttcgtgtaagaagtgagataaactcactctcatactcttttgcaaaggataataacctctgcaaattggtgagtacgaaatgttcgacggcttccaccgtgatttggtgggaggtgcaggctttctttttcttcttacggtaggtagaacagttgaagtattccttttgtttcatcgtcgtacaacggcagagatacatcttttgtccacagtccgcacagtacacaagtcccgaaaaaatactcatctctcccatatccgtcggtcggcgtttggcttgtctcagacgttccacaatcctaaatgtttcctcgtcgatgattgcctcgtgggtgtttctgaatatcatccattcgtctttcggaagttctatcttctttttggacttatacgatttctttctcgtgcggaagttgaccgtatgcccgagataggcgggattggcaaggatagacttgaccgtttccgttacccaaacttcgggaaactctgattgatgggaagtggtaggcagcccgcactttctgttatgcaatacgggtgtgtctattttcctttgcgtcaatatccttgcaatctgcgtcggaccgtagcctttcatacaaagtgcaaagatttcttttacgacttctgcggcttcctcgtccacaatccataactgtttatcctgttcgtctttgcggtagccgtaaggcggcagggtacagagatgtttgcccgacattcccttggctttgaacacggcgcggatcttcttgctcgtgtcctttgcataccactcgttgataatattgcgaaagggcgtaaagtcgttatccacgctgctctcactgtccacgccgtcgttaatggcaatgaaccgaacgcccgcttcggggaaagtgatttccgtatagagtcctactttgagatagtcccttcccaaacggctcatatctttgacgacgatcgtcctaaccttgccgtcgtttacgtcgtccatcagtcttgtgaagtcgggacggttgaagtttgttcccgaatagccgtcgtccacatagaactgcggattggaaaagccgtgttcctgtgcgtacttaccgagtatcgccttttgatttttaatactgttgctgtcgccctgcaattcgtcgtctcttgaaagacgacagtagagggcgtcgattttatcacctccgtgaatgttggttttatgttgcattgaaagttgtgtgttcattccgtttctcctttggaatgcacgctttcaagcgagtcctttacgatcagacggatgagtttctctttcactccgtctttggttgtgccgccgtctttcacgacgacggtgtattccgttcctttgtaggtttctgtataagtataaagttccttttcgatatgtctctgaacagaaagccgagaactttctctttcttaaatttgatatatccaatatcatactcgctttcatttacagagaagagaagaagaactactttttagtttctgtgtagaagaaatcatcgtaaccgtctatcgtcttggcgagggacaaatcgttttcggcggtttcgtctgtcaacgctttatatcccgcttcgatgagctgtactttcgtatagccgtacttcttcaagaagtcgttgatttcctccgcgtactttctcggtacgctcgttccccaaatcatgctcttggcttttctttcttctctgtgcttgtcctcgtatctcttattgatgaccgacttcggtgttcccattccttaacgcctcctttgatggtattgatagtatatcgtataaatacgtcattgtcaagtaattgggctgatgtaattcagagagggacaagtctttttttgttgtgttcgtcctttgcgtggacgagatagaagagcaaatcgggtttcccgattgtgccctgagttttgcgcaagcaaaagtcaatcaaaatgcactgctgttgcattttcttatcctgccttagttttgactgtttttgcaacagtctgactgcctttttgccacaacttcattttccccttgcttacatagttgcttggcagtattaaccgctttttccttttaatccgccttttcgtccgctttcgcttcggtgtctgcttaaatcaaagctcttgcggaataacctgaaataactgtctatgggcgaagatagttccgttggctctgtttcgtagaacatatatccgcagacggctttgatgaactttcctgccacagcgttatctttcagggtttcaatcatccttgcatacgaagccttaaaggtgaagtggcgcatctgacggttgagataatacggaattttcccttgccgttctgtttccgttgcgtccgtaagtgtaggcaaaatgatttcccaaaagcagttttccgtttcgcttttacttggcggttcttccttttcaaagacggtgtatgcgcagattcttttgacaaatcttcctgcttcctcgtccgtgagttgactcaatacgtcgtagtacaaatcataaaatgtaaattgttccattcgttctcctttccgtttttcttattctcaatacacttttgtttcatctctgatagcattcatacaaaacacctcctcactataattggaaagttagagggtaaaagttcatggtctgaaagaaactttttataaatttttttcatttcttttgtcgatttcctcttaacactcctcgttactattggaaagtttcacaccgaaagtttgacgggttgaggaaaatttctcgaaaaaatttattttcccctacacttatattggaaagttatatcctcaaagtttgacgggttgagaaaaaaattcttgaaaattattttgaatttttacggtaagttacaattttcaaaaccgcgaatactatcgtccacatcagaaagacttgacattttggcaggacggcgatataataaccatatctaatatcaggaggagaaaatacggtatgtgtcctatttgcaatcgataattcggcaatatataaaatgattcccgttttgatacggggcttttgctgtaccgtttgcaaatattgtactctatatccgcataaatgtatctgcccttaaagaggcgattctcgcgcatattattgttatattgttgttcacaggtacagactcttttgaagcgtacctgttttttattgccgaaaataacagaattctattttcaatcaataaaaaggagaaactaccatatgacagatacaatcaaaatactattggacaccgatatcggcggtgatatcgacgatgccgtatgccttgcctatttattaaaagaaccgcgctgcgaactgctcggcattaccaccgtctgcggcgaatcggagaaacgcgccgcggtcgcggatgcgctctgtaaagcagccgacaaggatattccgatcgttgccggactggacacatctttacagccgattccctgttatccgacaccggacggcgcaaaggcgctgaaaaattggcgacataatcattatgaaaaaggcgacgcacctgctttcttatatcaacaaataaagcggcacccgcatgaggtctttctcatcggtataggcaatatgacgaatattgctacgctctttctcaaacatcccgatgcggtttctctactcagaggattatatatgatgaacggatacttcggacgaaagccgcttcccgatcctgcttataactggaatgcatgggcggatccgcttgcttcaaagatcgtgtacgacgcagccgtcgaaacgcacagaagcgtgccacttgagatcaccgaacaacttactctgcaagcggagcagaccgatatgttgttaaaggcggacagcccgttgatgtgcgccgtattggatttcggcaaagcctggcagatctcttccggaaaacttactttacacgatccgcttgccgccgtctgcgtctttcatcccgaagtctgtacgtttgagcacggaaaggtcgccgtggaaacagaaaaaaaagaacatctcggcaatacggtgtttacccccgacgaatgcggaaacgcagagattgcaagaacggtcaataaagaaacattttaccgtattttacgcgatacgttgtgcgacaaacgctttgttcttccgccgcgtgtagttgaccgagcaaaatccgcaggaagggcgggcgaagcatggctcgacagcctcgataccgtcgtagccgaactcgaaaacaagtggcatatttctgtggggcagccgcttacgggcggcagccatgctttcgtcgcgtatgcggacggcgaacgcggcgaacgatatacactcaaaatcgatatgcccgaaacgctcggcggagaatttgccgcgagcgtatctgccatgaagctctttgacggacgcggatacgtccgactgttcgcctgcgacgaggaaagacaagcctgccttatggaacggctgggaaagcgcgtcggcgaactcggcttgcccgtccgcgaacagttgaaaatcatttgcgacacgctgcaagagagctggcggacgcctgttcccgaaagtcactctttcccacaaggcagagagagtattgattggttcaggggcttttatgaagaaacctatgaacttctgaatcacccttgttccgaaaaagtgatgaatacggtctatgcgtttcttcaatcgcgggagagcgcttttgctccgtccgaatgggtgttgctacacggcgacgcgcacgcggacaatgtcttgcaaaatttatccggcgagggatataaactgattgacggcggcggaatcgtttatgaaaaagcctatgacctcggcgtaccgatgcgcgagtggatagacgactattatccgaatcctgcggaaagagtacgggaacgcagcaagtatctgcacgaattgacgggcgtaccagagcgagcgatctacgagtggggctttttacaaaccgtatccacggcatttgtattgttgcagacgggacgaaaagatttaggacataaaatgctcgatactgccgaaatctgggcggcgaaagaaaatggtaggagcggtcttgcccgatgcgttgcgcgggaatacgggcttctgcacgctgccgaaaatatgcttggcggtatacagatttctatcagagaataccgaccgtcagattgcgaagaattaacaaaacttttttacaatacggttcacacggtaaacgcgaaagactatacaaaggaacagttagacgcatgggcgacaggacgagtagattcggaaaagtggaatcggtcgtttttggaacattgcagtgcgattgccgttcatgacggaagaatcgtaggattcggagacatcgacaaaacaggttatctcgaccgtttattcgtccatgcggattatcaaaaaagagggattgccaccgaaatctgcgattatctggaacagacggttcaaggaagtattacaacgcatgcttcgataaccgcaagacctttttttgaaaagagaggctacaaggttgtaaaagagcagcaggcggaacgacaaggcatttatcttacatactttatcatgaaaaaggaaagataattttcgcgcagtgtttcaaatcaaaaaaacgggattcgaagttcattcggatcccgtttcttatgactcgctttcagggtgcattcccattaaaatttagtttttcaagttttccctatggaatacacccttttatccgtccttttttctatggccgtagcgacgtcttcgctattctcatatagacaactgagatatatactttcgtaaaataaagtttttatacggcaatcccgacaggtatagcttcttcctctgtctttgtttccgccgcagaaggcacaaattcaggacagggagcagacacaggggaggttttgatataatgcgcatattcgtaagtggagtttttacttctttcgagcatggtttcgtatacgaggtcgcgaagcttttttcgattgtcctttaaggaaaggtttgcgtcgggaaagaagggcccgtcgatataaaccgtcactttgggaagtttggaaaatttacgcttctgataagtggtggtaaaacagaatacgggcttgttttcctctacgggataacggaaggatacatccttaaaaggacgaattttcgtatagtaaggccaaatatgcgcctccggataaatgacgacgcagtgatttttttcggcgtggcgagcgacagcgtcgcagaatccgcgcatacctcgacgggtggtaggaattggcactccgcctaacatttccacagcctttccgacgacgggaatggatactccgtcgggattaatgataatataggcctttttcggaaatgtgaccagtgtaggaataaaggcgtccttgacggcagccgtatgattggcatagagaaaatatccgcgctttttatagcctttcaggactcggcgattctttatctttacccgaaaaactaacttttggctgagaaaaataatcggagtgacaatcaatcgatagagaataaattcaaagaattttttcaaaggattgcgcgaaaagtattgataatcggcgggaagctctttttgtttgatatttgttcccgcaaaatcatcattcagttcgtcgctataataatacgttttcatttaacttgcttcctcccgtctattgtattgagcaacattttttccatttcttccatacaggcggactgagaaaaactctttctcatttccgcgtatttgtcgacatattctcgtttcaaggactcgttttcgtaccagaaatcaattttttcggcaagcgccgccgcattcttttcctcaaaaagattgttttcatctatggcgaaaaacctcgtggcgctacgtttggaattacagattacagggactaatccgcaggcaatggcctccatgcaggaaatcgcttctatctctattaaggcggtatgcacatacaaatcggcaccgtgcaggagtgcagaaagctccgaacgagtataaaagtgaaattcgcagtccgcatgaagcgcttcggccttatgcttcaaacggctttcgtccggcccgcctccggcaaaaattactttaatgtctgatttatgccgcgataacgcaattgcttcaattagtgtgatttgtgatttttccttgctgtaacgtcccgtacagacaatcgtaaatttatcggagactcgtttctgttccccgaaccgaaaaaattcgtcgttgactccgttagaaattacccgtccctcagtagggtgcgcttccttttcaaagacttcttggataaatcgggtaggatagtgaatgacgtcgcaataacggtacacatttcgataaaaggttcgatagaccagtcgattcgcaaacggaacattcatcatgccgatatgagaggtaacgttttcagcctggcaatgaaagctcgcagtaagaggcttgtgcattttttttgcaagttttgcccccgttgaacctaaggaaaacggaaattgaatatgtaccgcatcggcgctttcgatggcttccgtcaatatttttttgtccgcttttgcaaggctgactccgtttcgttcgagaatattattcagaggaccaaaattcatttttcgaacaacaaaatgatttttttcaccgtccgtttcttcgtccgaggaaactaccgtaacttcatgcccttttttccgtaaataccggataaggtttaaggtggcgatggtagtgccattatttggttgtccaagtacatcgcaaattacggtaattttcatgcttctccttctcaattacatcagtaaaattcggctgtcttctatatgtatttaatttcagtaagttctttaatgtctgaaatcacttttttcaaagaactcttaaaagtatttaacgcccaatatttacgagaaacgttaatctttgcgaatttttcagattgcttcatctaaatctataatgtttttctgataggacatcgatgtgtaatttgtaataaaaaataatcaaattatgacatttgtcatctgtttatattatatcttttcctttacaggaaatcaatatccgtcgtggataatgtttttctaccgatatagaattatgagagattgcctttctccttttattcgagtaaaaaattgaactctactcacagtagaatttgccgaaaagaccgcttttggcttgattttttgggcaaaatatggtatattgaggacatggaaaatacagttaaaatgattgtggcaaaaaatttgatagagttgagaaaacgtaaaaattttacgcagggtgagcttgcggagatgctcaattattcggataaaacaatatccaaatgggaaaacggcgactccttgcccgatatttctgtcttggcttctctggcagaaatttacggaataacgctcgacgatttgattcacgaaaacgcggcggagaaggtggcggataaggcggaggaaaaaaaggctttggaacgttataatcaatggattattttaagtctgtccgtagtcgtggtgtttctcatcgctaccctgatattcgtctatttgaagttgaaggcgaatatcgactattggcaggcgttcgtgtgggcggttcccgtctcctgtcttgcgcttctttggaaaaaccgcaagtcggaaaaaggaataaaaatgagtaaggtatacagggcggtcgtgctttccgtgctttgctggtctctccttgccgcagtatatctccaacttttagaatacagggtttggctgattttcattttgggaatccccgtcgaattgattatatggctaagttcaaaattaaataaatagaaaaaagccccgaaaattttttcggggctttttttgaggttaaaatatttcagagaaatttatataataatttttatattgcagaacttttttatacgcttttattgatttttgattgagctaatgcataattgacgagtcccaaaccaaaaagttggagcagtaagtagacaacacccggatcgcctactttctttccgagcttatacgcccagtaaaaaccatatatccccaaagtaatgacaataaagagaatcgctattcctcccgaggccgtagcttcctcgacagacatttgattgctgtcgttcgtcagacacacaaaccaataaattccgtaaattcccaatgtgataatcgtaaatacaacagccaatacaatatttctttttttcatcttttatctccttgatttttcttctcgaatattctttcctcatgtatattatatatgagaatactcatattgtcaatgagaatactcataaattgttataatttttttatgattattgcacagagaatcaaagaattgagaagagattgcggcatgacgcaatatgagttggcgaagaaagtcgggtgtagtcaatccatggtggtgcgttgggaaaaagaagagtgtgaacctacggcgagttcgattcttgcgctttcttatgcctttgactgttcttgcgattatcttttaggaaagagcgatttttaatgtagaaattaaggtcagagggcactattgtgagtattattgtcaatatttattatacgggaaagaacggtgccgcacggaaatttgcggaggagatgatttcgcgcggaattgtgaaagagattctcgaagaatcgggaaatgagggatacgaatatttcctttccgtaaaaaatccggaaacgctccttttaattgatcgttggaaagatcggaaagccctcgatagtcatcatgcttcgcccatgatggaaaagattctggctcttcgggaaaaatatgatcttcacatgcgggtagaaagattcatttctgaagaaacagaaatttcaaatgaagatgaagcctttatccgtaaataatagaacttaaaacgaaattttttcaggacggaatatttctccgcgcagaggcaatcgatttttgacagaggcgctctacttcttgacttaaggggtaaaaacgtgttataataaaaaaaatatggcttttgttaaatgggcgatatcttgaataatcatgcgaacgaaggaaggaatacatgagcagagcagatcggatttttatagagaatatgacggatattatggaaagcggattttgggatacggaattggatgtccgtcccagatgggaagacgggactcccgcacatacggtaaagaaattcggtatcgtcaatcgttacgatcttcgggaagaattgcccattcttaccattcgtcgcaccgcattcaaatcctgtattgacgaattattgtggatatggcagaaaaagagcaataatatccatgacctgcactctcatatctgggatagctgggcggatgaaaacggctctatcgggaaggcatacggctatcagcttgcacagaaggcgaagtataaggagggggagttcgatcaagtggatcgcgtgctttacgatctgaaaaacaatccttccagccgccgcattatgaccaatatctataattttgcagaccttcacgaaatgaatctctatccctgcgcttactcgatgacatttaatgtttcgggggatactctcaacgggattctcaatcagcgttccaacgacatgctgacggcaaataattggaatgtgttacaatatgccgtcttactcatcatgttcgcgcaagtttcggggttaaaagtcggtgaactcgtacatgtcatcgccgatgcgcatatttatgaccggcatattccgatcgtcaaggagattttggaaaagccgcagcatcccgctcccaagctcattgtggatccggatattaaaaatttctatgattttacggtggatagctttaagctcgaaaactatgagtttgaaaagctggatacgaaaatcccggtggcgatatgattcgcgcgattttacatgccgaccgaaattggggaatcggtcggaacaattccctgatgttttccctgcccaaggacatgaaatttttccgcgagacgacgagcgggaagactgtggtaatgggcggaaataccctgcgttcgtttcctggcggaaagccgttgaaaaatcgtacgaatattgttctttcgcgagggcagagcagtgacgactgtatcgttgtgtccgatttggacgctttgaaatcggaaatgaaaaaacggaaagccgaggatatttatgtcatcggcggagcgtcggtatatgaggctctgttaccttattgcgaggaagtgctcgtgacgaaggtggacgcggaaggaggagcagaaacattcttcccgaatcttgatcgaaagaagcaatttgttgccgtcgaagagagtgagccaatagaagataacgggtatacgatacgttttatgaaatacaggaatacagaagtatgcgagctttgagatgtttccgcaaaatcacttttgcggaaatatttttatgttttttcggaatagaccgcagaatttgttgtcatatccgaaaaaaagtattaaaatagtaaagttaaaaagactgaaaaagaaggaatgacatatgattagagacgatttgaggaatatcgcaatcatcgcccacgtcgaccacggcaagacgacgttggtcaatcagatgctgatgcagggcggaatgttccgcgccaacgaacaggtgcaggatcgggtcatggactccaacgatctcgaacgggaacgcggaatcactattttagcgaagaacacttctgcgcattataaaggcgtgaagataaatatagtagatacgccgggccacgccgacttttcgggcgaagtggagcgcgttctcaaaatggtgaacggagctctgatactcgtggacgcggcggaagggccgcttccgcagacgcgctttgtcatgcagaaagcgctggaactccaactcaaactcattatcgtcatcaataaggtagaccgccccgacgcacggatttccgaggtcgtggacgaagttttagagttgatgatggatttggacgccacggacgaacagttggaaagtcccatcgtatactgctgcggacgttcggggacatcctccctcacgcccgataaacaggaggataacctcaatccgctttttgatacaatactttcccatattccgcctatggaaatggatacggaaggccccgcgcagctgttggtttcctgtatcgattataacgaatttgtcggccgtatcggaatcggccgtatcgagcgcggtaccgtccgagccaacgagcccgtaagtatttgcaattataacgacaataaagtgcgcacgaattgtaaaatcgccaatctctatcaaatcgagggattggaacgagtttccgtcccgacggcgaaagcgggggatatcgtggtgttttcgggaatcgacgggctgaatatcggggatacggtatgcgaaccgaccaaggtagaaccggtgcagttcgtcaagatagaggaacccaccgtggagatgactttttccgtcaacgacagtccgtttgcgggcaaggaaggcaagtttgtcacgacccgtcaactccgcgaacgcctgtataaggaattgctccgcgacgtttccctgcgcgtaaacgatacggataccgctgattccttccgcgtctgcgggcgcggtgaaatgcatctttctattcttatcgagacgatgcgccgcgagggatacgagtttcaagtctccacgcccaaagtcctttataaggaaatcgacggcgagctgtacgagccgatcgagcgcctcgtcgtagacgtacccgaagatatgacgggaccggtattttcgggaatgggcaaccgcaagggtacgctcgtgcacatgagcgcggtcggcagccgcatgcgcctcgaatttaccgttccctcccgcgggcttttcggctataagagcgaatttctcacggataccaaggggcagggaatcatgaactccattttctttgaatacgagccgtataaaggcgatatgcagcgtcgaaataccggttccttggtagcctttgagacgggcgaagcggtaacctacgggctgttcaacgcgcaggggcgcgggacgcttttcattacgccgggtacgcccgtgtatgaaggtatggtcgtgggatataccaatttggcggacgatatcaatatcaatgtgtgtaagaccaagcacctcaccaatactcgttcgtcgtcgagcgacgacgcgctcacgctgattcccgtcagcagaatgagcctcgaagaatgtctcgaatttattgccgatgacgagcttttggaggtgaccccgaaatcgctgcgtatccgcaagcggattttggacagcgaacttcgcgcaaaagcgagattccgcgaaaagaatctcaaataaaaaatcaaaaggggtataaagaaagaagtttcctgcatatcataaggtatgcaggaaattttacattcattgacaatcgaacaacagaaaagtattacggtcacgggtatagagagcgtttcagccttttcggaaagtcaaattgtcctttgtcttttggggaataatacgaaactatatgtgaccggttcggggttaaagattacgggcttttccaagacgagcgggacatttactgcgacgggcaatgtttccggcgttcgttacggcgggaagaatctccgcgcgaagctgttcaaatgacgggggcggagaatggacgcggcgaatcaaatctttgtttttctcgtctgcgttctcacgggcgtggcgagcggcgtcgtctatgaagttttctatattttgagaaaactttttccttcggccttctcgatagcgttcgacgttgcgttttttttagtgtttgcgggcatgagtatttttgcttccgtgctgtttgcgtttccgaattttcgggtatatatgtatctcggaaacgctttgggattgatattatatttgaaaagtatccatttaatagttgcttttttgtggaaactgtgctataataaagccagaaaggtactaaaaagacgaaaaagcacgaaaaactcaaagaaaaaagaggtgcattcaatatgacgcaggaaaaattaaaacgagtagttaccgccgctgcggtagcggggacgttagtcgtcgtctgcctgctcgccgtgattttgtaccaagttataaagattgtcgtactgaataacaggatcgataaggttgaggattccattgaatattatgaaaaacaactttccgaaaacgagaacaatttggctcattacgaatcggaattttatttggaacaggcagctcgtgagcacggattcatttatccgggcgataaggtgggaaaataatgaataagacagccgtaatcgatatcggttccaattccgttcgcctcatgatgatggcggacggaaaagttttatataagacactcaatactacccgtttaggagagggtatcgcttcatctcccttcttgaaagacgaagcgatttctcggactgcttcggctgtggctgacttcttttcgcgcgcgaagagagagggggccgtggacgtctatgctttcgctactgcggcagttcgttcggctgaaaacggctcggcctttatcgaccgcgtcaaagagctttgcgaattggacgtggaaattatttcgggcgaagaggaagcggaaatcgggattttgggcgccctcggcgaaaaggatggcggcattatcgatgtgggcggcgcgagtacggaaatcattattcgcgcgggcggcacgataatttataaaaagagcgtcaacatcggcgtcgttcgcttaaaagatctgtgcggtgcggaaaaagaccgattgaaagccgccgcggaggatgcggtaaaggaatacggaaaagttcccgatgggacttctatgtacgccatcggcgggactgccacgacgctcgcggcgcttacgctcgatatgcgggactacaccccgtcaaaaattacgggtacggttatcggtcgcgaacagatgcgggtgctcgcggacagactgacgggaatgacggcggcggaaatcgcgcgccttccgggcgtgcagccgaaacgggcggatgttttgggcggcggagccgtcctgttttcagtgattatggacaagctgaactttcccgaaattattgtcagcgacagcgacaatttggaaggatatgcgaaaaaacgcggcctgatgtaaaggcggaggaattatgaaacggatttttgcctctgtttattcgtggtttcttttaatacttatggccgcgggggaaattgttgtcgcgtttttctatgcatggcggcagagcggcctttccgcactcgtatggacgatatgcggattcttagctgcctgtattttagcgccgacgctccatgaatgcgggcatattctctttgccggatctcagggaatgaagataaaaatgacgaaattttcttttttccgcttttcggaaagggaggggaaactccgcttttcgcttgcgtcgccctttcggaccgaccagacgcaggcgattcctcttcggagcgggaatatgaaaaagcgagcggagctttatacgatcggcggccttgttttcggtggaatttacgcctttattctcttgctgttcgccctgcttttgcaagggaaaaatatagcttgttttttttggggcggatttccctatgccgcctatctgtttctgctcaatgccgtaccttttgcctattcgggcggaaagacggatatgctgattttttgcggtataaaaagagaattgcccgcagaaaaagcgatgctctgtgccatggaaatctatgggaaactgtatgaaggcaagagcttttctgaaatcgaacggggactgtattacgattttcctcagcttgccgaggacgagcccatgtatgcggtgatgcttgatttgcgctatcggtatcatatcgaaaagggagagacggagcgggcggcggacagtctcaaccgtttggcttccgcttcttcgtacctttcggaggaagagttttctcagaccgcggcggagctcgtatatatgcacagtctcgtcggggataaggcacgggcggaagaaagcggaaaacttgccgagcgttatttgcgggaagagacgccttcggcgtccagaattttggccgcgtatgccgcgttttgcggagatggcgaaaaggcaaaaattttgaaggaacgggcagagcgtctcctttcggaagaaccctgcgaagggctcagacgttttgagaaaattttattggaacgcatacggatataaaaatcgggaaatcgccctgccgcgttcgttggcggcggggcgatttttgtatggaaaagcatggaaatacaaacgttgcagaatatgagtcatatcggacgccttacatgcgttcggcatgttgaaatgttcgtcccgcatattgcgacggtgcggaacccgaccattttttgaaactggcgctgaaataattctgattggaaaaaccgagcgacaacgcggtttcttttacgcttgcacccgctgaaaggagctcggcagccttttgcatgcgcaggacgttataatacgtcattgctccgcagccggagtatcggaatacggttttttcgagtgcgggaatactcatattgcatagttttgcgagggtagccgcatcgagcgcgtcagaaatccgctcttccataacggaaaggatacgaaaataattttctgcgcttcgtcccttgtattcagaagcagcagcattgtcggaggatagggcggataaaaggaagagctccaaccgtttgatgacggcagaggcttccgcctctgcaccttcccgaatttttctgacgtcggtattttcgagctgaaaggccttttgcgcggctcgaaaaacggattttatctccgatacattatcgggggagagtgcaaatactcgccgggagatttcgggaaaagcgcttgaacggaaagaaaaaatcacgatttccggttctgtgccgcagtcggaccaaattgcgtgaaattcgccgggaaggtgtataatcatttgtccggcggagaggatatagacgtttttttcggcggtaatgccgactttgccgtcggtgacgcagactacttcggtaaaatcgtggctttctcccttgaaggcgtaattgtcgggaaattttctttttgaaaaagtgaatagagattccagggcgagtacatttttaacgggacattctcgataagcgggactttccatgatttgcctcaaaaaattatcgaattttatagatgtgtgataaaaaaatgtatagatttatagtattcgatatagtataattatagcagaccgaaagggaaaagtcaatacgaggtgataaatttatgaagacgacgttggtggttatggcggccggaatgggcagtcgtttcggaggcttgaagcaagcggaaccgatcacgacagacggaaagggaatccttgacttttccgttcacgacgcgaaggcggcgggttttgaaaaggcggtattcattgttcgcgaagatatggaggcggatttcaagcgcctcgtcggggatcgtattgcaaagacgatagatgtcgaatatgtcttgcaggatatgaaagatttgcccgaaggtcggaccaagcccttcggcaccgcccacgcgattttatgctgcgcagataccgtaaaggaaccgtttgcgatcatcaatgcggacgattattacgggcataatgcgttttttgagatccggaggcaccttgcgtccgcacgggcgggggaatacgcgatgacggcgtatcttctcgaaaatacgctcagcaaaaacggcacggtttcccgcggggtatgtgagacggaaaacggctatctcaaaaaagtgacggaggtcacgaagatcgcacccgacgggagctgcgaactgggcggaaagaaagtggtccttcccggcgatactcccgtatccatgaatctttgggggctgacgacggacatcttcgatattttgaaagaggaatataaaaaattcctttcgacggcaaatctctcaaaagacgaattttttattcccagcgtcatttccaaagcggtagatacgggacgggcgagcgtgagggtattcaaaaatacggacaagtggtacggcatcacctatcgggaagatttgcaagaggtaaaggacgcgatcggagggtatatacatgacggaatgtataaagacttataagcctgcggcggaaaatttttctctcgaaggagaagtgacggatattcgtccttacggagaggggcatatcaatttgactttactcgtaacgacgacggaaaagcgctatatcatgcagaagatgaatacgcgcgtatttcccgatcccgataatctcatgcgcaatatttgccgcgtgacggaacatttgaaaaaacgcggcgtggagacgctggacgtcattcccacaaaagacggtaaagcgtttctcaaaggggaagaatgttaccgcgtatatgcgtttattgaaaatacggtcacgtatcagcaggtcacggataaaagagtgtttttcaattcgggtaaagcgttcggggaatttcagaattatcttgcggaatttgatgcttccctgttgacggagacaatcccgcattttcacgatactcccaagcgtttccgcgattttctcgcggcgctggaatcggataaatgcggccgagcgaaagactgtaagcgggaaatcgactttttgctgtcacacaaggacacgtatgcgagggctgccgaggggcttgcggacgggagtttgccccttcgggtcacgcataacgatacgaagctgaacaatatactcatggacgaaaagacgaacgaagcgcgcgcggtcatcgatctcgatacgattatgccgggctccatgctttacgatttcggcgattccattcgtttcggggcatctaccgcggcagaggacgaaaaggatcttgaaaaggtgcatttcgatatcgggcttttcgaggcttatgccaagggttactgcggtgcggtgaaagacagtattaccgaaaaagagaaggaattacttccctatggtgcgtatctcatgacggtggaatgcggcatgcgttttttgactgattatctttcgggcgatacgtatttcgcgatcaaatatcccgaacataatctcgtccgttgccgtacacagttggcgctcgcgggagaaatggaaaaacagttcggcgaaatgggaaaaattgtcgaaaaggcaataaaatagaatttaaaaataagactaaaaagcagcggacaaattttgtccgctgctttttataacagaacaagaacgccgagaaccggagttttgttaaaaacgggctatgctggtggtcaaaaaaaggttttaacttcaagctgtgtaaaatatacaaaaagcccctttgtgttatatatgtaaggccgccaatcatacatgagaatagcacaaagagaacatggaattgaaaaatcaaaataatgacacaaatagtttagtttacacgatatggaaggggcaatacccatatatatttacctaaaaatattctggaacaataatctacgaggtgttgtgcgcagaaatagggaaaatattggaggaactatgcgaaaaaaagaaattggaagtagatttaagtactccgtcggtatttgcgcctttaagtcgaattctaaatcccccactagtgggggattttattaaagttttatcgataaataatcaaatcagttgttattaacttcgagatagtgtcatgagaatatcttgatgaaaattaccaaattcttttccgaaaatattgataccgcccatatgtttggcatcctctttaattccgatttttaattcgatacattttgctgtatctaaatgtagatcatcaaagcgatgatttttattatctgtaatatcatcgatataacacccctcgtcatctattgaaaatttcttcaaaagaccgaattgagtgctgttaatttgccaatagctcggagtataaattccgcgctttcctccaaaatcgcctggggaacaataggtcgctatttctacgtcgtttatccatacagtaatatcgctgggccaattttcgcgataataaggtgcttctgaacaacattcaaatgaaaaggatagcctacggcgattacgatcaagtataaacaaattggggaaattataggtgacgaaacccgattggaaggaaaagagctggcctttaattctttcgggcgaaaatagcatatatgaggaagaattctctctgaaaataaagccgtttccgtcagccaaatatgctttggaaacttcgcatctggaataacagccaacgggaacttcaactttgatttcgtcttctacggtctctttgacttttgtaaaaaatacggtggagagaatggttccgagactgcaaagtttcatgtgtcctttctgtgcaggtttatattctattcggattagtttggcctcttccaatacattgacatgaaaagagacagaggaaacaggcaggtcgaggagggaggcaatctcgacgatactataaggcttttcttgtaaaacacgcaagattttaagtcgttcgggtacggataaagctcttcccaaacgacaaatatccctttcgtctgtcgggtctgataacctataattgagaatattttcagcttccatttgtttgtccataattcacctaactgtttaagccaaatttccaaaaatattataacataaaattttatttttttcaagtaaatagaaaaaatgttaaaatttttctcgacaactcatttatgtataataaaatttacattaaacgttattctcaaaataagtatttcaatattattgtaataaatgacattcaaaaagtaagaaaaccgaagcctttttcatattgacacctaaaaaatttatgatataatgaaaatagtttgggaaaagaaggtaaataaaaaatgtatatactcaatattaaaaaacgatagtttaaggagagccaaatgaagagtaaattttttcaaaattatatgaaacaatttgacgatatgccgaaggcatttagaaagagtaaatatatctttgtatatttaatggtttctttggcgattgtcaattttatcgtcttttatgtggtagtcaatcttaattccattttactcgcctttcaagaatttatcggatatgatgaaaactacgtcgaacagtatgtctggtcgttgggaaatttcaagagcatgttcaaagaatttgcgcttccgaattctaccgtaggaatagcggtgaggaatactctgaaatattttgcgacgaatatttttttaatgattccggtttcttattttgtctcttacctgctatttaagcaaattcgtggttacggagtattcagagtcgtattttttctcccttccattatatctgctgtcgtttacgttacggttttcaaaaacctaatttcgacattcgggcccttatatatgcttttggataaagttttcggatatcagatgcctccgcttttaggggattcgaggactgctaccccgacgattattatctatacaatatggacggggctcggaatcaatatgattttatatcagggagctatgaaaaggattccgacggaggtcctcgaagcatgtcaaatcgacggcgggaacaaatttcatgaactattttatattattacgcccatggtttggccgaccgtttccatgacaatcattttagcctttacaggtctgtttaatagcagtggcccgattttactgttcagcgaagcgggaacggtggccgggggaaacgacaccactacgattgccttttttatctttcaaaagacgcaaacgggagctgccttggagtatcctgcggcaatcggaattttctttacggcagtaagtattcctatcgttatcgccgtcagagctattttcaaacgtcttgacccggaggtagaatattgatgtctaaaaagaagcatatcggtaaaaatgcactttcggtcataattttcgttttttttctcatatatgccattagcctattgtaccctttggtttgggcctttttatcctccttaaaaacttcgacggaatatatgctgaccagcaaggtggctttgcccgaaacgtgggaatttggaaattatataaaggcgtttaaggcgttggatatagaagggaacaacatgtttgacatgctttttaattctatatggtatacggtaggcggcgtatttttggggatggccgtgtctactatggtagcatatgtcgttgcaaaatataaattccccgggggacaaacgatttattggattgccctcgtcaccatgatgattccgatcgtaggggctatgcctgcacagttcaaagtctatacggcgctcggaattatcgaatctccgttgcttttgctcgcatttgcggggggattcggattcaactttatggttttgtattccttttttaagtctttgccttcgagctatatcgaagcggggtttatcgacggggctggacatttcacctgttttttgaaaattatgcttccgcaggcgattcccgtggtttcagcacttgcaatcgtctcttctattaatttctggaacgattatactactccgttgttgtttttgaaaaatttccccactctttcgtccggactgtatatgtatcaaatcatcaatacacggaatttggatatgcccgttttattcgcgggaatattgatgagtatgatacccattgtcgttctatttgccatttttcaaaattctattatggatatttcgctttcgggcggattaaaaggataaaaaataaaaggagattcttgatgaggagaaaattaatctgtatgttgctcactggtacgattgcatttagcgctttgggcgccgcgggctgcggcgactccggtagtaagcctttccccgtttatacagacgacaaagaaatgctgataggcgggtgggacgcaccgcttcctaccttggaggattatcaattagccaaggatatggggctgacatttatgttcttggacgatttgtttgtcaagcggggaactcagggttatgccgacgtactcgggtattgcgaacaggtgggattaaaaacgattctcactttgggaaatgccgctacgatggaatatgcggctgaatcttgggcagcagacaagacggattattctaaattccccgccgttacggcaatcaattattgggatgaaccctatttttccaatattgaaaggatagctgagctcgcggaagagcatgtcgaaaaatatggctccaaaatagatgtttttgcaaatctctatcccaattccgcgacgagcactttcgagggacatacctataatgaatatgtcgcggaatacgtggataaagttcttacaaaggtggaggacgggcatcgatacctgtcagcagatatttatccgttggataagggaaaggacggcggaagtgcgcttcggtcgaattggctcaactgtatagagaccgttgcaacgcaggcgaaaagagtcaacgcaattccacatttctttcttcaagccacggaacactatacttatcgagctgtgaatgaagaggatctccgttggcagttttatgtttatatggctttcggagttaaggcgtttacatactttacatataggacgtcgatactcgaagatttctctaattcctgcgtggacgcggaggaatcgggaaaaacctatcccgtctacgattatgcaaaaacggtcaatcgcgaaatgttgaattttgaccacgtttatctcaacttcgattggaacggcacaatgcctattcttggtacgcaaagcgaacaagattacaatatgaatttcgacggcctcaataatcctctttcttcgatagatgcgttgaaaggagcacaagcgactcaggacgcgcttatcggacaatttaaggataaggccggctatgacggactcgttgttgtgaatttcacggatccggcatacggactcaaaaataccgtaagccttgaatttaaggatgcttctaaggtaagagtatataaaaaaggcatagcttatgattatcaggtcctcgacaatcggtttgagcttgaactcggagtgggcgaaggcgtgtttatgattcctgtcgcataaagccgcttagataaaaaaacaaataaggagatcgtatgaaacaaacgggtatattaaaaaaattaggttgcgttttgctttgttttgcctgtaccgcttccgccgcttcctgtggagcgggaaatagaaacagcgggggaaacaacagtgcaggcggtaagccttccggttctatcagtgtcatttgttacgaagcgggattcggaacaaagtggctggacgaaatggccgaggaattttcttctgctctcggcgtgacggtaaaagtaaagaaaagctacgtcaatggggaactcatttctcttctaaacgacaattcacagaacgacgacgtggtcatggcgctgggaagcatgtttgctccgcaggattcgggatttttaactgatttatcccccgtgtataattctgtgccggagggagagacaaagacgattaaagagacgatgaatccggcgatttataataagcttctgacggaagacgggaagatttatcagatgaattgggcagatcccgtctgcggtatcgtaatcaataaaactgtcctggatcggattttccccgacggatataaagtgccgaatacgacggacgaactgatagaattttgtgacgaaatcaaagcggagggggtatatcctttttctatcagcacttctatcagttattgggattatctgcactgggtctggtgggcgcagtacgagggctatgacaattatatcgattattattggggatattatcaaaaagagcagcccgacggcacgacggtacgtactttggcagaaaacggggaagtattggatatgcccggccgtttggaggccgtaaaggtggctgaacggctgttaaagaagggaaatggatacatgcataaatatgctgattccatgacttggcaggaagcgcagattgcttttgtggggcagggatatgcgggtcaagatatgaccgaatcggcaatgatggtaaacggtcagtggttggaaaacgaagtacagagctatttgcttactaaaccgcaggatctcgcaatgataaagactccggtcatcagctccattgtcaaaactttggagaacaaatcgatgacggacgagacgttgagcgccgtaattgatgcaatcgacgaaggggaaacctcttattcgggcgtttccgataaggatttttccagaatttcggaggcacgccgtatggtttatagcgctacgttcgatcattgttgtgcaattcccgcaaagagcaaaaataagcctctggcaatggaatttttgaaatttatggcttccgatatgggacagagtatctatgcgaagtaccttaacgggctcaccatgccttacggatacgacgtaggggacaatgtgacggattttgtccgttcccgttacgaaaatttctcggactatattcccatttgcatcgatttttcatctccgctcgtttatagacagggccttacggcttatacgaccggaaacggagctggcctcgacggggttctttataaagggaatacggcggaatgggtaatcaacgacacaaagacgactttaatggcgtcatgggataaaattattttggccgcaaagcaagaaaaataaaaaaatggaggattttatatgatgaaaaagagaaatctttttttggggcttatcttgttacttttaggaacactttttgcattttcggcatgcggcgggtcaaagaccaaaggacttcgaattaatataccggaaaatacggtcttggaagcggagcttggtacttatgatatacccaaatatgatgtggtgaactccgagggactgattatggccggctatctcgttgaggtggaaagcgtcgtcggtcccgatggaaaagaagtggctgtttcttatggaaaaatcaatgtttctgctcccggaatttatgtcatcacttattctgttgacgggggggggtagaaaatgcttctttgaaagtgaattttgccgatcgtaccccgccttcggtaaatatggacgacgatgctttgcccaaattttatatttccggatttacttacagtttgcctcaatatacgatttccgacggccccgatatgtctaaatgctggataaaggtatattataaagcggacgcgacaggggacagagttgaagtgactgtggaaaatagtcaatttgaggtagagcataacagcggaaaatatattattgtgattcacgttgaggatgcggcgggaaataaaaaggattacgaatatgaggtggaagcgaccggcccttccgaaatcatagacggcaaagttctgtattcggacgaagaatttggcgtttctcaggtaaagactctttggaataatttccacctttcttacagtacggaaaaggcttacggaaaagaaacgggttctttgaaagtgaccgttcccgttacaggcggagattatattattctcgaccgcattatcgagagcgatataagcgattatacacatctcgtaattcgtatctacaacgataacgattaccctgtatattccggctattgttggttcggagacattacgctcgcgcccaaaacatggacagagttaaaagtttctgtaaaggatttggatacccaaaatgtaacgcacccgtctgttgccggaatcgtcataaatagtaaaaacatcactaatctttctttgaggttgttcgacgattatgcggcaaatacggtttccggagggagtacattctatctttccgcaatgtatgcggtgacggaagcgcccactgaacccgaaactgtcgtcgaagataaaatcgcatattttgatgaagcgttcggtatggagcaagtaagtctttattggcctgcccccaataaactttctttggataccgaaatcaaatatgacaatgaaaaaggttctttgaaagtagagtttctttccgtacaagccgacaattatgttattttgaatacgccgttcattaaagacgtatccggatacgattatcttgtattccgtgtctataatccgacgaagcacacgtttagtgtaggtacgacgtgggcggcagatacgacaatttcggccgaaggctggacggaagtgaaaatccccgtcaatctatttggggaaagtgggacaattacagatatgaatggcgcaaaactttccgcgacggatatttctgcatttccgattcgtattttcggggcaggagagtttgttgccggggaatattttaacatttcttccatgtacggcgtaaaggcggaagaaacggttagagaaaatgtggtacttaattttgatgaggcctccggacttgatagagcgtccttatattggggtgatccgaataaactttcttacgatacgtccgtaaagtatgaaggagaaaagggctctttgaaagtggagtttacctccgtacaagatagtaactacgttatattcaatacgccttgtattaaggatatttcaaattatgattatcttgtattccgaatttataatcccacgaagcatacattcagtatcggaacgaattgggctgcagatacagtaattgctgccgagggttggacggaagtgaaaattcccgtaaatttgtttggagcagatggaaagattgaaaatatgtcgggagaaaaactttcggcttcggatattacaggttttgtgattcgtatttttggcgcgaaagattttgtcgcagg

SEQ ID NO: 3519 - DNA, 3305 bp, Unknown
  16S sequences of unknown bacteria
cggtacgtgattttttcggtttcctgcatgagatcattcctttcgtgtttatgaccggatgatatacttctcgcggtccttttataaaaaataaataatcgtggttttatttccacacattaattatagcacatttttatgaacatttccatcactgcgaaaaaaactttccggcgcggcggttctgcgccggaaagtccggcggtgttttttcagagtctttcggcgagcttcgcgagggccgccgcctctatccggctgacgtaggagcgggagattttaagcctttcggcggtttcgcgctgtgttatcggcgcgtctccgttcagaccgtagcggagggtgatgatttttctctcgcgcggggtgagggcggagtttatgatgtcgatggctttcgcggagcgtattttcaggtcgaggtcgtcggcgatggtgtcctcggtcgcgatgatgtctccccacgtgagcgggttgccgtccttgtcgatgtcgatggtttcggagagcgagacatcgttcgagtaccgccgctgagagcggaagtacatcaggatctcgttcgtcaggcacttcccggcgtaggtggcgaatcttgagccgatcgacgggtcgaaggagtcgaccgccttgatgagcccgattgtcccgactgagacgaggtcgtcctcgctggcgggggttgagtatttcttgacgatgtgcatgacgagtcggaggttgtgctcgatgagctcgtctctggcgctcatgtcgcctttttcgcgtaggagcctgaagcattctttctccctttcggcggagagcggcggcggaaacgagctcatcccgccgtagcggacgcggagaaacaggaagaggactgactgaagggctgattgtaaaagcatttcatcacctcgggaaatatatttcatataagtatattcccgtgacgtctcgtccgattccgcgggggttattctcttccctttatggtctttatgtaaatcttttttatgtaaattttgaaaaatgtcttgcaatatatcgagcgatgtgctatacttaatgaaaaagcccaaagtaaggagcagcagaatgataagcaataagataaataaccgcttcatcccgccaacccccggcaagctgaggctctccggaaaaattgccgatcagatggagacctttttcagagagcgcgtgacctccgactacgcgcgcgacgtgatactcgccgagtgcgaggagcagttcaggctgcgaaacgacgacgagaccatcgtcggctactggcgcggcgagttctggggcaagtgggtgatttccggctgccgtgtcgcgaggtacgagcgggacgagaagctgaaagagacgctgcgcaaaacggcgctcaacctgatcgggaccgccgacccggacggttacatcggcacctaccgcgataaaacaaatttcatggcgtccgaccccgaggagacgaagaaggtcgtcggctggccgtgcaattggaactggaatctctggtgccgcaaatacacgctctggggcatgctcgaaatccacgacctgaccggcgacgagaaaatactttcggcggcgagaaaattcaccgaccagtacatcggtatgcttgaagagcataatgtccgcccgggcgaaacaggaacgttcaacggactgccgacctgctcgatcatgaagccgcttctgattctctaccgactgaccggagacgaaaggtacctgaatttcgcgctttcgatcgcggacgactgggagcgcgccgacgggcacatcccgaatctcatcagaaacgcgcttgagatgaagccggtgcacgagtggtatccggagtcggaaaaatgggcgaaggcatacgagatgatgtcctgcctcgacggtctgctcgagctctaccgtgtgaccggagtcgaaaagtacctgaaagcggtcgagaatatgtatatactgctcaaggagaacgaactaaatcaggtgctttcggtcggattcaacgatattttcgcgcacgcgtcggagtacccgaactcaatttccgagccctgcgacgtcatccactggatgcgtgtctgctgcgagctgtacacgctgaccggagattcgcaatatgtggacagcttcgaggaggcgtattataacccgttcttagccggagcgttcgcggacggcaagtggggcgcgcgcggagtgcggagctcggggcggcacatggtcgcgaccgggcaggcgggcatgaagcacagccactgctgcgtgaacaacctgccgcgcggcttcctgaacgcgctcgacatgatcgcctgcgaatcgaagcgggggctctcggtcaacctctactctgagtgcgagggcgaggtcggtaaatacggtctgaaaatcagcggcggctatctcgaaaacggagagctgaccgtaaaaatcaactcgccggaaccctcagaggcgactttccgcctgcccggctggtgtgaaagatgcgagataaacggaacagatttcaggggccacatcactctgccgctgaaccccggcgagaacaccttcaatctgaaattcgaaatgaagccgcagacgaaggtttttccgggcaatgctgagcatttcccgaatagcgatttccggaccgggcgtttcatcaacggaaatccggtgcgtgaggaggacatggtgaccgaccgccgcgcgacggtgcgttacggcgcgctgctgctctgccgctcgaagctcgcgggcaacagcgaggaggagatgttcgacgaagaaactatcgtcggaagaaaacggatcaattcgatcgagccgataaatccgggcgaagtgcggaacaggttccgcgtaaaattcgacgacggcagcgagacgacaatgtgcgacttcgcgacgggctcgaaccgctggtcggagaacgacgacagactatttacgatatggatgtgaatattcagccatagctgatgaaagccgcccgaaagcactcttccgccgggagtggaaagatgtccaaccgcgaaaggcgtcggtcatcggggagatgacgcggataaaggccgtaaacaaaataaaaattccaccggagatcggcattacggtctccggtgagcttttattcagcgggcgtcagtggttcctgtcgtcttcccggcgctcattctcataaccttcttccctctcccctcaaattcccgcataagtatctccgcatgcaccccgggcttgtccccgcagacgaggagcatatcggcgttttcggctatgtatttgtcggcgtcgtaagcgtatatgtcctccccgaagagttc

SEQ ID NO: 3520 - DNA, 6859 bp, Unknown
  16S sequences of unknown bacteria
caggcggtcgacggcggcggcgggatagagtgtatcggaaattgtccgcacatcccagagcaaacacgacggctactggtacgaggatgagcgtcacaacaatcagcaacgtaacgaaatgttgttcaacactccggggtggtattggtgtgatgcggactcgttctatcgctcactctttccagagggtagcttgcagaagaagggcgctgattcagacggtaagcccaatctcatcgtcctggaagacacgggtaaggagattgaccatggcaccgacgtgaagggcaataagctcgttaagcgcgtcatgcatcgctatacggtccacgacgatctcgacgagcttgagcacctgagagacgtgtccatctcacagaacactttcatgtttctcgccccggtcagttactacggcaagagtcgtaacagtaagaatgctcgttttctgcacgcaatcatgatcgacctcgattacgtcgggactaggcagctggtgaacctgctgcacgagatggagcgcggtgtcattccctatgcaaactatctcgtcagctcgggaaccgggcttcatgtcgtgtacaagctcgatcgtcctgtgccactcatgacccggtacgtcaccgggctacaggttttgaagcgcgaactgaccgatagggtctggaacgccaacacgagtgacagcgaccctgacaagaagcagagccaaggcatattccaggggttccgcatggtcggcaccgcgacgaagctcaacggcgatattggtaaccccaagtacaaacaaccctacgctgtcgaatgtttctcgcacgacgagacgccgcccgccaccatcccttacttgctctcctttatcccgaggctgagggacaaggaggagatggatggtctcgacgcgctcagcgccctcacgaaggaggtccgaaagacgaccccgatagccgaggctaaggagaggtggccggagtggtacgagaaacatgtcgtcaacgacgagcctttgggcggatggctgtatggtcgcgcggcctatgaccgcgtgctgagcgtcatcagggagcatgtttcggtgagtcaccgctactggtgcatcttctacctggccgtcatggcgaacaagtgcggcgtgccccaagatgagcttgaggacgacgcttacggtcttctcgagcggtttgatgccctatcagtcgagcctgacaacaggtttactgctaacgacgtcgcagcggcccttgaggcctacgagggcggtttggcatcggggagggcgaggcggtacacccaggatttctgcgagcgcaaggcggctgtcgagtacggcgagaagatgggacatgggagcaacccgccggagaaacggcttccgaaggacttgtcgctcaagaaggccaggtacgaacgtgatctcaagcaggagatgaatggcaccacctggtggaacaaggacggcgcaccgaagaaggccatgcaagtatggcgagctgcagccgagaatcccggcctgagcatcgccgccctcgcccgcaaggccgaggtctctaggccgactgtgtacaagtggcttaagcctggctgggaagccgagtatgccgcggcgacgcgcaaggatgaaacatctcgacccacgccgcgaccggctcggcacaaagtcatcgaggagcaggcggagcaattcaagaggcggtacgctgaggacagcggcgcgtttgaggcaatggtcgttcgccacatcgcctcacacccatgggagccgttcggccagacggcggcgtttttcggcctatccgatgccgctgccgtcgagaagatcgcaagcagaaataagaccgagcttgatagggcaaagctcggtcttgatgagcgtttccgcgcgtggaactctgagactgacgactacttcgacgccatgaccgcggctagggtcttgggcaggttcgatgagttcatgactgcccgtgcgagcggtgttcagtcatcgattgaatgggcgaggagtgagatccctgccgccttcgcacgtctgcaagagattagggctgagggacgtcagccgaccgccgaagatcttgtcgcagtaaaggaaatgtatatacactctatatagagtgtatatactatctatatagacaaaacgaaggggaaccgatgatcatctcgacaatcaacctgaagggcggcgttggcaagacgaccacggccatagctctcgccaccgccgccgtccgcgacggcaaggacgtcgaactgtacgactgcgacccgcagtcgagtgcgagcctctgggctatgatggccgaggaggccggggacccactgcccttccccgtcacgcccgccaacgtcgcgaccgtccgcatgtctggacgcaggctcaagggaaccgaggacaagtggctcttcattgactgcccgccgaacgggcgcgtcatggacgaggcagcggactgctccgacctcatcgtcgtcccgaccacgaccggaccagccgacatggtgaagacgttcgagacgacggacaccctcggagcgaggggcttcctattcgcaatcctgctcacccgcgtgctccccggcaccctcagtctcaagcagtccctcggtgagcttgcggaccgcgacaccagctatttcgactaccagattcctagccgcgagggcttgaagaacttcttcggcaattccttcggcgatgacctgtacggatacgagaaagtctacgagcagattaagcagagcatcaaggaagacaaggaggcctacggtgccaactaagcgaccgcagcgccgcaccgccaccgtggcggagacggcgagcaggaccctcatgggcaatcaggacctccagcacaagggtgactcgaccaactcgcgcaagaaggacaagtgcatcaccttttgggtcactgacgagcagaaagccgagatctcggcctacgccgtcgagcacaacacgaccgtctcgcgccttatcgtcgagggcctcgagttgcggatgaagcgagattagttatatagaaagtatatacactctatatatatcctatatagagtgtatatacattaaggggcaatgatggcaaagagcgcgaaccttggcgctgcaaagaacgcaaagcaggacgagttctatacgcagctgagcgatatcgaaaaggagatgcggcattaccgtaggcatttcaaagacaagacgattctctgcaactgcgatgatccgttcgagtcgaacttcttcaagtttttcgtgctcaatttcaatcgtttcggccttaaaaaagtcattgccacctgttactcgggttctccaattgctgggaagcagctgtctctattcgatgttcttggtgattccgctgaaacaagaaacaagccttataaagcagttgtgacaagcgtctatgacaagacgggcgacggcggcgtggatatgttcgacgttgccgagcttttcaaatcgcatgagaacgagttgaccgagcttgatggggatggtgattttcgttccgccgaatgcctgtcgttgcttgatgaagccgatatcgttgcgactaatccaccgttttctttgttccgcgagtatgtgacaacgttgatggagcacaagaaagatttcatcatcattggcaatcaaaacgccattacctacaaagatatttttctgctcatgcaggaaaataaaatgtggctcggagcgccgtttcaagccggaaacgcttatttctatgtccctgaaggtgccgatacgtcgcagtatgcgaaaggcgtttttgatccagagacaagacgcgtcaaattccgaaattgctgttggtatacaaacctcgatctaaagctccgacacgaggaaatgcttcttgttaagaggtataagcccgaactttatccgaaatacgataattacgatgctattgaagttgggagaatggctgacatcccttgcgattacaaggggatcatgggcgttccgattactttcatgaatagctattgccccgaacaattcgaaatactcggacgacgcggagaccttgagtgggccgagaacgaatgctctttctatacgccgccagcgcctgaactccaacagaagtacaaggcgatgaaccgaacttggcgcgttcagaacacgtacattctcgagaacggcgtgccgaaaatcacatatgggcgaatctttatccgttatacggatgaatggattgaggctcatccagatgatttcgcaaagaaggaggcctagccatgcgcatcgaggagcgaaaggttactgtcggcgaggtttgcgatgggtacttcaacgacgctgaggagggcgttgtcggttacggcgagcgtcttgacattcgcccgaggtaccagcgtgagtttgtctacaaggacaagcaacgcgacgaggtgatacgcaccgtcatgaagggcctgcctctcaacgtcatctattggtgcaagacgggcgaggactcctacgaggtcctggacggccagcagcgcaccatctcactgtgcgagtacgttgacggttctttctcggtcgatgacaagtacttctacaatctgcccgaggaccagaagagaaaaatactcgattatcggctattcgtttacgtttgcgacggcacggactctgagaagctcgactggttccgcattatcaacatcgcgggcgagcagctgactgaccaggagcttcgcaatgccgtatacgccggctcctggacctcagatgccaagcgttacttctcgaagaccggatgcgtcgcatcgacccttgcgggcgactatctcaagggcacgtcaatcaggcaggagtaccttgagacggccatctcttgggccgctgccgccagtagcgagaccatcgaggcctatatggcaaagcatcagcacgacccgagcgccgtgtcgctctggaactatttccgctcggttatcgactgggtccaggccatattcccgaagtaccggaaagagatgaagggccttccgtggggcctgttctacaacgagcacaaggatagaaccgaccttgatccgaaggcccttgaggccgacgtctcgcgcctcatggccgacgaggacgtgaccaagaaaagcggcgtctacgagtatctgctcacgggccaggagcgctgcctgtcaatccgcgcgttcgacgaccgcatgaagcgcgccgcctacgagcgccagggcggtgtctgcccgtactgcggcgaacacttcgagctttccgagatgcacgcggaccatataaagccatgggcaaaaggcgggccgacgacagccgagaactgccagatgctctgccgtgactgcaacctcaggaagagcgacgactgacgggttgctgacgggaggtccgtgccgatgcgggcctaatcggccggttcgtcacggcgcgccgctggaccgctgcccgctttctccgtgatacaggacgccaggccatcggcaaggcgactgatttgggtcgcggcgtactcgacgatcatctccggatcctggaggtcgccgcgggatgccgcgaggagtgtcgcggcgagcccgcgcatctcgtatacgacatcgtagaactgtccctgttcttcatcggtcatggtgtgtctcccatcattagagtgtcccttcagtatgtcataatggaacaaatgttcgtactaatggggaggagcggccttgtttcataagcacagcctggcgggcacatgcggaataccggtcgaggagcggcgaatctacgttgacgtcgatgccaagggtaccgtcgaccccaaccatggaccggccgacccctgggttatccattgggccgacgggcgatcgtggacggtggagagcatttatacccgccgagagtacggccgcgcgatattcggcaacctttgcgtcgagatagacgtctgtatcgccaagcagcgaaagacggtctggtgggaaaacggcagatggttcgttgccaagggttccggcatggcggcgacggccatatgagggacgtcttcaccggcgagtgcaccgcccggtcggttgggcccgatcacagccgtcgcgcccacaagcagtacgtcgacgtcatggtgaggacatcgagttcgggcgaggttcgcccgttcgcggtcctctggcccgacggcaggaagttcctcgtcgacgagatccttgaggtcgcacctcccggtccggtgctgaacggaagcagcagccagtcgtacacggtgaggttcggccggtggaagactgccatgtatctcgaaaggtcggttgggcgaaacctggcggatacggtccgctggtgggtctgggccttcgactcgatggagatcaagaatccggtcggataaacggcactcggttcgtgcccggtgtttccggcgcacctgaaaaaacaactcctttccttcgggcccgccggcaacgggcctttttgctgccgcgacacggcgtgcgccggcgtatggccacggctccgcggccgggtggcacctccgctacgccgcgtcaagggggcccatgagaccccgcacaaacctccgctccgctccggttggtggaggtcgtcatggacctcccttgacccgccttcgctccggtgcggctttgcagggagcaaagccgacgacgacgcgcggcgtcgccattcggctttgcccgcaggggcgagatgttgagggcagggtgcccggaacggagggaaagatgcagcagctgatgacgagggaaatcgccaagacggtgccgaggctctacgagcaggacggggcggaggaccccacggtctacgcccactacttctcgtgcgtgagcggatgggactggtggctgctcgagttcgacggcacggacgaggcgttcg

SEQ ID NO: 3521 - DNA, 7917 bp, Unknown
  16S sequences of unknown bacteria
taaattccaagattttgtagaatccgtccgaatccctcagttcgcttttgaacgcgagctcaatcgggcgcgcctcattggcgggagtcattttctttagcatcactgaaagcgaatattttcccgagggtaaatcggctgagggtattttataggtctcttttacgggtttgttaggctcccacttgcggttgtcgcactcttttataggataagttttttcaaacttcccgtcttgccccgcaatttttacaaaaagcacatagcggttgaacgcgtgagcagctcccttattttcccattcaagagtcagttttccgctaccagaatcaaagtcggcggaatttataaaataccagtatccgactttgttcgccatctccttcaaaaagtcgggattatctttcgcgtaatcttccgcgtatccatggtacccaagatacgtgcagtgcgcccgcttcactacgcgcctaagcgccgcagctccctctttttcgccgttgcgacccttccaagtgcctctttctttttggtggctgtaatgcgctaattcaagggttgcggggcaatcgctgtatgtgtcgtcaaagaattctgggtgcgctaacgaatccttgcctttattcacaggggcaaaatagtaccattctacgagtatggaatcgtcccgatagccaattttattctttttcacatactctcttgccgacattaaatcttcgccttttaaattgtagctcagccagtcgtcgcctattgtaagccggcttttttcatagcactttttatataaatcaatgtgtttttttatcgtttttagcggaactctaattttgcttgaagacgaatagtggccctctccccagttccctatgctcgcaagcgtcatatctactatataagacttgccgtcgtaccgctcggctatcgccttgtgcagtttttcaagcttctctaaaaatatggggtcctcattcacaggctctactatttccttgccgtatctggtctttaccaaattccccttcgcgccggcgtcaaacacccatttcggagttgcgtattttatacctgtctcattgcaggttatcgaaagcgacacctttacgcctttcccgtcataccacttttttactatgtcgtctatcagcgcccagttaaattctccctcctcgggctccaaatagctccatgcaaacctcaaaaacaaatggtgcatgttcggtatcgcagcaatcgactcgtcggagctcaaatacttatcaaggctgttgtcgtagtaatggtgataccaacccttgtcgggatttgacaacacccgcgcggaatcctgcttgccgcgcaaatcctccgcgaccgacactccagacgcaaccgcaagcaatgccacaagcaacgcaaacttccgcatctcaattctactttttaaattccaagattttgtagaatccgtccgaatccctcagttcgcttttgaacgcgagctcaatcgggcgcgcctcattggcgggagtcattttctttagcatcactgaaagcgaatattttcccgagggtaaatcggctgagggtattttataggtctcttttacgggtttgttaggctcccacttgcggttgtcgcactcttttataggataagttttttcaaacttcccgtcttgccccgcaatttttacaaaaagcacatagcggttgaacgcgtgagcagctcccttattttcccattcaagagtcagttttccgctaccagaatcaaagtcggcggaatttataaaataccagtatccgactttgttcgccatctccttcaaaaagtcgggattatctttcgcgtaatcttccgcgtatccatggtacccaagatacgtgcagtgcgcccgcttcactacgcgcctaagcgccgcagctccctctttttcgccgttgcgacccttccaagtgcctctttctttttggtggctgtaatgcgctaattcaagggttgcggggcaatcgctgtatgtgtcgtcaaagaattctgggtgcgctaacgaatccttgcctttattcacaggggcaaaatagtaccattctacgagtatggaatcgtcccgatagccaattttattctttttcacatactctcttgccgacattaaatcttcgccttttaaattgtagctcagccagtcgtcgcctattgtaagccggcttttttcatagcactttttatataaatcaatgtgtttttttatcgtttttagcggaactctaattttgcttgaagacgaatagtggccctctccccagttccctatgctcgcaagcgtcatatctactatataagacttgccgtcgtaccgctcggctatcgccttgtgcagtttttcaagcttctctaaaaatatggggtcctcattcacaggctctactatttccttgccgtatctggtctttaccaaattccccttcgcgccggcgtcaaacacccatttcggagttgcgtattttatacctgtctcattgcaggttatcgaaagcgacacctttacgcctttcccgtcataccacttttttactatgtcgtctatcagcgcccagttaaattctccctcctcgggctccaaatagctccatgcaaacctcaaaaacaaatggtgcatgttcggtatcgcagcaatcgactcgtcggagctcaaatacttatcaaggctgttgtcgtagtaatggtgataccaacccttgtcgggatttgacaacacccgcgcggaatcctgcttgccgcgcaaatcctccgcgaccgacactccagacgcaaccgcaagcaatgccatcattaaagcaattctctttttcatataatatgtacataaaaaagtaagcctttatgccgctgcggtcaacattcaaaatactttactgttcagataatggaacaaataagccttcttactatctttttaccgcgcaattaaaaaaattccgtaaaattttttcgaggacttagattttagtataatgggaaaaagagctttttttgtaaaaaacttaaaaatcccattccttatattgtcggtttttatgcgaaaataaaaaaaccgcggaattttctgccgcggctttataaaaatatgcgatgcaattagtgagtcgcaatctgcctcgattttgcgacggcgtagtccctattcatcttagcgatgaaatcgagagttatgcccttcgggcatgccgcttgacactctccgtagttcgagcagttgccaaaaccgagttcgtccattttctcaaccattgctatagtacggcgatccttttcaggagcaccctgcggcagatagttgagctgtgaaactttcgcgctcgtaaacagcatagccgaagcgttcgggcaagccgcaacgcaagcgccgcaacctatgcatgcggcggcgtccatcgccttgtcggctatctctttgggtatgagaacagcattggcgtcgcgcgcagcccctgtgcggacagatatgaacccgcccgcctgctggatttcgtcgagggcgtcgcgggaaacgatcaaatcctttttaatcgggaacggccccgctctccacggctctacgacaatcgtatcgccatctttaaacttgcgcatatgcagctggcatacggtagtcttagcctctgggccgtgcggtttgccgtttatgaccatagagcacattccgcaaataccttcgcggcagtcgtggtcgaacgcaatagtttcttttccctgagcgacaagctgttcgttgagcatgtcgaacatttcaaggaaggagctgtcggggctaacgttatcaacagtgtgggtgacaaaacggcctttttcgttggcgtttttttgagtccaaattttaagatgcactttcatctgtatttccctttcggttttatttgtaggagcgtacgacaggcgcgacctcttcgtgcgcgataggctctttatttaaaatcggcggcttgccctcgcctgcgtattcccatacaaaagcgtaggaatactcggcgtcgttgcgcttcgcctcgccgtcttccgtctgatattcaacgcggaagtgcgcgccgcaactttccttgcgctcgagcgcgtcgcgaaccataacctccgcaaattcgaggaagtcggcaaccctgccagccctttcgagttcggcattgattgtatgttcgtcgccgacaacgcgaacgtgcttccagaagtcctcgcgtatctgaggtatcttttcgagagcttttttgaggctttcttcagacctcgccatgccgcagagttcccacataactttgccaagttcgaggtggaaatggcgcgggctcttgtcgccctttacgttcagcagcttttgaatgcgcgcctttacgccgttttccgcttcggcaaattcgggaagatcggtagagatgttcttggcgccttcctgagcgagatagttggggagcgtataaggaatgacaaagtatccgtctgcaagcccctgcatgagagccgaagcaccgagcctgtttgctccgtggtcggagaagttcgcctcgccgagaacaaagagcccggggatagtgctttgcaagttgtagtcaacccaaagcccgcccatggtgtagtgcgacgccggatatatgcgcatcggaaccttgtaggcgttttcgcccgtgattctctcgtacatttcaaagaggttgccgtacttttcctcgatagtgtggagcccgtcgcgctttattgcgtcggcgaaatcaagatacacgccgcggcggaaaccgttgacttcgggacctacgccgcgcccgtcgtcgcaagcctccttggctgcgcgcgaggaaatgtcgcgcggggcgaggttgccgaagctcggatactttctttcgaggtaatagtccctatcctcttcaggaatatcgttggggtttttggtgcaatcttccgcctttttgggaacccatacgcggccgtcgttgcgcaaagattcgctcatgagcgtgagcttgctctgctggtcgccgtgctggggaatgcaagtcgggtggatttgcgtaaagcagggattggcaaagccagcgccgcgcttgtagcatttaaatgccgccgttacgctgcacccttgcgcgttagtagaaaggtagaatacattgccgtagccgcccgtgcagagaaggacggcgtccgccgagtacctttcaatgtcgcctgtgacgaggttgcggacgattatgcccttggcgtggccgttgacaacaaccaagtcgagcatttcgcggcgagtgtacatcttaacctttttgagcgcaatctgcctttcgagcgcggaatacgcgccaagaagcaactgctgtccggtttgcccgcgggcgtaaaaagtgcggcttacttgagctccaccgaatgagcggtttgccagaaggccgccgtattcgcgggcgaaaggaacgccttgggcgacgcactggtcgataatgtttccgctgacttcagcaaggcggtacacattggcctcgcgcgagcgaaagtcgccgccctttacggtgtcgtagaagagcctgtaaatgctgtcgccgtcattctgatagttcttggcggcgtttataccgccctgtgccgcgatagagtgcgcgcggcgtgggctgtcttggtagcagaagcattgtatattatatccctgctctgcaaggctcgccgctgcggacgctccggcaaggccggtacctacgacaattatcttgtacttgcggcggtttgaggggtttacgagcttggcatgagccttaaagttcgaccacttttgggctatcgggccctccggaattttagaatccaaattcatgatttttcctttcctgacctattttttagcttccggtttaagcgatatagagacattgcacttagccgctttattggcatttaggaagtcgtaatttacaaaaatctttttggctcccgcagctctttgcgcttcaacctgctttacgacgcagttcaccggcaggatgttgcaaccggcatattttgaaaccataaccgcgagcgggtttatagagaaaccaacagcgataacgacgcaatagacaaccgcaatggcgttgaggcggtatctccaagcttcgttgcggagacctaccgactggaacatactcgaaacgccatgtgagaggtggaaggcgataacaatcatggcgaaaatatacgccgccgccacccacggatttgagaagcccattatgagcatggcatagacgtcgtgaagagtcttgccttcgtacatgccgctggtcgcaacccagtcgagaatcttatactcggggtccagattgaggaccgtaaagtgcataatgtgcaaaacgacgaacgcaatgacaatagtgccggaataaatcatagtgcgtgcggccaatgtcgacgacaaagattttttgacggcgtactgctgcggacgcgacctgttattctccaaaacgagcatatacgccgtaaggaagtgcaccacaaagcacgccaaaagcgtcagtctgaaaccccagaggatttcccacggcaacgtttgcagcgtatgcgcgtatgcgttaatcgcgtgcggtccgccctcgagagtctgcaagtttccaagcatgtgtatcaggaggaacgacgccaacacgaatcccgtaatcgccatcaggaacttttttagcaccgacgacagaatcgatttttttatgtttaccatgattgtgcgttcgtaatttttctatttggaaaatgaagtctttaataaggcaaatttgagcatttttttcaacacaaattttgtgcgtattgcgcgcgggattgggcaattttttactttctgagcgtaagacggcagcgttccgcaatttttggcataaaaagctttaaattgcgcgggcgataatgcattatctgcgcattatggaactaacatacaccgataaagtggcgctcgtaagcggcgccggaagaggtatcggccgcgagatagcgctggagctcgccaaagccggttgcactgtaatctgcgtaagccgcaacgaatcctcctgcgggagcgttgcggaagaaatccgcgcctgtggcgggaaagccgaaagcttcgcattcgacgtctcggactccgggcaagtgaaagaaaagtgcgccgaaatactcaaaaagtacggagccgtggacatacttgtaaacaacgcgggaatcacgcgcgacaacctgcttatgcgcatgagcgacgaagaatggaacgccgtaatttcaacaaatttgtcctcctgcttttacctttcgcgcaaccttgtaagggcaatgatgagcaaaagatggggaagaataataaatatatcatcagtctccggaatagcgggcaacgcgggacaggcaaattattctgcggcaaaagctgggataataggtttcaccaagactctcgcccgcgagcttgccgcgcgcaatataacggcaaacgccgtagctcccggatttattgaaacagacatgacggcaaagcttcccgaaaatataatggaggcagcaaaagcagcaatcccgctaaaaaggttcggcaagccggacgatatagcgagagtctgcgcattcctcgcctcggaagaagcttcttatattaccgggcaagtgatttccgtaaacggcgggcttgtaatctaagacaaagcaaaaatatttttagcaataaaaatcgcggatatatcgcacagattatatccgcgatttttttacaaagacgatgtcttttgaaaaatatttttacttcaagggatttgttagagaaaagggaaaaatattcgcacctacaccacttattttttgtctatgaaagaacactacttattttaataattggcgcaacgattttggccatttgataggaagaagaaaaagacgtaaatccaataagcttttcc

SEQ ID NO: 3522 - DNA, 15329 bp, Unknown
  16S sequences of unknown bacteria
ccgccgcgcgtcagctccccgatggcacttaccgcaactcgacgcagcttctgagccgtgccggaaagatcgacggaatttacgacaagaattatcttgttccgtccgaatacaccgaagcgggcatcggctacggcaccgaagcaccggtcttcacgaccgatttcggacgcgtcggctgcctgatctgctttgatattcattacgacgtctgcaaggaatatgaaaagagccgccccgaggtgatcgcgttttcgtcaaaccaccacggcggactcttgcagcagtacctctgctattcgacgcagagctacctcgtcgcgagtataccggtagaccacggctgcgcgtcgatcgttaacccggtcggaaagatacttgccgagtcaacctaccgctatccgaacctatgctatgccgacatcgacctcgattacaaggttctgcactgggacgagaactggtcgaagctgatgcgcgcccagcgtgagctcggacccaatctgcacatctgcgagcccgacgcgcatctcggactgctgatgatcacatgctcaggcgacaaattcacggtcgacgacgtcatgcgcgaatatgagctcgaaacatgggatcactattatgccagatgcatcagggcgcatgataaggggattgtcgagaagaagccgagatttgattattaaaataatgagcggacgggagattttctcctgtccgcttttttacgttgttcacaattagacacattttgttaaattaaaatttcacatacgttttttttgcttgattgttcacattttatatgatacaataaattcaggatagttacagactttccgagtaatcagaaaggagaacggacatgaaaaaagcgttttcatttttaatcatcgcggcgatgatcgtaacgctctgcgcggtctgtgtgagcgcggctgacccaagtctcaagctgacgaaaaccgtctacgccgagggcgaagaggtcatcgcgatcgcttccggcgacggcactaaggagtggatcggtgtctacaagaagaatgagaagccgggcggcggaactgtcgcgctccagtggtattacgtcaaggacttcaacggagtcgaggcaaacactacaaaggacgcgatagtcgacgcacagcatccggctgacgtcaatcttccggtcggcgagtacatcgcgtactacctgctcaacgacggttacaccgcggcggcgcaggttgagttcaaggtcgtccccaaatccgagatccttcccgagacacctatgaagactgagaccgctccggcgaccgccgacctcggcgtgctgattacggcgctcactctcgcggcttcaggcgcgtttatcactttcagaaagagaaagtgacgcaaatccgcgtcggatgatcggcgcgtcaacattttttcactgcggcaagctcctcggggggcttgcttttttttagcgcacgaatccgccatatcaatccggaaataagtaaatgctctcaccgtgggttaaatccacggcttattttaaggcagtaccgcagaattctgagcgtgcagatgcgccggcgtttttttgccagcggtattaccttaacacgcgaccgcgattcctgagatcccgcggagagagcccgaattctctgagaaagcagcggttcatcgacgagacgctgccaaagccgctctcaaacgcgatctgcgtgacgcttatgtcggttgtgaccagcagacgccgggcgttctccgcgcggagacggtttaagtaagcggtgaatccgcgtccggcgttccttgagaaaatatcgctcagatagcacggcgagactccgatctcagccgccgcgcgggtaagcgtcagcggctctctgaaattcccgcgcataaagcttatcgcccggcggacataattcagcgccgggcttttttcggtcggcggcttaagcgcggatgagttttcaaggaattcgctgattatcacgagcgcgaagccggtcgagcgcgctgtctggaactccgtccgctctccagcggtatcgaaaatattgcggaatccctgaagcgcccgaccctccagatgcccggtgaaggggagccccgccggttcgatgagctcggatataacgcggctgacctcactttccgagaacttcatggagtatatgacaagcggcttatctatgtcgaccttgtgcatatcctcggttccgagtccccagaaatcgcccggacaaacagcgaagctctgaccgttgagacagtgtataccgtgaccctcaaccactatctcaagctcggtgtggtcgtgctggtgaagcggatagctttcggtgagtgtcgagatattcgcgcggataccgccgtgacttttcgtgagatcatgatcgtatttctgatagttgtccatttcgcgcctcctttgtatcattataactcattatccaaagaattgcaaggttttccgaaaaaaatcagctggaaaatatctctttgcagtggtataattgagtcatctgcaaacgaaaggactgacgattatgaaaatatacgaaataagcgggaaatgccgcctgagcttcgccgaggaaactcccggcgctgaatgcgagaacctgaccattgacgcggtaattcccggaaatgtcgagctcgacctcgagcgcgccgggattctccccgagctgtttttcggcaacaacatcaaactccttcggaaatacgagtactacaaatggtgttacactatcaacgcgtactttccgcctcacgccgaaaacgagcgagtgatactcgagttcggcggtgtcgactgctttgccgactattacctgaacggcgtgaggttcggcgaatcggacaacgcgctgataccgcaccgctttgatgtgaccgggctctgtcatgggggtaagaatcttctcgaggtggtgatccgctcgccgctccttgaagctgcgaaaaaacaatacgacgcctatgagtgggcttatgtaaacaaccacgaggcgctcagagtgcgcaaagcgccgtcgcagtacggctgggacatcatgccacgcgccgtgactgctggtatctggcgtccggtgaaggtgattgtcatgaccccgaacgagttcaccgatttctacataacgactctgtgcgccgacaggagctcggcgacgctctcggtcgcgtttcagttcacgacagacactccgcgctttgaggggctttcggtcagaatcaccggcagaatcggtgatgagaccggattctgcgacgagcgtccgatacgcttctgccgcggcggatacacgataaacgtccagcgaccgaagctctggatgccgcgcggttacggcgacgatccggacggagacgcgaatgtgtatgaggtcagcgcggaacttatccggaacggcgaggtcatcgcggaataccggacaacgctcggaatacggacggtgaatcttatacgcagcgagatctgcgacgaatacggcggggagtttgtgttcgaggtgaacggcgagcgggtgttctgccgcggaagcaactgggtgccgcctgacgcgtttccgtcgcggaacaactcgagatatgagatgatactcgatatggcgaaggatctgaagtgcaacattctgcgctgctggggcggaaacgtctatgaggacgacgagttcttcgatctctgcgacaggtacggaataatggtctggcaggatttcgcgatggcgtgtgccttctatccgcaggacgaggagttcgccggggctttgcgaagagaggcggaatcggtcgtgaagcggctccggaatcatccgtcgctgatactctggagcggcgacaacgagtgcgacggacacatgtacgcgatcgcgaaatatgaccctgacgcgaatatcctgacccggcggattctgccggaggtgattcaccgtctcgacccgaaccgcgaatacctgccgtcctcgccgtattccggaagaactgtcattgagcgcgcgaagactctgaaggtcactcccgagaaggcggcgtggaagccgatggagtcctacaagccgatactcccggaggatcacccgtggggctcgcgcgactactacaagagcagcttctataccgggctgagatgcgccttcatcagcgagatcggctatcacggctgcaacgaccttgagtcgatgaagctgtttctctcgccggacaagctgtggcactggaaggacaacgacgagtggctgacacacgccgccgagatgaacggaccttacggaacttacgcttacagaataaagcttatggcggatcaggtctacgcgcttttcgggattgagccggagcggctggaggatttcatctttgcgtcgcaggtctcgcaggcggaggcggataagtactttatcgaatcgtcgaggcagctgaagccggtgcgctcggggattatctggtggaatctgatagacggctgggagcagttctcggacgcggtcgtgagctacgacgggtacaagaagctggcttactactatataaggcagtcgtccgagaatgtcatgctgtccttcggcgagccgcgcgactggaatatccggcttttcgcgtcgaacgacacgctctttccggcaaagttagtttacagggtttacgacgccgacgacatgggtttgcggctggagggaaagttaaccgttccggagaactcaacggtcggagtcgctatgctgcgcatctcgcacgctgagaagaagctttatctcatcgagtgggagcaggacggagtcaggtacaccaaccactatattctcggctatccggcgttcggacttgagcagatgaagaaatgggtcgggaggatcgcggaattctcgggaaaagaggactttgtcaataaggtcggaaggctgtccggaagcaatggggagtgaatcttcctgaaatgccgggaaaatcaagcagtgtgtgcttttgcagtccgccgatggtctcgggtttcacctcccggttattgtacgactatagtatgccgttgataacatatccttgtaaggacgaaaaacaatttaacgtcggcgattgcgctgtatattgcgtttgggtgaagccgaaggaaatccggctcgcgttcctgtcttttttatgaccatgcctttcgtacaaacttacagttttgaggctttcacgaccctgtgtcgtaaaagcctcaaaactgtttggtctgaaaatttattttcagactttattcctcccgtgccgggagacataccgcgaatgtcgttcctctgtccgagctgtcctcgacccacacctctccgccgtgcaggtccgcgatctcccatacaagcgacagcccgagtccgacgccgccgtactctctgctgcgggatttgtccacacggaagaacggctgaaagatattgctccggtactcctccggaacgccgcgacctgtgtccgacacacgtatcattatgttccgcgcttccttcgtcaccgaaacgcggacactgccgccggtacggttgtacttgacggcgttttcggtcagattgaagagcagccggtaaatgagcgtgtcgcttccggtcagcacaccgtcgccgtcatgcgccagcgtgatttcattttgttccgccagtggttcgagatcagtgaatatctcctcgatcatcggggacagctcaatccggtcgtcccgcgccgctgtttgcagaccgttcatctcaagaagggtctttgtcatctgcgtcagccgctcgacctgctcccgcagaagcgtgagaaattccgcggtctccggcagaatctccgtatgctcgtcggagaaaagctctatctgcgcctgcatgagagaaagcggcgttctcagttcgtgcgcggcgttccctgtgaactgcttctgcgcctcgaacgcgcggtcgagtctcccgagcatatcgttgaaagaatggctcagctgtctgaactcgggcagtccgtcatcctgtatccgcataaccgccagattgttaatctgcactttctccacctgggacgcgaaggcgcgcagtggcttcagtacttgtccgctgacgaaataggctaagattccgccaagcagtgtcaccgccgccgttatataccagttggtcgcgcaaaaatccgcctgtgcgccatgtacgacgatggtaagctcatcgccgagctccacgagtgacgggtcaaagctggcggtctcgccgtcgtctgttttctcatacccggtgacataattcccgccggtgacataattcccgatcgaatccatgtagcgcataccggaatagcagagcaggagattcatcaggacgcaggttgcgcagatgagcagggcggtcatcagtgtgatgcgccattgcatggacagctttttcatatgctgttctcctccatcacatatccctcgccgatgcggttgcggatgggatcgtagccgagggcggcgcgcagtttttttcgcagggacgaaatgtgcacgcgtatcgagttgctgaaattgtccacgctgttgtcccacacatggtcgatgagctcctcctgactgaccggacgtcccttgttgagcaggagatattcgaggattccggtctctttccttgtcagcgtcagcgcctgaccggcaaccgatgcggtacgcgcctttgtgtcgaacgcgagatccccgcaggagagaaccacgtcgttctgtgtgaactgtctgcgggtcaggctccggatacgcgcctcaagctccgccagatgaaacggctttgccagatagtcgttcgcccccgcgtcaagtccctctaccttgtcggcgacctcgctccgcgccgagaggatcagcacccgcgtttcatggtcggtcttccgcagcgtccgcagtaccgtcatgccgtctgtccccgggagattcaggtcaagcaggatgaggtcgtaccgctcgacatcgatcagctcaagcgccttgtttccgttataacagaaatccacgctgtacgcctgcctccgcagactgcgtactatggtgtcgcataacgcccgttcgtcttcaactacaagaatgtgcatagttcttttcctttacactgtttttatttccatatccattataccatacgaaaaataaatttcatgttaaattccggattttaacaaagattttacaccccatgtgctataataaaaccagaaacaggaaagaggtggctcaaatttgaaatctgtcagaaaaagcgccgcgcagataacccttctggtctgcggaatcgttatgctgtgcttcggcgcgtggcgcggggaagcggagaccgtgctcggtaaggcaatccgcttatgtctggagtgtgtcggcattggataagaagcataagggtgtgtcgcaaatcatgtcgcgtttccgcggcttcattcaggcaggcgcggcgctgctcacaaacattcatctgccgaactttctgaagggcggtctttatcagggcaaaggaaaatatgtctgcgttccgggactcaactgttattcctgcccggcggcgtccggcgcgtgtccgatcggcgcgttccaggcggtggtcggctcgtcgaaattccggttttcctattacatcaccggatttctcattctgctcggcgtcctgctcggaaggtcatctgcggattcctgtgtccgttcggctggctacaggatctgctccacaagatccctacgaaaaagctgtccacaaagaagctcaaacccctgacatacctgaaatacgtcgttctggttgtgatggtgttcctgcttcccgcgttcatgaagggggacaccggaataggcgacccgtatttctgcaagtacctctgtccgcagggtgtgcttgagggcgcgatcccgctgtcgatcgccaattccggcatccgcgcggcgctgggttcgctgttcaactggaaactcggcgtgctcatcacggtggtcgtactgagcgttttgttctaccgtccgttctgcaagtggctctgtccgctcggtgctttctacgcgctcttcaaccgcgtgtcattattccggatgaaggttgacacgaataagtgcgtgtcctgcggaaagtgcgccagagtctgcaagatggatgttgacgtgaccaaaactccgaacagcgccgaatgcatccgctgcggaatgtgcgtcaaagcctgcccgacaaacgccatctgcttcagatacggctttgggaacggcagggaagagtgcccctccgcgaaaaaaaacgacgaaatcaaaacaaatgaaattaacaaggagaaagaatcatgaaaacagcaaaaaaactcatcgcggcgctgaccgcgctcgtactcgtattcgtcatggtgtcctgcggggctgcgggcgatgatatgacgaaggaaccgaaaaacgccaaggaagcgtccgcgatgcacgaaaagcttctggggcaggaaaacgaaatcctctcggaaaactccgccctctgggaaaaagtcttcatggcggctgacaagggtatggtcatgaccgaggacggcaagaactatggcgacttcctcataatgaccatcgagaaggcgaaggatcagttctcggacgacgaatacacgctgatcaagggcgaggctgagaagatacgcgacatcgagacaaagcttaccgagctcgagagcaagtttccggagatcaacggatcctccggcgacgacaacatgagtatgccagccggcaacgcaaacatcacgaaattcccgtccttcaccggtaaggatcttgacggcaacgaggtcaagagcgacgatcttttctccggcaacgcagtgaccgtggtgaacttctggttcactacctgcggaccctgcgtcggtgagctcggtgatcttgaaaagctgaacaaggagctcggcgagaagggcggagaactcatcggaatcaattccttcacgcttgacggcgacaagaaggcgatcagcgaggcgaaggaagtgcttgacaagaacggcgcgtcctaccgcaacgtctactttgactcggacagcgacgccggtaagttcaccgcgggtatatacgcttacccgactacatatgttgtagaccggaacggaaatatcgtcggcgacccgatcgtcggcgcgataacgaacaagaatcagatggaggagctgcaaaaacagatcgatactgcaatcgcgactgacagcgtgaaataacgcggcgcctccgcgaaaggaggagcattatgcgcagaaaatacgcagctatgctgttttgcgcggcagtttttctcagcgggtgcggggtggtttctatgacgtcgtccgccaacctgaaatcgaccgagacggaggagagcggcatgaaaactgagacgaccgaaaacgtcatctatctcgcgggcggttgtttctggggcatggaacagctgatgcagtcgatcccgggcgtcatcgacgcggagagcggctacgcgaacggcacctgcgaggaagacgccgattacaggacggtctgcaaaggtggaaccggcttccgggagacggtgcgcgtggaatacaatccggacgaggtgagcctcgacgcgcttttgctcgcttacttctatgtcatcgatcccacagtcgaaaaccggcagggcaacgatatcggcacgcaataccagaccggagtctattacacaagcgacgcggcgaaagagacggttgagcgcatcgcggcgattgaaaaaggtcggagcaagaagttttttgtggaaatcggaccgcttataaacttctttcccgccgaggaatatcaccaggattaccttgagaagaacccggacggctactgccacatccctaaggcggagatggagctgttttcaaagcttcgcatcgaccccggcgactataagaagcccgccgccgaatccatccgcgacaagctgacagacgagcagtaccacgtcacacaggaaaacggcaccgagcgcgccttcacgggcgaattctggaaccggttcgagaagggtatttatgtggatatagtcaccggagagccgctcttttcctcaacggacaagtttgagagcgactgcgggtggccggcgttcaccaagcccatcgaggagcccgcagtcgtgaagcttgaggacaacagccacggtatgcgccgcaccgaggtcaggagccgcgccggggactcacatctcggtcacgtgttcaccggagatccggaatcgccgaacggcgtgcgctactgcatcaacagcgcgtcactgcgtttcatcccttatgctaaaatggagagcgaggggtacggatatctgatgtatctgtttgatgaataaccaaatttaagcacatcaaaaaagccgcgtcaagcggcttttttgcgtgcaggtgatgcgaaaacgatatgttgactcacgcaaagttttccctgatatattccagaataacatccgtattatccggatcatactcgacctcacaggatatccgtctcgccgcgtccgcgaattctccgtccatcgccgaggtcatgaccgcgcatatcgcggcgaaccgcatcgtctcgtccggataatcaaaataccagcggtatatgtagtacgaacacagccggtgagagagcggtgagaccgccggcggaacctccggaaaaacgagcggttcaagggtctcgagagacccgaacagcccgcgcagctcactataccgcctgacgcagtccgcaatcgcgacgtccattgcctccgtgtcacgcatgagtgctgactgagcccggagttcgtcaagctcgctgctttccggctcatatccgtcgtcctcgtatatgagccttacatcgccggaaagccagagcttcgcagctgcctcacagcagatgccctgaccgccctcgcggatgtttccgttctccgagtacgagtagaagcgcggatgctcgcggcagatgtcgcagagggcgtcctcaccgcgccggatgatcagatcacataacccgtcgtcccgcagaaagccgcagcgcccgccctcacggcagagcagggttccgtccggagcgggcagaagccgccgcttctcgctctcatcgagcagttgatcgtaaagcgccaccttgtcagggtcgacggcgatctcccaacccgcgcagcaggtatgcgcgcagtctgacgcgatacagcggaaactatcgaaaaaatcaggttttacgaacataaagaactccccggaatgaatttgcgtacggtatatctttcagtgtaaaccctccgcgccgttctgtcaagtgacaaggcggaaaattatcatattatttacttgtccggagatttcagtccggaaattgaacctcgtgtctgatgtgcacgcgcccttcacatggattcatgttgtcggaaaatattcccacccacttgacagcccggaaattttatgatagaatggtagcatcacccgcgccgcgccgcgggatatcaggaggaagaatatgacgatacgtctgatgacgagcaatatctggggcgattatttcgggaacgaggtctcaggacgggatgagaaacttgagagggtttaccgccggtatatgcccgatgtccttggtcttcaggagatgaccgacagctggcacaggtcgccggtgtgggagcggcttcgcggcgaatacgctttcgtccccgtcccgacagaagagaatacggacttcacgccgctgctttacagaaaaggaaagctctcggtggtcgacagcggcaggatactgtatcacacggagcttgaccgctcgaaggggattacatgggctgtgttcagtacggtcggggggcacctcttcgcggtgttcaacacgcatttcatgtggcgggacggcgtagagtacgatgttataagacgttacaacgccatggagcttgtcgggcagatgagacaggtgaagcgggcttacgattgcccctgcttcttcatgggagatctcaactgcgcggtcgactcacccgcgtggaagtatctgacaggcgaaggttatctcccggtgcgcgaggtctcctccgagcgctctgaaatatcgtcatggcacggcgacccggtcagaggcgaagaccgactcttccacggaagcatgacaagcgacacgtgggataaatcaatagatcacatcggcgcggagagaggagctgtcgctgaaaaatatatcgttgtgaccgataaggacgcgctcgacgcgaccgatcattcccctgtatttgccgatatcgaggtgagatgaaatgagaggtttttctttcagtccggtaaaaaaagagcagatcgtcagtgtgcccggatggttcgtctggtgcggcagcatggtcaggacgcctgacggcaggtgtcatatgtttgtctcgatgtgggaggaaaagtggggcttcgagtacggctgggcgacgcattccaaggtcggttacgccgtcgcggacgagccggacgggaaatatgagttccgcgggatcattttcgagggctccggaaaggagaacggctgggaccgcgattcggtgcataacccgtacgttttctacgacgacggcagattctggctctactacagcgggaactgcggggatggaaattattctgtacatacgtcgaatcagagagtcggtctcgcgtccgcggtcgacccgatgggagagtggacgagatcagatgagccgctgttcggcggacgccccggaatgttcgacgagtccggcacgacgaacccgagcgtttgcagatgcccggacggaaggctcatcatgatctacaagtgctggtccgatcttcccccgcatgacggaaaggtgcgtatagccgcggcgtttgccgatcatccggcgggaccgtgggagcggatggacgcgccgatcttcgacgtccccggagagatgttcgcggcggaggacccgtatgtgtacagtcagggagggaagatttactgcctgctgaaggatatgggaaacttttatattcacgacgttttccgctcgatgattcgtttcgtgtcggatgatggtattgattggaagcctgccgagccgatgttcttccgctcgagagtcatggacttcgaaggagaggggaagaagctgctttaccgcatggagcgaccgttcctttacatcgaggacgataagccgcgggtatttttcaccgcgatacttccggaaaggaccgcgccgttcagctgcaatgttcacatgaacatcgagtggaaggagtgaaagaatgccatcaagcaaaggctatctcgatttcatcctcgatcagttgtcgggactggatatcggacacagggcgatgatgggtgaataccttctctacatcggcggcaggctgttcggcgggatttatgacgacagactgcttgtgaagccgatacccgccgtgctggagctgataccggacgccgcgcgtgaggcgccgtatcctggagctaaggaaacactgatttaaggttgttttcgcggaaaaaagcccataaatccaagccttttttccgcgaaaacccgatttattcagtgtatccctaaggaaatgctgctcgtcgaccgggtcgatgacagcgagttcctccgccggctcgtgacagaaatgtacgacggactgcccgaagtcaggaaaaaaagatgaagtttggggatgaccgtctgcggtcatccctctattcggttctcagttttccgccgcgatctgctgataatcgacgacctcaagctttatgtatgtcgataggtcgcggacggacagcgcgtcgccgtgcccgcttcggatgatcgatatgaaattgacgttctgcgggagaaagtacgtgatctttatgtccgccgatgcgtttacctttttctcgtcgaggttgtcgtagcaattgacgagtatgtgaagcgttattctgtcgcctattacttgatcaagcgcggcgggaaggtcggggcagacctcgaggatcgatgctgttgtactccgccatttcgctgtggacccgcgagaccatctcctcgataccgttaataccgcgcacgtacggcactaccgtgacagagcggttcccgtaaacagttgacgagcgtaaagacaggctctccggcatataattcttagtcttcccgtagtaaagaagcccgtcgccgacgtcgagcgagtacctgcactctattctcccgtcgtactcaagcgtgatgaccgggtcgtcaaaagcaaaatcggcgttgtcatgtgattccgtgtaaatgaggacgccgtcgtatatctcgttcgggtactctctgaagagctctgagagaggggtcagacactggagcctgccgacatacacgggctccttttcattaagttccgcgggcttccggacctcgcttccggcttcgtccggctcgttcacccacgcgtggatgcgcaggatgtggtcttcgacgctgtcgtccgattcgggtgcgtacagggtctgcggctcctttttcatcgcgtacgacgcggcggacagcgtgtagatcaaatatacgccggagatcgcgaggaggatcagcagaagggtgcgtattacgtatttcttcattttacgccctgcctttcgtgagatttcggttctgcttccattatatcatactatgaatgtaaagtcaatacgcaaaatgacatttgtagatgttaattataaacttttgggaattcagttcacgaaaaatttaccatcgcggcttgatacgcgcccccgcggcgtgatatcatatatcgtgaagaggaaaggattggttatggaaaaatgaaaaagggactgatactcgagggcggagctatgcgcgggctgtttacggcgggagtcatggacgttctcatggagaacaaagtcgcgttcgacggcgcgataggcgtgtccgctggcgcggcgttcgggtgtaattataaatccgggcagatcggacgggtgctcagatacaacacgaaatactgccgggacaagcgttactgcggcgtccgcgtgctgctgcgcacgggcaatatctacagtacggatttctgttacggagaggtgccgctcgagctggatccgtttgattttgacacatacgagaagagcggaatgaagttctgtgtcgtctgcaccgacgtttcgaccggaaaggcggtctatcacgagtatacagggcgcgacgaccacctcttcgactggatacgcgcgtcggcgtccctgccgctcgtgtcgcggatggtggagatcgacggggagaaatatctcgacggagggctcgcggattcaataccggtggagtatttcgagagcatcggatacgaccggaacgtcgcggtgctgacccgtccgctgggctaccgcaaga

SEQ ID NO: 3523 - DNA, 2633 bp, Unknown
  16S sequences of unknown bacteria
ctcgtcggcagcgtcagatgtgtataagagacaggtcatagaactgcgcaaagatgcggatgtagaaaaaattcttcaatatctctataaatatactgatttgcagataacattcggtgttaatatggtagcgatagcggagggaaagccacagcagctaagtctattggatctaattcgctattatgcagaataccaaaaggtcattgtgcggcgccgtacccgctatgagttggaggaagcagaacagcgcgagcatattttggcaggcttgatgattgctgttcagaacattgatgaagtgattcgcttaattcgaatttctaaaaatgcgaatgaggcgagaaaacgcttgatggaagcgtttgacatcacgtctgttcaagcacaggcgattttggatctgcgcctccgtcggttgacggctctggaattgggcgaattgaaacgcgattacgagcaggtcgttaagctgattgccaagctgcgtggcattctcaacagtgaaaaaaagttgatttccgtcattgaaaaagagctgttggagatcaaaggaaaatatgggtttcctcgcagaacaatgctatgcgaattggaaaccgtgcacgcttcggaattggaagtgaaaaagcaagcggaaccatgtgaaatattgtttacaaattcgggctatctaaaaaggatctctttgaaggccacgacaaaggccgcgcaggagggcggagaggatataaaaacgcgccttcgctgtatgacagaggataagctgcgcttttttacagaccagggcaatgtgtttgcagtaacggcaagcgatgtagcagaatgtaagctaaaagacagaggaacgcatgccgcctcgctgttaaatggtctgggaaaggatgaaaagatcgtatccatgctggtattcgggcagacagatacgcaggatgtgctgtttgtctctaagcaagggcttgtcaagcgcacggcttgtgctgaatatattaaatcgcgcggcaagcttgcagcttgcggcctaaaaaaaggcgatgctgtgcacaaggtacttttgttggcacaggatcaagaactattgatgatcgggaaaaaagcaaatgccattcgtttttccaccgatagcattccgcaacagggaagaacggctgccggcgtcaaagcaatggcgctggagacgggcgacgaggttctgtttgcagatctgattggacaggaacaggaactggcattgtttaccgagcggggctatgcaaaacgtttgcccatcgacgagatcgaaccacaaaagagaaacggcaaggggcaaaggatcattgcattgcaaaaggatggcgcaaacggcaatgagctagtatttatctgctgggtgcatttgcaagagaattttacgattacgcagttccatggttcgcaaagcagcattgaagcagtgcagattcccaaagaaactaagcagggaaagggtagtcctattgttctatctttgtttgacgatgttgtaacgcaggtgcagcgtaactttttgcagacataaattccataaaaaaagagctgatacacagctcttttttcttaaaacatttttttgcggaacatgatgataccggaaatgacggatgcaaccagagaaattccacagacgatcacgaacccccaggggctgttttgaaaaggaaccggcacattcatcccccaaagactggcaaacagcgttgggatcgtgagcatgatggtaatggaagtcagtagcttcatgacgatatttagattgttggaaatgacagaagcaaaggcatccatcgtgccggataaaatatcgcgatagatggtacacatctcaatggcctgtttattttcaatgatgacatcttccaaaagatctgtatcatccggatagcggcgtatgaattccatacgcatcagacgctctaaaaccgcttcgttgcttttcagggatgtggaaaagtaaaccaagctcttttctagattgagcatggcgatcaattccttatttttcatggatttatgaagctcgccttccaattccgtgctctttttatcgatctgccgcaaatacactaggaatttggcagcattgcggtaaagcagctgcaaaatgaaacggcttttcttttttgtcgaaaaccctttgacccggttattggtaaaatcctgtaatacggaagagtctttgagacatacggtaaagatgttatcgtctgtcaaaataatacccagagggaatgtggagttgatgattccctccttatcggataattcaatggtcggggtatctacgacgattaaggtctgcccattttcagtttctatacgcgatcgttcctcttcatccaacgcagcaacaaggaaatctcgttctacatctgtgatggcaagcagcaggtctatttcatccttagtcggatttacgacatgcacccagcagccggattcaatggcatccagcaaatgaatcttctgatcgtctgtacggaaaaaagaaatcattttctccacctcatttctgtctgattcgctgccaagttcgcgcaacttagcaaaaagggcaaacacaaaaaacgcgtcctttctctcagccttaaaagacaatgagaagacaacgctttgcc

SEQ ID NO: 3524 - DNA, 4703 bp, Unknown
  16S sequences of unknown bacteria
gaagagaacttccgcgccgcctaagtttcaaaggcgctcagctctttttctttctgagtatccaggcgcccgcgaccaccatgggcagcagcaaaacgcatcccagcgcgctcccgcagcccgcggcgacagatcccgacgaagattccgagccgctgtccgccgaggaagactcctccttgccgctcgaatcgctttccgaagtcgaagaatccgcaacggaggacgaactttctccgcccgacccgcttttttcggcgattatttccaccgttacgtccgcggtgatattgccgagggtatagacgccgttttccgccgtaagctcgacgtcgcccgctttgacgctcttgatctcatagccttccgccgcttccgccgtgaaactgacggagccgccgtaagaaacttccgttttttccgcgacggagccgtcgatctttgcggatgcgttgtttcccgtgaaaccgacttcgtatgccgcgatttttacggtcgccgtcgccgcgatgccgtcggggttatacgcgccgagtaccgtgcccgtcaccgtaaagctgccgtcgccgtttgcggacgccgtctgccacaatacgccgagtttgacgttgacttcttcgtttgcaagcgtgacccgcacagatctgtctgccttttgaatcgcctccaatgccgtttccgccgtgagggacgcagtttccacgccgatcgaagggacggcggaagtgatttccacgattttttcgtccgcgggagccgcagccgtcgcgggcatctccccatagacgctgagctgctgcaaatctgccgcgctcaccgcgtaatcgtaaattctcaaagagcgaatgccgacgttttccgcccagttgttcacctcgttgccctcgtcgtccttaaagcgcacgccgccgacggagaagcccacgcgatcgtttttaaaccgcgcttcgtcgtagacctgatagctgcatatggaatccccgtctataaagacggtcacggtccgatcttccgcccgatagcttacggcgaggttgtgccatacgcccagctctatctctttggtatactgcgaccattcgggctttgccacgccgttttcctgcgaggaatccgaatacgcgaaaccgactctcaatcccactttatttgccgtttcgccgtgatcgttgagcatgatgcaggccgcgtcggcattggaaatgcctccccagctccacatcccgtaaaaggcgagcaaaaagctgtgccccgtcgccacgcctttgggcgaaaggaaagtggtttccacggtaaagtcgttcatgtaatccataaagtcgtaaccgagcgcatcctttttggaagcgagaacggctttattcgtcatgatcacgccgttctcgatcgtcgccgcgccgaacgtttcgagatcgaacatcccgcctttcgtggattttccgatattctgcgcgtcgtcgaaagtatactcgacaaacgcgttcttcgtttctatccgctccacctcgacgggcatatacgctttcacgccgttgatattggaaagccccgcgccgtaaagattgccgacgagatatatcgtggcgcccttcttttcgacgcccgtccatttcacgtttgccgccgcctcgtcgccgtctgcggtgctcaccgtcactcgggaaccgagcggcgctttcgcgagaatctgatcgtccgtcgccgtgtaagggaccgtcaccgacgatggcgcttcctccgcggcggagatcgtcttagccgtcacgccgtccagagagccggaatagagtttgcccatttccgcgtccgtcatcgcaaaatcataaatatcaaagtatttgaaatacgcgttgccgctccccgacgctaaaccgccgtcgccgtaagcgccgccgatacagaaggacatatgctgatttttccaattgttgttttccgaacattccaccgtccagaatttctccccgtccacgtataccgttacgtttctgcccgttatgctcagcgtcgcggtgtgaaattcgtcggtggtgatctccttataatatttggagtgccagccgtcgcagatgctgccgtcgtcgttgtcgtaagcgaaagcgagtttcagccatgccttctccgcgcccgaatcgtaagcgtcgtagacgagggaggacatggtgcggttgtcgctccccgcgccgtaggcgttgccgttccaaagtccccacagactaaacagcgttcccctgccgtccgctttctgtccctcttcaaaatttttcggcaacaggaaactcgtggataccgtaaaggaagaccccgccatatagtccatgaagtcgtatccgtcgccgtctttcggcgcgacgagcgcggtcttgacgtccgtatacagcgcgcctttttccgcgtcgtaacgcatcgtcccctcgcccttcttttccatatcgaacatcctttcgttggctttgccgaaatttcccgagtctttaaaatcataggaaacgagcttgttatacttattcccctccgtgacttgccgaacgatcttcacgtctttgaggctgccgaccatagagccgttatagagccctttgccctcttgctgcgggtcggtataatagccgccgagggtaaaccgcgccgccctgctcttgaaggtattgtcctcgcgcgcggtcttcgtccatttttcttccccgtccacggaaagcaccgtcctgcgggtggcgccctcgtatcggaaggaagcggtgtgccaggcgtcggtggaaacggacagctcgttctcttcccaatagggattataatcggtgccgtccgaccgcgtcgccgtggcgattccgaagcggatattgacggtagccgcgccggaggaataactgtcatacatcagcgcgctggcgcgataattcgccgcgctgccgatattctgatcgttggaatcgttatacatgaagccccagacggaaaagacgcagttcctcgactgcaatgccttgccgcctaagtccttcggcagatagaatcccaccgtcatcgtgaaatcctcgtccgccagataatcggcgaagtcgtatcccgaagaatcgcctgccgcaaccagcgcggaggcgccgtcgaacgtgacgcccgtttcttcgcctcccgtccattgaacgggactgcccaccccgacgaggtggttgccgttgccgctcgaatctttaccgaggtcggtaccgtcggcaaaaacgtactccgccaccgtgacgcccgacgccgtttcctccgccttcgcgggcagcgccgcaagccccgccgctccgacaaagacagccgtcattgccgagcataacacccaaaatctttttttcatccagattcctcctgatattttttcgcggcgaataaatcgaccgcgtaagatagctttatccgaaaacattgcagacgaatttttaagagcttatccgttttcgagttctttttccctccgcgtttttgcgcccgccgtcataacgcattaaaataataccttcatttcaatccgtttgtcaatagccggcggaatataaataccaatttttctaacacaaacggcgaaatatgtaagaaaatattgacaaatttatttttgagagatatactgtacgtatgggatactctttaaaacaattggaaatagaaaacacggaaatctcttccttttacaagctgccctttcccaaaggctttgtctttcagccgcactatcatccgcgcgtggaaatcatgtacgtggaatcgggcgacgtgacctttcggctttatcagaacgcggaaaggaaagaaagtccgcgcgaggagcacgtaaaaaccggtcagtatatcctcttcgacagcgacgtgccgcacggattcacctgcgacgaagaaacgattttttacagtctggaatttcgggaagcgccgcgaaaaacgtcgttttcagacgctttttccagctcttttcagacgcttttcaacgaatgtcccgctctcctttcggagatgaaaaaaaagggctatgccgtctataacgacaacggcgcccttcaaaagagcctttcgcggtttatcgagcttttaaaagaaacaaacgatcccgaattcagcggctcttatcgggaaaagcattatctctataaggtgtattttcaggaaattttcgtgttgctctgcctcaacgcgtcgatgagcaggccgagcggaatccgctatctcacgagaatcaacgaatatctgcgcaagaattttttgcaggacatttccttagacgacgtcgccgcgtatgcgggagcgaataaatattacctcgaaaagctttataaacagcacacgggacagaccattcgccatgccttgctcgctatgcgaatggagagcgccaaagatcttttggaaaattcgaatctgaccgtttccgaagtggcgcaaaagtgcggattcaatatccgccagcagctcatctataattttaagcgtttttacggtatgacgccctccgcatacgtcgccgctcacaaggaaaaattcgtcgattttatgcccgacgacaaggctcgaaaacagacttacgactacattctcaatccgtaaatctccctattttcacaatctttttttaaattaaaattacactttttcttacaaaactttttaaggcgtcttaccggcggctaaattgatctatttaaaaagcgctttcctatcgggaa

SEQ ID NO: 3525 - DNA, 24128 bp, Unknown
  16S sequences of unknown bacteria
ggctttgacccgttcgggggagaaaaaataaatcccgcgggggaagccgtaaaaatgatgaaaaacgaaattcacggcgcggaaattttaaagctcgaagtgccgacggtgtttggaaagtccggcgaggttcttaaaaaagcggtggagcaatacagacccgacgcggtggtgtgcgtaggtcaagccggagggagagccgccattactcccgagatgatagccgtgaacataatggacgcgcgcattcccgacaacgccggaaacaagccgtgccacgagcttataataaaagagggaagagaagcgtatttttcctcacttccggtgaaggatatcgagaaaaatctaaatgataacggaattccgtcgtcggtatcgtatcatgcgggaacttttgtgtgcaattatctgatgtactgtctcatgaacctcatagacacaaaatatccgaacatgcgcggaggatttgtccatgtgccatattcaaccgagcaggtgaaaaatcgagaaacaccgatgccttcgatggagctaaatgagataacgcgcgggcttgagataatcgccgagacgctcgcaaaataaaatagtcccgtacctcggacgaacatgggcaatgcctgcgaggtacgggacattattttattcaccgcatttgtggtcggagcatgagtgattgccgcagttgtgaccttcctcgtgatggtggctgcactttattaacgggtcgaatctgagcttgccggagagaagcgcgcgaaccgcatcgtctgcatccccgctgacgccgccgtagaattttatccccgcttcggttaatgccgcctgtgctcccgctccgattccgccgcaaatgaggacttcaacgccgtgctccttcagaaatcccgcaagagcgccgtgtccgcttccgtttgtgggaacgacaaccatggccttgatttttccgtcctcggtgtcgtagagcttgaagttctccgtgtgaccgaaatgcccgaatacctttccgttatcgtatgttaccgcaattttcataatagttcctttcttgtacatgggtgaatgtttgtgcttctattatactcctttcatcggagaaaatcaagttatactgcacacttatgcttcccgtctgcgtgaggttattggttttaacaattaatgaatacatatgaatataacatcatggaacaaaaacctaacatatatttcgtgaattctgttgacaaaccgcaatcgagagtgtatatttaatatgccattaattcgtttaaataacttcggaaaggaacggtgcaatatatgacactgtttgacagaattaaagccatacgcgacatatcgggcgagaatcactggacgagaagattttccgccgagatgacgtacatgagcacgctttcttctacaaaaaacggagaatatgacgctcgcattgcggaagctgccgactatgttctctcaaaaaaagccgaaaacggagccgttacaaaagcagacgtgcttgaagccgagaaaatgcttgaagacctctccgcagaagccaaaaagctcaaggttatctgcgcggctcatgctcacatagacatgaactggatgtggggctatcaggaaaccgcggctgttacggtagacacgttccgtacaatgctcgacctcatgaacgagtatcccgaatacaaattcagtcagtctcaggcgtctacttataagataatcgaagacaacgcacccgaaatgctagacgaaattaaaaagagaatccacgagggcagatgggagcttacagcttcgacatgggtagaaaccgacaagaatatgccgaacggtgaatccctctcgagacatatcctctacacgaaaaaatacctttcaaagctgttcgacattgaccccgacagcctgagaatcgactttgagcctgacacgttcggacacaacttagcaactcccgaaatctgccagaacggcggagtagattactactatcactgccgcggaaatgaagctcagcaggacgtttacctttggagagcaaagtccggcaaggaaattctcgtgttccgcgaccctcatttctactgcaacggcgtaggagagggcagctttgacaacattcctctcttctgccggaaaaacggtgtcgacacgttcctctatgtttacggcgtaggcgaccacggaggcggacctacaagatgcgacatcaacgcaataatcgacgacgcagcgttcccgctctatccgactattaagttcggtacattcgccgagttctttgccgagatggagagattccgctccacacttcccgtagtagaccatgagcttaactacatattcacgggctgctacaccactcagacaagaatcaaaatggcgaaccgcattgcagaggacagagcatatgattcagaaatgctttccgcggcggctaacgtgctcacaggcgctcactccaaaaccgcgatttacgagaaagcatggcgagacatcctcttcaaccacttccacgacattcttcccggctccggcgttattctgacaagagaatacgcgctcggtaagttccaggaagctcttgccgctatcaacacaaacgcaaacaccgcaatgagagacattgccgatgcgatagacacctcatccataaagttcgacgaagatttgggcactcgttcacagggcggcggcgtaggattcatggacagcggaaagggatggagattcccgcagactgaaagaggacgcggctccgttcgtgcaattcatctgttcaacagcacgatgtacaaccgccatgaagccgttgaagtagtggtatgggactataactacgacctcggacgcgcatacttcaccgactcggaaggaaacgaagtccgctcagaagtctgcgaaggaggaaacggatactggggacacacatatacccgctttgtcatcgacgcaaagataccggctctcggctacgcgacatacatcctcaaactcagagaatacgacagcataggcaacctcacaaacgcgtatgttccctccgacaacagacaggaccatatcgctgacacaccgtgcgttctcgaaaactccaagattaaggcagtattcgacccgcataccttcgtaataaccgagcttaccgataaggaaacaggcagaacaatcgccgacagcgagcatcccaccgcaatattccgctacatcatcgagaatccgcgctttggtatgacttcatggagagtcggtccctacatgaacataaccaacctcaacagagacggaaataccgttcgccttaccgattacggaatcacgggaatgagacgctggctcagatataagataggcttctcgaagtcaaacatcaatgttcttgttgaactaaagggagagagcagtacgctttcgttccatgttgacgtggattggcacgaggtcggaaacggaaacggcataccgcagctcaatttctatctcccagttacatacaaagccgaaaagttcacatacgatatcccgctcggcacaatagaaagaggagatatcccgcatgacgttcccggcaacagcttcatgagaatcggagacgaggacagagcggcgtacatcgttaccgaaacaaaatacggcttcagaggacacgacaatgcaggcgcactcactctcatccgctcatcatacgatcccgacccgtatccggagcttggtcagcatcagattaacttcggcgtaggtatctgctcgtccgcggaacagaagagggaagcgttcacgttctgccatcccgtatcgttcaactccgacctcggacataagggtacgctcccgctcacaggctctctcgtcaagattgatggcgacatcgcggaaacagtaatgctctccggtataaagaatgctgaaaacggcggacttgtcgttcgtctcagcgaaatcggcggaaacggcggcaaggtaaagctcaccatctcatccctcgcacgcgcacctaagacagcagctcttgttgacataaccgaacagcatgaatacgcaaaatgcgacatcgacggacatacggtatcatttgaaatgaagccttacacaatggctacagtgcttatcaaagaataagacttagtctcaataacaaaagcatcccaaaatcattcgtgacaagggatgctttttctgtttattttacttttttgctttttccgcagacaaagaacgcaatcaccgccgccgcagctccgccgattaactttgtgagcagcagcggagtcatcatttcaggctcgacgctcagtgtgaatccgagatgtgaagcgagagtggaagccgcacacacgataaacgccgcattcattgtttttccgcgtgaatccatatcctttatcatagtcacggcaggagttacgctcacaaatccgatgagaagcgcggtcaggctggtgtcgcgtagtccgtatttttcgccgaacacttttagcggagaggacagaaggcggcgcagtatttcagccataggcagacttccgagcattaccacgcctattccggagactaccttcatcgcgtcctctatcggagcaaggttcgggacgaatgtctttccggtgatgtactgcaccgcgccgaggataagtccgacaatcgagagcaggcgtatcagcttagcaaagacggaaaagccggagagcatctgcttcggtatgaaaacaagtccgagaataagcaggagcgacagcactatcaccggcagagactgaacgatgagcagtgggagagaaattccgctgagcagaccgccgagaacgagagcaatgggcatgacggcaagtccgatgagtatgccgcggaagaagtcgcgcgagtccttttcttcaaccacacctacgctcagcggaatagtgaacgagactgtgcatccgagagtagccgagacgagaatccccgcgtattttcctatgtccgggttttccgcgagcgattttgccatctggtacccgcccatgtcgatagccaaaatcccaccgagcattgcagggtcaagaccgaccgcacgatagagtgacgcgacagtatgctcaagtccgagggagatgagaggggcaagacacagtattcccgccatggacagagcagtcggaccgagcagcttaaatccttcctcaaaccgctccccgagaccgaacctgttgccgaaaatcaaatcaattcctccgagcactgcacccgcggcaagaatccacaatatcacgttttccataactgctcccgaatcaaaaagacatatttatactaaattataacgtaaacacggcgatatgtcaataaaataagaccacattcgctttgaacatggccttgttttacatcaatatttgtacttcttccgcttagccagcataaatccgactgacacaaccgcgctgagaatttcacttcccgcgagagcgtaccatactccgtcgaggtgccatatctccggcattacgaggatgcatatcaccggaagaatcagcgagcgcatgaaggatatagctgccgaaaccgctccgtcgttcagtgcggtgaagaatgacgaggcgtacatgttgaaccacatcacaaggaagggagttgcgcatatcgtgaaggctcttgtcgtcatgtcgagaagcgcggcgtcatatcctacgaaaatcgaagatatcggacgagcgagaagtatcgcgaccgctgtgagaactaccgccgacgaggagagaataattaggctcttcttcagcacgtttttcatctccttgtggttagccgcgccgtagtgatatcccatgatgggcgagcttccggaagagtatcccgagaagattccgatgaacacaaacgccgcgtacattacaactccgtaagccgcaacgccgtcctcacccgcgtatttcatgagctgcatattgtaaagcacacccgtgattgaagcggaaatgcttgacatcatctcggaagagccgtttatgcaggcttttatcataggttttatctcaaaattcgtcttcgtgaatctgagagcggatttgttgcgcttgctgaggaaccatacaaagggaacaccgcctccgacgcactggctcagtcctgtggcaagagcagctcccgcaacgcccatatggaacactgccataaagaggaagtcgagtaccatgttcgtcacgcccgccataatcacgacgtacatagcaaacttcggcttttccgcgactatcatgtagctctggagagtgtattgcgcatgaagtgctacgttaaaacataggcatatcgtaccgtaggtcataacgtcgcctatcattgcgtcagtcgcacggaagaaatacgctacgggacgaagaattgcgattccgacaacggtagagagaatacttgagccgagcatgagaagcatcatcatggtgaagtaccgtcttgcgtgatcttctttgccctcgccgagagtttttgctacaagcgcgcttcctccgacgccgatcatcgcaccgaatccgccgagaatctgtaggtacggcataatcaggttgactgacgcaaacgcggtctttccgacgtagtttgacacgaaaaatccgtcgaccatgccgtagattgatgtgaaaatcatcatgaatatcgacggcagggtgaagcggagaagtttattgtaagtaaagtggtctgacagtttgatttgcattttctacctcaaaagtttgctttgaattatagtttcgatatttcttttttcagcgaatcggtgagacgttttgtcatcgcgagatacgtttccagctcgtcgacagtaagcgcgccgtatgccctctcctcagccttgcgaagattgtctactgttatttcggtaagctcacgtccggcgtcggtcagcacaatccttttctgattccgagaacccggtatcggctcaagcgtgacatatccgtttttcaccatattcgatatcgccgtgttgacggtttgcttgggaaacgagccttgcctgcatagatcctgctgtgtcacgcatgagtcaggctcggacaggacgtagagtatccacatagcagtgtcggacaaaccgaacttgacggcggcgctgtggtatacggagtcctcttccttacgctgcttttcgattagtttgatgtattcgtatatctccatctttcctccatacacatcagtccgaaatcggatgcttagtattatagtccgaaatcggacaaaagtcaatgttaaatcttaacaaaaaagacagggaataacgcggtcatgtgtactgcatatcgtatcatttttcaattccgtttgcgaatatcgcggaaatatggtataatcataaaaaagacctatggaagagtataacatgaaatatgttcttgtaacgggagctttcggcggaatgggaaaaagcgtgacgaatgctcttgtgcgccgcgggttcggtgtgtttgcgcttgacaaaagaattaccgaggcaggagaaaacgttatcccgatagaatgcgacgtgacggacgaggaaagcgtgaaaaatgccgcggctgtggttggcgggataacggatgagctttacgcagtcctacactttgcgggagtgtatatgcttgactcgctcgcggatatggaaacggcggattttgagcggattatgcgcataaacttcttcggggcgtttctcgtgaacaaagccttcatcccgtacctgaaaagcggcggcaggatcattatgaccaccagtgagcttgccactctcgatccgcttccgttcaccggtatatatgccgtaagcaaaaccgcgctcgacaaatacgcgtattcgcttgacatggaggtgcagcttctcggaataaaggtgtcggtgctaagagccggagcggtgaacacgggaatgctcggagcctcaacggacgcgcttgaaaaattctgtgagaagacgaagctgtatagctgcaacgccgcgagattcaggcatatagtagacagtgtcgaggcaaagtcggtgtctcccgataagatagccgaaaaggtgacatgcatactggagagaaaaaatcccgcgttcgcctacagtataaaccgcaatccgctcctttgcttgctgaacattctgccgaagaggatgcagctgttcgcgatacggtgcgtgctgagatgaagaaattaataaagatatcagtttcggggagacgatgccatgccaaaacctaaatggaacttaaacaatatatacatatccgaaaggcttcaggagaacctgcgtccgatatcgcgctgtgcgtttactacagttgtcgcgcctatgggatacggaaagacgaccgccgtgaactggtaccttgaagagagaagcaggacggaaaaaattcgcgttatacggataagcgtttattccgacaaccttgttattttctggaagagtgtgcaggacgcgtttcttcgtgcaggctgcggattcatatacgactattcatgccctaccgattcagcaggcggtggaatgcttgcggacgacatctgccatgagcttgccggtgatgtgccgtgctatattttcatcgacgacttccatcttctgacggacgagagagccacagctttcctttgtatgctctcaaacagactgcctacaaacattcacctgatagtcgcaagccgtgaccgatttttgccggcggcggagatactgcgtctcggctcaaaggtgtaccaaatcggcacggagcagctgcgtcttaaccataccgagcttgcagtctacgcccacagatgcggcacggagctttcgcagagccaaattgaaaagctgctttactcgagcgaaggatggttttccgcggtttatctgaatctgaggacgttttacgagagcggagagctgcccgaccgtgaatccgacatttattccacattcaccgcggctatgatatcccctcttcccgaaaatcagcgtgaatttctcgccgtcatggggcttgcggatgagtttacgatagagatggcgcggtatgtcactgaaaacgacgacactgacgagattctcgacacactgaccgcacagaacgcgtttgtgaagagactgtccgtcggaaacacctaccgctttcaccatatgctgaaggagtgcgcggagcatacctttcagtctctgccggaggaaaaacaggcgcgttacctcgaaagctacggcgcatggtacgaggagcacaagcagtacatccacgcaatgtcttcttacagacgcggaggagactttgacgcgcttcttgaagtcattcacaaggacaagggaattttgctttcgtctcttgagccgcgtcttgtgctgtcgttccttgacgaatgctctgaggaaacactgaaaaagcatccctttgccgtgcttgtgcttatgcggtgtatgttcaactggcggcagataccgaagatgatgcagctgaaagccttgctgatgtccgcgattgacgagcacaccgaaatatcagccgaggagaggggaaacctcatcggagaatgcgaccttatcatgagcttcctcttctacaacgatatcagcgcgatgagcagacttcacagaagcgcaagcagtcagatgtcgcgtccggcaataagcatacaaaacagcggaggatggaccttcggctctccttctgtgcttatgatgttctatcgaggtgcaggggagcttgaggctgagctatgcgaaatggacgagtgtatgccgcactactacaagattacagagggtcacgggcagggtgcggagagaatcatgcgtgcggaagcgtatttcatgcagggaaaattcaccgacgcgcacatagagcttgagagcgcatatgccgagattgaggggaacgggcaggaaaacatggcgctgtgctgtgactttttggcgtgtaggctgtccttgtttgatgatatcgaggagagatacaccttcgaggaacggtacagtcagctgctgaagcaccacaattccgcgtggctgaacatctggagcgcgacggctgcctactactatgcgctgtgcggaaaggttgagaaaatccccgaggtgttcgcgtcacacaggctttcggcgatgaacattctctcccccggcaagcccatgtacgagatgatagagaatcaggtgtatcttgcgcagggagcatacgctaaggtgataggcagaagcacggagcagctctccgtatgtgaagcgatgcactatgcgctcgtgtcactgcacgtgagaatacagaccgccgcagcctatgaaatgctcggaaagcgcagtgaagccgcagaactcattacttgtgcgctgaacacagctgaggtcgacaatattgccatgccgtttgccgagaattaccgatatataaaagaccttcttgacgtgataggagacaaagcaaatccgtttgtcggtgaagtcattcgtctcggcaggatgtacgaggagcggcagaaacagattgacggaacgacgtcacgaccacagaggttcaatgtgctgacggagcgggaatacgaaatagtcggatttatgtcggagagactttccaaccgtgagatagcggagaagctgtttttgaccgagggcagcgtgaaacagtacattaagcagatatactccaagctcggcatagagggcgacacaagaacaaaacgcagacagctttcggagcttatggaagataaggactgaggatacgctgaattaaaccttaaatcagcggcttcctcacctttggtgaattgtattttttcatgaaccactgtactatataggtatggtggttttattttgcgcgaaagggggatttttattgaaacggagatatatttccgaggtagagccgctgaacgactatgttttgcagatagaatttgtatccggaagcagactgtttctcaacatgaagccgtatcttgacaaaatcagatttcatacgctctctgaccctaaggtttggaacagcgcggtaacaaacggtattttcattcgcttcggcaatgtggagcttagtcacgacgaggttttatctatggcggaagaggaaattcaaccctgaaccgtgatttcattagactaaaggagaatattacatgaaaagaaaagcgtttttactgctcttgtgcctgctgtttgtctcgtgctccgctcaggacgactatgacggcgactactacgatggcgacaattactactacgtcgacaccgaaaaagagcacacggtgacaaaggtcgacacaaacggatttgccggaatctatatgcctgagaacgaggacagcgactgggactacattgatgttcacgacgatggcacattccatctttacggcaaggaatacgacgtaacgggatggataggctacgacgaggaatttgacgcccagtacgcgtacaacgacagtgacggaagcggaagcagattctatgtaacagaggacgaaagactgtacttcgcggaatacggttatttctacaacacaggaatggacaatatgtggtacgaagacgacagtgtagaaacaactgacgagaacaccgacaacagcgataacaccgataattcttccgacggaaacgaatactacagctggaacgccgagctttatcagcgcaatgtcagcgaattagagggaatatggtactatgacggcgagctttccgcggaaacatacatcgtaatagacggagagggaaactggagctattatcagagagcaccgggaacggaagccgccgagatggactacggttatctgacatattccgaggatgaagcaagcacatactacgcggtttcccagctttacgaaggagttgagtttaaggtattcgatttcgacgaggatgaaataatctggggcgaaaacggagcttactaccttatggaataatcaatattatataggagatgacgcaatgaaaaaaatgacaaaaacgattacacttcttgtgtccgcactgctgtgtgtgagccttgtttcctgcggcgagactgacgactcatacgacgacacggactatatggaagcgggagacgactggcgcacaacgggacttgttctcgctgatggagttataacacgcgatggggagagcacggatgttttggtgactgtcggggacaacggtgctgccttctactacgatgacgcgggtcacgttatttttgatgaggttgaatatcccgagacgattgcgggagcgcacgacaagtttgagagcatttcctttgacgacattgacggcgacggggagagcgatgttgtgctgaatctgacagacgataacggagacagaaccgagcttgtctggatatggagcgcagaggacggatatgtttaccgcgacagcacagctcccgacgtcggagaatacgttggactttggggatatgtcggacagaatctctggctgcgaattcacgatgacgcgacatgggaatttgtgaacctgaacgacgaagtgatagactacggtacgctgtgggtcgatgaaaacggtgttactcttcactttgacggaaacggagacgtgcttcagcttgacagaacggtgagcggcgaccttatagacatggcaaacggcggctctcttgttcccgtggatgagattcagtcgagcgagccttattttgtacggaacggacttgagataaatgccgaggttgacggaggggaattctacctcgacaacggattctgcacatattttgaaggcggcgcggactacagcagaacggaatgctactgggaagttaaaaccacaagcaatactgtgacaaacggagtacgcgagataaactttgacgcgatatgccgtgtgccgagcggtgcgatttcatcatacgaggaaggctgtgctacggaggtttcgtgcgagctgtttgactactacacgggaatgtggctgacggacacaaacgaattcgcaaactcaagccgtggggacgactactatctccacacagtcagctacggcggctccagctcacttatagagttttcgtatatcacggaatatgagtacgaggtcggagattttgcgctcgtcgtgacaagaagctacaccgtttatgttcccgaggattacgacggacttgtttttgcggcggagactcagcctgaaacatacgagggatacgacaacagaatgctgcgctacacaaactcacccgaagccgcacttctcgatttggaagagacggactccgcgaatatgttgtttttccgtttttacaataactgagcgggaaacgagatgaacaataatcctattcccgtaagcgacgctctcgcgaaaaagctcgggatgtaccaaaaaatgtcaagcctatgcaagcttctcggagctgtgtcggcggtcttggttttcgtagtgtttttcgcagtgcggaacaaagccgtaaaatcaatacttgatacggttctgtctttcgcggcgttcggactgatatattcgggcaattttctctataaaaaaatgagagaaacgatgaaagaacagcttggcggctttttcgcggaggaatttgaaaaggcttacggcagagacgagcgtaccgatgagatgcgcattgacgaggctctcgtgaaaaaagtacacctccttgacggaaaatgggaggagtgcagggtcgaaaattatcacgagggcaggcacaacggaacgcatttctcggcggctaacgtctttctgacccatgtttacattgtggaaaatccgcacgatggcagggaaacacgccgcagcatggcatttcagggacttgtgttccgctgtgagacaaaagagaaaagcacgatatccatagtgaagcaggaaagtgttgtcggagaaaatgaggtaagctacagcttcagcgtaactccgacagacgacggaacggaattaaagctcgccgagataataaacaggcttgacagggagctgatgggggagatattcgcggctcaactggagaacggcgtgcttacagtggctctcaaaaccgactatgcctttgccgaggtcgcggaaaacgtgaacatggaggacataggcgcgataaagcagagctacatcacctctctccgcgaattcgggcgtatgcttgacataatcgaaaaaagcgaattattcagcctttaaagataagaaaggacagatatgacagcgttaattatagtaataatccttgccgttctcatagcgatatggtgcgtgagtacggtcaacgacttcaagaagaaagaaattcgagtacaggaggggctttccggcgttgaagttgcgctcaccaagagatacgatatgctcacaaagatgctcgacaccgcgaaaggctacatggagcacgaaaacgagctgttcaccaaagtgatagagctgcgccgcggaatgagcgtgggagaaatgagcagtgcggagaagcagatgagcgagcttgaaggaaagctgtttgctgttgccgagggatatcccgagcttcgttccgctgaggtattctcggagcttcagcatggaatcagagacgcggaagagcatttgcaggcggcgcgcagactttacaacacatgcgtaacctcgtacaatactgcaatcgcgatgtttccggcaaagcttctcgcaggctcacgtcagccgaaggaatttttcgcagcggacgagagcaagcgtgaagacgtgaaaatgtcgttctgacaggagtaaaagatggaagaaaaacaaaaactgacaagtgagcagcttgaaaatgagctgaaaagccgcaaaacaaagtcactgctcgcgaaaattttgacgtacggctgcggactgcttacgattctgctctttgcgatgaacagctacgtcgccgcggttatctgccttgtgctcacatttgtcggcggatatcagatgtcaaagcagggcggggcaataaagacactgctcggcgacaacgtcataaaaaatctaataaacgaggtgtttgacggcgcagagtatgctccttttaagcatatcgacaccacaaaggtcacagaagcagggatggtgttcccgtttgaatatgactccgtgaagggaagcgactatatcaaaggttcatacaagggacttgacgtagagctgagcgacattgagctgagaaaagtcgacacacgctatgacgagactgcacagcagtggaaggatgaggaacagctcgtattcaagggacagtggctcatatgcgatttcggcaaggagctgtccggcgagatacacatttccgacggcgcgaagaagctgagaaaacagcacaaaaacgacagcgtggagatggaaaacaccgcattcaacgacagatttttagtgacatcggctgacgcacacgaagcgtactacatcctcacaccgcacatgatggaatacatcctcacaatggcaggcagaagcggaggagaggtctacatggcgtttttgcgcggaggaaagcttcacattgccgtaaaaaccgagcgcgacttctttgagcttggcaagacaaagacgaatatagacgagctgagccgcaaattccgcgaggagataaagtggttcaccgatatcattgacgttctgcgcgttgaggatacgctgtataagaaggagagggaagcatgacgttcggtttagccgcggtgcttttggttctgtccgtcgccgctctcgtgctgtgctgcaagctcgttagaaagaaggcagtgcgcgtagtgcttattgtgctcttgtctgccgtcgtgcttgctcttgccgcatacatgggactgacgctcatatttgtcgacgcggtacaaaatcagccgccaaatgcataaaacaaaaccgtatttcagcgatacacaatgtgcaaagaaatacggttttttgcgttatttaagatacggcgcggttctgtttccgaggtagtatgagtaaatgtcgggtctgtctataatctcccgcgcgaagatgagcagtgcgacaaacgacgacgatggatataaatggtaaacggtatgtacttcctcgtcaagttccagagtatcgctcgtgacaatacagtaccttttcgctttttctaagatttcgcccgccttaacggagtcaatgccgagctttttctcaagcagtgcggaggtgaatgccttgcttttttccatcctgtgcagtaaaaccatcgcgtcgaaaaagtctttgtcagccatgtccctgaaaaacgcgggataatcaatgccgtcgaaatacgcttcatccgtgctttcggggtctgaaacgagcaaaaagtaccgtctcatgttcccgattcccatgttggtaaagccgccgtcaaacatcgcgctcgaatatctctgtcccttttcgccgattttcttctcgtattcggtaatgctgtcctcgcttttgtactcgttttgtgagacaagcgcgcgctcgatgttccagcagacgccgaaagccgttttgactttgtcgtcctcgtgagcttccgcaatctccttcataagcgccgactgaatatctccgaagtctcgtatttttctgccgaagagagaatctatcgacaccgaaaagaaatccgcgattttcgggagcagttcgacatcgggtacgccgccgttttcccattttgatacggcttgagcgctgactccgacgtagcctgcaacctcctcctgcttcacgcctttttcccggcgcaagagtgcgatttgttttcctataatttcagttcccatgagctgtctcctttgaatttttgtgtaagccgcttttactgggtatattataactgaaactgcggttgatttcaacggaggcggatttgtgcaaaacaaacgtcggttgagtggtgttttacttcacaaaataacagtagtccattattatcctgccgctttcgtcgggggtcgtgtatctcgggcagaggcagttttcaaaagaccattctccgccgttctcgtccttccaaatgtcaagtcccgcgcctgtaacagcatttctgcaaggagcggtgttgtggacttcgttttcgagcccgtatatccaggaagtgccgagtcctatcgccggaaaatcaacacaagcgaatccttcgggaacgggagtgtcaccgggcgtgaacatacctaaccaatactcaaatggctgtccgtccgctctacgctcaagaccgacatatccgccgccgttttcccatatctccgtgattttgccgactcctcccatggtctgctcgatgaggtcaaaccatccgttggcaaaccattctccccacatcggaccgaatccggaatacttttttccgatgaaacgcatagcagggacattttccttgaagactttgataatttctgccatagtgttttctcctttttgtaaaaaaacagccgagaacggggacgagaacctcattttcggctgatactatcggaatgacaggatttgaacctgcgacatcgtggtcccaaagaggcatcgtaaggtattgtccgcttatatgggcttttttcagcccttttcgctccgaaaccaatgctcttcggcgctcttatctgcatatgttccgagtactccgaaaaggtaagtggtcagttatgtggtcagcaggaatttttgcgaattaatatgctccatcgcctctcgtttttgaacgaggggcatttttcttttctgccgttattgtaactctgaggaagactgaatacaagtcaaaatttgcgccgcagtagacaaagaaaaagggactgctcagaatccgcaaataaaaacttcggcagatttatatgatttcttaaaatctgccgaagtctcgcaagaacgtgtaacataaatcaaaaattaatataacatttgcctgcatagagtattgctattttttagaaaatgtgttatactatcatcggataaatgttatatcgtaggaggttactatgaaaagctccgatattattaaagatatacgctcaaggcttggactgagccaaacagagctggcagaaaaattgggcgtcagttttgcaacggtcaatcgttgggagaaaggtcggtgcgagccttcgcagatcgcgctgaatgccattaagcgcttatgtgcgcataacaagattgattactctcgatttgaaggcaaccgcatcattacttcggataaagttataactttatatcacggctctaaatccggcattgttggtgatatttcacctacaagtcgtgagcattgcgatttcggaaaaggcttttatatgggaacagacaggacgcagccattgaccttgatttgcaactatcccgatgcgaagctctatactgttaaagctaacctgtcaggattaaaaatacttgacattgaggttggtatcgattgggcgcttctcgttgcctataaccgaggcaaaatggattctgtaaaaggtacggctatatataatcgcattgctgaattggcagacggctgtgatatgctgatcggctttatcgcaaatgacagaatgttcgtcgttctcgaccgtttctttaagagcgaaattacggatgaagcgctgatacacagcttatctgcccttaaactcggcaaacagtatgtagccctgacggagaaggcttgcaggcagattgaaatcgtagaagaagccgcattaacagataaagaccgtgaaacattaagaattgaaagcgaagataaccgttccaagggcgttgcgttggcggacgaaatctgccgtcagtaccgccgtgaaggtcggttctttgacgaaatactgaaagccggtgaataatatgcgtgagctgaacagtcaacaattcggactctgcgatatacagggcagactgtttgaattggcactgaaaaacggatatgactgcaaagacttcatcgaaaagtttatgaacagtaagaccgccgcagcgttggatgaatcctatgaccgtctgcagtgggctggcgaggaatacattctggaagaactgaacgaggaagtaggcggtctaaagaaagccggaacggtctatcataatgaaattatgtattggttgggctacacctaccgctattggcattattatacaggcgaaaacagcaaagagatttataaaatcgcagatgccgaaacaatggcgacgggctacctcggcctccacaccttggatgtaaaaatggcgatagatcgattgaaagaaaatggatagacaaaaggaattttaacaatgttaagaacatccgcacagcggcagatgtacgataggagaatagctatgcagcaaacgccgttttatgcttattatatagcgagaatactggagggcctatcggaatcgaataggcttgtgtctgcgtttgcttcctccgatatccaggtctatccgtttcaaattgcggcagcaaactttgcattgcgttccccctatcaaaaaggtgtaatactttgtgatgaagccggaatgggaaaaagccatgaagcaatgcttattatcacacaaaaatggttagaaggtcagtcacggatactgttgttgattcccaacgccgatttgctcatgcagtggacggagatgattgatctctactatacaattccttatattgcgctgacaaaccgtgaagaatggaatactaatatttccgacgataatccaaatgcatttatgcaggacgctattgttatttccacttatgattttgtcgcggataatgagtcggcagtgaaagacattcattgggatttgactgtatttgaagaagcaaatgcgctatcttctgtttaccgcgaagataacaaacaagcaaaaatattaaaacgtatctccgatggctctttcaaattactgcttaccggaacgccgatagaaaagaatatcatggatctgtacgggctgatctggtttatcgacgaaaccgtgttgcccaatgagcaggaatttctgtcgcgctatttgcgaaaaccggagaattatcccgagcttgcagaaagagtaagtaaatattgcttccgcacactccgctctcaggcaaaggattatgctaaagtgccggaacgaattctgattacaaatgaatatatgccctctccgaaagagcgggaattatatgacctgctctatgcctacataaataagccgaacaaaatcgcctttccggaaatggatcggtatgacctcgcactgcggcttttaagcttgcaaagctcttcaaccgccgcaatcttgcaaacgattaaaggcatcattaaacggttggaaaccatgtcaaatgcacaggatgagcttgccgaatggcggcagatgcagaccgttgccgaaagcatacctatggacgcaaaagcaaagcaattgcttattgcactgaaaaacggatttgcactgatgaaaaagtccggtgcgaagaaaaaagccgtgatttttaccgaaagcgttgaaacgcagaaaatgttgatattcttgctctctgataaatataagacttgtctctataacggaggttcggattacagctcgattcagaagttcaaaacaagcggagaaatacttatttctactgacaacggcgcaaaaggattcaatttagaggacgctgcttttgtcattcattacgatctgctttataataccttaaaaatggaacagcggattgatcgctgccaccgattagggcaggagaacgatgtcctttccttagcgtttattgataaaaacaattttgccgatgtgcgtaagctggagcttgtcaataagcgaatgcttgtggctgacggcgtgttcggtattaccgatgaggtgatcggcggttttaccgagaatttagacacggcgtttgaagcggtgtcaaggcgcatccgtacgaaagaacaggtgaaagacgattatcaacaaacattgatacagaatgaagcaagaaataagcagcttatttcttctgctgaggatgtgctgtttactacattcacaaaggaacttgcagataaaattacgatatcgccccgttatatcagcgaaaaggcggagcaaattaacaccgcgctgtggagtatcgtaaaatatttctttgagcagtacaacgaggctcacgaggattgtacctatgtgattgacgatgatgagaaaacggtaactgcaaccaattatgagaaattaccaatgctgttctattattggacaggcagtcgtaacaagccatatcaaagcctgaaatcctacggcatggcaaaggatttcaaaccgcaccacggcaggattacactgacaagtattatcggacgcggaattattcacgaactggagtgttccgagtgtggagctttgaaagtggagagtggagtctatgaaccgtgcgaaatcggtttgtacagcatcaatctttcctctgccgctaatagaacatctgccgatattcctgtactggtcggcaaaacgcagtccggcaaactgcttacggaagaacaatgtaaagccattctgaaactctcggcaaagagctatagcgaggaagggcgcaaaaatccgcattggctgaaaagcggtggcagaccacatgagcttgaccggcttgtcccaaccgatatgctcgtcatgaagcaatcagaaaagctctctcccgcacaagcggaggaaatcgatcaaatgaagataatgacaaaggcaaagaaaaatgcacgcactcgtgatttggatgatctggataggcagataaaggcagcggaaacggagcgggatgcaatcacaaatgatcgactaaaattgttggcgttagagaagaaagccaatctcctacggcaggaatatatgaaaaagcaggaaaaccagttttttgacgccatgcggctggatttggaattagaagaacaaattaaggaatttaccgaaaaggaaaaattgaccgcaaaggtcacaagagaatttgtagtgaaagtggagggatctttgtgaacaataatatacttttaagttttttggaattatcaaattctgagtttgagtttcctatattcagaaaatcaccagacaataactccaaacttgacgagatgtatagatacaaattgcctacatctacacgaactgattgggacacatatgatgtttcatttcgggagattgatgagaccgctaggtttacagcaaaatccactgacaatctaaatatgaccaaaaagtggcttatgagcattctgtctgaaaaagctacttctacttttagtaaatctgaattttatgttggaaaccattttgtgcccaacatatcatttgtaatttcatctcataaagaagggcaatgtctaattcagcttgaaccctactatttggaaattaataatagttttggatttcttgtagattataagtttaagccttttcatgattacgagaaaacgcgtcaggaaaagatactgagcttgtcactatcctcagatggaagtaaaaacaaaaattattattctgataaattgagatacttaaaaagttttattgataattttgtaccacggctatttcctcttaaaataaacggacttacccttgatataaagcgaacattattagagttatctccttttcaattaagtgagaaaacctatatgttccaaaacggagaaagtaaaatacagtttcaaggcataaaaaaatataagcctttgaataatagtatcggattaccacactatgtttttgtatttgaaaaaagtaaaataaatatttcaaggcagttggttaaagccttgcgaggacaattgtatccgacttttagcggtatggaaaatatgttcggggtagacttttccaatgataagatagattcaattgttgtagaagactattctattgataatttaaagaaaatatctgcacaattggatgaaatcatcaaaaaaatccggatgcaaatattgttggaatttttgccggtatagaaaaggattttgatactgggcgagattactcaccctattatactgtaaaaagctgtttcttagaacgtggattggcaatacaggcaattactatcgaacaggcattaaaacgcgatggatttaagtggtctatttcagggattgcattgcaattgtttgtaaaattaggaggtgtcccgtggacagtgaagcctcaaaacaaaaattgtttaatatttggagtgtcatctgcccatatcaaagatgaagaaaataacacaacaaaatattttgcatattctctgtgctttgattccagcggtttatataaaagattaaatgtgttaggccaatcaaccgataaggacagttatatcaaacaactatcgaacgagatcaaaaaacatttgcataacgatttagacgattcaattgaaaaatgtgtaatacatgttccatataaacttaagcgggacgaaatgaaatgcataaaggaaagtattgaatctgtaaagcaggagcatcaaaagattaccttttcagtaataaaaattaatgtcattaataaattctttggttattcacattataacagtaatatcccccttgcgggaagctgtttgcaacttggaaaacgcgaatatcttgtatggtttgaaggtcttcaacaaggaaaaactcaagtggtatccgcacaaaatatctctaaccccgtccatattcaatttatttatggcccggagatgacagaggaagaaataaaaacatatctgcaagatattattaatctttctggagccaactggcgcggatttaatgcaaaacacgaaccagtatccacactatatcctgaattaatagctaaatttgccggaaagtttgatcaatatggattgaatcttaaaatcggtaattcggcaattaaaaaagtatggtttatttgagggagaaatagaaatgagcgttggtgaaaaatcagtagtattcttattaggagcagggtgtagttacgatgctagtgttcctatttccaaagacatgattgtaaaattagaaaaattgctctccacttcatataaagatgatttatatccactttataaatatgtgagatatacgatggagtatggtagtaagttatctgaacaaaaccaagatttcaatattgagtctcttcttgttacattgcatgcgttagcagaacataaaaaaacgcacttgtatccatttgtaaatggctatacaaatgatttaatcgagttggcggggcccca

SEQ ID NO: 3526 - DNA, 3934 bp, Unknown
  16S sequences of unknown bacteria
gggcgagcaggtggaagaccccgccgcagctgccgaagaataagtagaggcaaatctgtttccattgaatgcattttccggggcggtcttcccgtccgccccggatttttttacgagtaaatacaatttacgattaagaaaagaatcaggaggaagaatatcatggcatttactgcagcagatgtgaaaaacctgcgtgaaatgactggcgttggcatgatggactgcaaaaaggcactgaccgaagccgacggcaacgtagacaaggcaattgagatcctgcgcgaaaagggtctggccgcttcccagaaaaaggccggccgcattgccgcagaaggcatggcttatgccgctgtgtttgacggcatcggcgtggtagtggaagtcaacgccgagactgacttcgtgggcaagaacgaaaaatttgtcgattttgtcaaaggcgtggccgctacggttgccaaatgcgccccggccgacatggatgcactgatggcctgcaaatatgcagacaccgatctgacggtggagcagcagcagcaggaaatggttctggtgatcggcgaaaacatcaaggtacgccgttttgcccggtttgataagaacatctgtgttccttatattcacgccggcggcaagatcgccgtgctggtcaatctggaaaccagcctgcccgcagaagcggtcaacgaagtgggcaaagatgtggctatgcagatcgccgcgctcaatccccgcttctgggacaagacccaggttactcaggatgtgctggatgaagaaaagaaaattctgatggttcagatggagaatgatcccaagatggcaggcaagcctgagcaggtgcgcgaaaaaatcgttatgggcaagctgaacaagttctattccgagaactgcttgctgcagcaggagttcgtcaaggacaatactatgacagtggagaagtatattgctgctgctgccaagaacctgagcggtgaaatcaagtttgctgacgccatccgtttcgaaaagggcgaaggcatcgaaaagaagcaggaaaactttgctgctgaaatcgcttccatggtgaagggctgatttattctcttttctgcaagtatacaacaaaagacccgaagcaggcttggtcctgcttcgggtctttttattgaaaccgttttgctgtttggcataatctcattccgccgctccccactcccttttggcagtggggagcaaagacttgcatccgtcaggctttctgcggcgtattttggggtgtatccggcggaagatcgcgccgcttcctgtgctgtttcgggtggctcagatcgtcaatgacggaataaaacaccggcgtgaataccagcgtaaccaatgtggaaatcatcatgccgctgatcatggtgatgcccatatcgctgagcatttcgttggtatccccgataccgagggccatcggcaccatggcaatcaccgtggtcagagccgtcatcatcaccgggcgtacacgcagcgggcaggcatgaagaatcgcttcttccctgctctcacccattctccttcggaccttgatatattccaccagtatgatcgatgcattgactacggtaccggccagcatgatcagcgataccagagaaataatcgaaatatccctgcccgtcagcggcaatgccaccagtgcccctgtaaatgctacgggaagaatcagcatcacaatgaccggcatggtgaacgactcaaactgcacggccagaacgaaatataccagccccagggccaccaccagcgccaggagcagattgccaaaactctccatcatctcgctgtagctgccggatacctccgcccggtacccttccggcatggggtaggagtccaaaatggcattgatctctttcgtcattgccgtggtattgccgctgactgtatcgccggtgatctccacctgtcgggactgattggtacgattgatagtctgcggcgcctgttcgatcgatacctccgccaccgaggacaagggcaccgtacctccatagctggaagaaatccccatggagcgcagcgcatccaagctttcagatgcatttccgctgccgcgcaccatcacatcatattccttgttgctgatggtgacagtggtcgcttccgcgccggtcagctccgcgcgcactgcggcgccgatggtggctgcggtcagtccgtactgtgctgccgcttcgcggtttaccgcgacttttacctccggcacctgttcggaaagcgatgtatccacgtttttcgcatcctccagcgcagcgatctgcgtttccagatcgccggcaatcatggccagggtcgcgtagtcgtctccggtgatttccacatcgatatcgctgccacccaacatagccatactgctgctggccgaggctatgatttctgcgccggcgatatccatcagttcctgctgcagcgcatccgcaacctcctcgctgctgcgctcgcgctcccctttacttaccaggttcgccatcatagtggcggattcatcctgcgcgatataaaacatatccgtcatttccgggatttcctgcatcttatgagccacccggtcggcaatcgccgtggtttcctccagcgacgaaccgatcggcattgtcacgttgacactgaccatgctctgatccatgtccggtatgagaaccatattggtggtgaaaatggaaattccgaaggccgccaccatagccgtcgccgccagcattccggctttcagatgatggacaaaatagtccagcaaccggaggtagctgtctttgaggttctgcatccacgcactgcagcgcagcagaaagccacttttcttcttttccgcctgcttcagcctctgtcggcgcactttttcttcgtccaacatgaaatagcacagcagcggcaccaacgtcagcgcgatcaccaacgatgcaccgaccagcgatgcaatggtcaggcagaaatcacggaacatcatgccagccaggccgttgaccagtcccaaaggcaaaaataccgccagtgtggtcagcgtagacgccaccaccgaagaggtgacctccttcgttccatcaatacaggcgctcatgcggtcgtgcccatcggcggaaaaacggtaaatattttccagcacaacgatcgagttgtccacgatcatgccgacgcccatggcaatgccgcccaggctcatcatattcatagacaggtcgagggcctgcatcagcaggaataccgataaaatacaaatgggcatcgatacggcgatggtcgccgtagccccgccccggcgcaggaacaaaaacaccacaacggctgccagaatcacgccctgcaggatattctgcagcgctgatgtgaccgcctggctgatataatccgaagcaaggtacggcgcagtgtaatgaatcgaggcattttctgcgcttagttcgtccatccggtccacgatggcattggaaattgccatttcattgccgccggaacgcttgctcacctgcaggatcacacaggccgtatcccccaccttggccacagcttccggctcttgaaccgccagttccacctgggccacatcccgcagccgtacgctgccgccggtggggagcggcacgatcatattggcaacgtcctctactgactgaaatttggcatcagtgctgaccgtcagcgttttggaaccattgtcgatctctccgccgggatagagcagattctgtgccgccaagatctgggaaatatagctgttggaaagccccagccctgcagcgcgggtagcgtccagccgcacgtcgatttgctcggtcacgccgccgctgacttccacactggccacaccgtcgatccgttccaacgcaggaaccaccgtatcttcggcaagacgctgcaaggaagcaagattgtcgccggacaacgcgatcatggccgtaggcatcat

SEQ ID NO: 3527 - DNA, 3700 bp, Unknown
  16S sequences of unknown bacteria
ggcgcagacggcacggagaactatgtgtccggcaccttgaatggcagcagtggagcgactggaggcggcgaaacagttgtcgttcaggaacagcaacagactgtgaccggaactggatatgacacgaacggtcaatttgtattcgaggtatacaataattctgcttatgacatttatgcgctgtatattggcgtcatcaatgccagcagcgatcatgacatcgatgtactgcctcaaattcttccagctaacagcagcaccactattgtgggccaggctacaatgggagactggtcgcagacagagtggacgctgtatgttgaggatgtagacggcgataccagcgcttcctttgattccttcaacccctggacagtgagctatgtggacatctactggcagggtgattcctatgtgtgcgattttacctattgatttccgtctgaacattcccacttgtgcaagagctgctccggcttttgatgaattgcttgggccatagggcgtaatttgtagcatgccttatttacagggaatcaatacgtgggtatcgatagatccctaaaaagtacaaatcaacatccctcgaaataccgaggggtgtttttcttgtatcccaaaaccacacgtctattctggcggaaagcgccaatatcgcttttttcacgccgtatagtcaggattttacgcagaatgctcccggaattgattgttcggcttgttttttatgcttggatacactacaatggataaaaaggatgggccatttttcacaaaccggccccggcaaggaggcatgtatatgccgttttctgaagaaaatgtgctggattttgtaaaatggctcgaaaagtcgtattttgtagaacgggctctgggaaggattgaaaagcttctggcaccggaatttatgatggtgggaaccggacggcgggaggtctgctatgacatgccgcagatgaggttcctgctgcagcaggagcaaagtggatttcatgatacgtttctggtgctaagtgcccattacagcgtccgaacgctcacaccggaggtgttttccgtgtgcggtgagcttgtcgtgcgcgaaaacaatgaatcctgtgaaatgctggatcttcctgtccgcgttacgatcattttgcgcgcggagcagggatgtctgctgctttcgcagctgcatttgtcgctgcccagtcccgaccaggatgacgcggaattttttccgcggctgttggtgggggagaacatctccacactgcgcaggcttgcagacgagcgctccgcagagctgcgggagcgcaaccgtgacctcgatgccctgatgaacaatatccccggcggcgtcatgtgctgcgacgccacggacgaactgaaccttctgcagttcagcgacggacttctgtcaatgttgggttatacacgcgaggagctggggactgttttccataaccgattctccgagatgatttacgagccggatattgcacctacatgggaggctgtgcatgcgcagctggaaaaaggcaatacgaagctcattgagtaccggatggcccgcaaggatggtggtttgatttgggtgcaggacagaggccagctcatgcgccgggaggatgggcgagaggtattctactgcattctgttggatattactgaaacaaaaaaggcgcaggaggatctgcgcctttcgctggaacgccaccaaatcattatggatcagaccaacgacattatttttgagtggcaggtcaaacaggatacactgactttctcgcccaactgggaaaagaaatttggctatgagccggtgcgggaaaatgttcatgcgcacctgctggacaacccgcatctgcatcctgatgatgtaccactgctgcggcgcaagctgtcggatattctggaaagagaaccctatcaggaggcggaacttcgcattcagaagcgggacgggggctatttgtggtgccgtgtgcgtgcgacgctgcagaaagaccgcgcgggtgaaccggccaaagcggtgggcgtgattttggacatcgacgcggaaaagcgggaggcccagcgcatgcgggagcgtgcagagcgcgacaccttgacggggctgtataacaaagggaccatggaagccaaggcagaccacgcgttgggtgcactgatgcccggggaaaacgccgtgcttttgatgatcgacattgacaatttcaagcaggtaaatgatttttacgggcatctgagcggtgacgtgatgttgacggaggccgcacgtatgctgcaggatatgttccgcgcaagcgatattctgggacgcatcggcggggacgaattcaccgtactgctgcgtggttccggggcgcaggccatagcgggccgcaaggcgcaggaggtgttggacgcttttgcgcggctcctgccggcacagggcggcgggccagttttttcctgcagtgttggcatcgctcaagcgccgcaggatggtaccgattatctcacgctttataagaaggcagacgcggcgttgtaccgagccaaaatgcaggggaaaaatacctatgcgttttatacccagttgccgttggaagggctgggagcgcctacacagagcaccgtgggacagacgattgattccgagctgggcacaggcgtgatgcgcagctcgctggcggagtatgtatttcacattctctaccagtccgacgatgtggagaaagcgattcccagcgtgctggagatcgtagggcggcatgtaggtgtgagccgcgtttatatttttgaagattccgaggacggaacatactgcgataacacctttgaatggtgcaacgacggcattgtgccgcagatagaccagcttcagcatatgctggagggcgaactggcggattattataagaattttaacgaagacggtattttttactgccgcgacatccatgcactgcccccgaatcaggtgcaggttctggaggcgcaaggcatcaagtccatgctgcagtgtgtgatccgcgacgacggcaagcccaggggctacatcggctttgatgaatgccgggaaagccgattctggacgcaggagcagacggacctgctgtgcattgtagcggaaatcgtgagcgtatacctgctgaaggcgcgggcacgcacaaggctcacccatgcgctgcagggcgcgcaggcgattttggactcgcaggacgcatggctgtatgtcatccgaaaaggaacgtatgagctgctttacgccaataaaaaaacaatgcaggatgtacccggcgcaatgcccggcgagccttgttaccgtgtgttttaccgggcggacaagccgtgcgtgcattgcccgctggtaaagctggcccccgaaggcccggaccgcgtcaccgcgaggctgtacagcgaggttctggacatggaagtaacggctgtgggcatggaaatcccctgggcgggcggagaggatgcctatctgatggcctgtgaaaaagtaaaaactcagaagaaaaagtgaactgaaaaacagaaaaggcgcccggctgcggaaaaataagcggccgggaatttttgccggtattttttcacctgaaaagtaaaaaaacacttgcattttttgctgggatggtgtatattaaataagcagttttcgttcctctttagctcagccggtagagcatgcggctgttaaccgcagggtcgttggttcgagtcc

SEQ ID NO: 3528 - DNA, 4857 bp, Unknown
  16S sequences of unknown bacteria
gtggcgggcgagcaggcgcggcgcgccctcctgcttgctgcgcacgacgatgaggtcggcgttcatggcgttgagcgtctcgcccgtgtcggcgagcgtctcgccttttttcgtggagctcgacgaggcggagaagttgatgacgtcggcggacatgcgcttgcccgcaatctcgaagctcgtgcgcgtgcgcgtggacggctcgaggaagaggttgatgatcgtgcggccgcgcagcgtgggcagcttcttgatggtgcggtcgttgacctccttgaagctgcgcgccgtgtcgaggatttcggtgatttcctcgacggagtactcgtcgatgtcgattaggtgcttgtgatggagcatcactgatcatctcccagcacttcatggaaggtcttggtgaggtcggtattcgcgctgatcggcatggaaccgacgtgcccactcccggggtcgaggatctcgaccgaggtacggccgtcgatgggctcgtagaagaagctcacgacctcgtctttgctgctcgggacgttcttgcccacgaagtcagcgcggatggggagctcccggtggccgcggtcgacgaggaccgcgagctggatgcggtcggggcgtccgaagtcgcgcagcgcgtccattgccgcgcggatagtgcgaccggtgtagagcacgtcgtcgacgaggacgacggttttgccctcgagcgtgaacttgatgtcggtcatgtggacttgcggggaaagatactgctcgatatcgtcgcggtagaacgtgatgtccaagcgcccgacggggaccttgaccccctcgatctgctcgatgcggcgggcgagctcggccgcgagcatgtctcccctggtaacgatccccaccagcgcaatcgacgaggcgccgtcgtttgcttcgagaatctcatgagcgatacgcgtgagcgaacgctcgacggcgcgtgaatccatcacgaccgtcttggtcttgtatggcatgtcaccaactcctttgtcggcctctctggaccggtcttaaaaggttcggaaaaacactcttgtcactatcgcacaactcggcgtcttgcgcgtcgaggtttgcatttctatcttgtgaattcgcctgcgaacaggtcgcggcaggcaggtggcagctggcagctggcgcggaccgcccaagggtgacattttttgccgcgacaccggccaagggagacgttttgagggcagattccgtctcccttgaagggttccgcggcagctacagccgccagatggcgcggaagaacccgagggcgacatcagacgccgcgacactggccaagggagaaatccaaggcttgggagcgttcgccttcggggccctccatggcatacgcgtcccggaacgccccaaaggtgattcctcgggcctcgggagcttcccccccttggagccaaccacgacatacttgccacgaaacgctccgagggggacagccccgagtacgaatctgtcaccctcggctcgatctacggcacaccctcccgcagatgccgccgaatgctccaagggtgacgtttttcgccacgaaacaactcgagggagacgtttcgagggtagattccgtctccttcggagggttccgtggcacccgagcagagcagatgacatagaacgccccaagggcgacaggcgatgccacgaggcgggccaagggagaggcccgacgccgtgaggtaccccaagggagaatctgggccgtttatgattccatcttcggggtgatctatggcacgcgcatgctgggtcgcccggagggacaagcccagccgcccaagccatccccctcggagcatcccatgacgtgctcgacacaaaactatccaggggagatttctccagctccgtgatttcgccctcagagccctcgtgacagataccgcctgaccgaggatgcaagcacctgttcgcacagaactgtctacagcaggagcctccgcaaggaatctcgcttctcgagctgcttgcgggcgggagttcgccagcgctttcccaggacctgatatatctgccgtaccttcacctcgaacggctgcagatgcaggacgtggcttctcgcgagggtgatgacctcgacgccctccatcttcagcgcctcgattcggtccgaatcactcgcgtattcgagctccccttcatggtagggacgcccgttgtactcgacgtcaagattcgcctcgttccagaataaatcgcatcgcgcaaatccgcgccgcgcaaccgcgcgcgaacgcccgtggaaatcgattcgcgcattgaactctggcaacggaagaccatacccaccacggcgaaccggaagacagagcaagagcatgaccgcagtctccattggggaggcagacccgggaagcacgtattccaaagcagattgcgcccgcacgactcccctgccttcacagcacgtgagcagctcccgtatcgaatcgggcgttgcaagcgggccttttcgttggacgatgtcgccttgccctgcaacagccggtcgactgtatgttccgcaaatctcgttgccaagctccatgagctcttccaattgtacggtgcgcgcggccaacgcaaagcacatctccggcgagggaacgcacagctggtcggctacccggacgaatgacctgcctggcaattcacccgaatactccgaatacgcgtagtgatgcggcctgcatcgatattccttcgaagggacgagcaaatctggcatgtcaaagctgttgagaaagatgctcgaggcgtcgtcgaggatgatctccgatgcgcggcgcggcacgccgacaaacggctcgcctctttcaaacgaaccaggatccgcatccggattgccacgccaaaaagcgaggcctgttctgtagcctgcgtacaacatggcgtcatcgtacgatgattcggcaagagctctctaccccgaaaagtctaagcaagttccgatccgcctcggaccaaatgcagagctcgggcagagcccaggcagagctgcttccgagcagacacgtgcagggtgcgcagacggcgcacgagacaggatgtttcgagtgtctccgggcaggggacttcgaaggaatcgagtgcttgggcgtgcgagcagctaggcgcggagtcacccggaccccgggtcaggttgccaagggccggtcctcgttggtcacgacgaggctgccgtctcccttggagtgccccatgtcacgtatgtcatgaaatgccacgagggcgataatcacaccactcgatcaatctcccttggcaagtctcacggtgtcggacgtcgccttcgggccgttccgtgccgtctgccaggctcgggtgccatgggacccgccgagggtgacggaatcgaccccgaatgcgtcgcccttgacctgtttcgcggcgaaatccgtcccctttggggcatctcgcggcacctgcgggaaaccgcacggccgcgaaaaaggggcgagggcccgtaccacgcagatacgggccctctgacagggatttatgcaaagaccgctagcgacggtcttggcaccatatgaacacgcgacgtcacttgtcgctcggggtgacgcggctcgggaactcgagggcgcgctcatttgccagcgcgcgctcctcgaccttgcggcggcggtacacgatcgccttgcgaccgaggtacttgaacccggcggtgatgccgctgaacatgtgcacgatgcgcgtgaacggcagcacggcgaaaaacgtcaggccgcagaagatgtgcaccttgtagatgagcggggatatcgccatctgcgcgaccagcggctgcccgatgaagatgctgcggacccacggggtcagcgacaggcggtactcgaagctgccatcggcattggagaacgtggcgcagatgccgagcacgagggtgagcgtcatgagcacgtagagcacgatgtccatcctggacgtgttcgccttcatgcgcttgatgccgaagcgcctgcggatcagcaagatcagcgcgatacccagcagcacgcccgcaccgccgcccatgtagaacgcggccatgtggtacatatgctcgttcacgccaatcgagtccatgacctccttgggaatgaacatgcccaggtgcccgaagagcacgaacagaagcatcaggtggaagatcggggtagcgaccatctcgtttttgctctcgaggaactggctcgacttggtcgaccacgtgcgcgggaagaacacgcggcgcatgatggtgcccacgacgaggatggtgagcacgatatagggatacacaccccagaggaagatatcgataggcgacattatgctgccccctcctgtccatacgtagcctgcaactggtcggtcacttcgagcacgaggccgacgagccgggagtaatcggaaagctccgccttgtccaaagccgctttgagcagcgcgacgtcgccacgggcggcgccgagtatgcgcgctgccgtgccggcgtccaccgcagcggatagctcgagcaggctcggaagatagtccgggagctccttgcccggcgtgaacccggcgttctcgaagtacagcgagtacccgagcagcgtcatgcgctgctggcgctcgtctttgcagctctggctcgtgaggttgaggttcgtctccttgctgaagtcgaacgcgtccacatagcgcccctcgaactcgtgggcatcacaagaaaacgcatgctcgacaaatgcgttgagcacagccgccaccgactcgtcatcgaccgtctggatagcggcctcgagctcggcacgcttttcgcgccatgcggcatccgggtagctcaggagctccgcgacgatgcgcgcgacgcgctggcactgggtcataggctcgctcata

SEQ ID NO: 3529 - DNA, 3663 bp, Unknown
  16S sequences of unknown bacteria
cccgccgtaaaaaagtcgcctgcggcggacagtttcgcggcgattctttctttgaggaacgttttttcagagctttgattttcaaaacaattttccatgatttacaacacctctacccggggaaacgcgccccgcacgcattcgagcgcaaacgccttttcccccgccgtcaattcccgaaaattccccgccggctgtccgaaacgccgccgtttttcctcgcccagacgatgatagggaagaagctccaccttttccgcgttttttaaggacgcggcgaactgccccaatttttttaaatattcttccgaaaaattgaagcctgcaatgagcggcgcgcgcagcgtgacgggcacccccgccgcctcgaaaagcgaaagattgcgctccatctttttccaatctccgcccgtcacctttttgagcgcccgcgcgtcgaaagatttgacgtcaaacagcacccgatcgagataaggcagcgccctctcgacgcacccggactcaacgctgccgcaggtttccacagccacgtcgatgttttcccttttgcacgcctcggccaattccgcgcagaactccgcctgcaaaaagggttcgccgcccgtaaacgtgaccccgccgcccgaaagggagtgatagagtccgtcttttttgatctccccgacgatctcttccgccgtgacggcaagcccgtacgccctgccctccgaatcccattccctttccgcgcgcagcccctcgggattatgacaccagggacaacgcaacggacatcccttgaaaaatacgcaggtcctcactccttttccgtcgtgaatacaatagcgctgtatttgaaagatgatgcccgtttccataaccgtcccttttttgattttttttcgcgcggcttaccgtagcattcgacaacggcgtcgccgcgcgccatccttgactttttcgcggcgttttcccttttacggagccgccgcgtcttttttcaggctttcccgcgctttgttaccgtttatctctttttccttttgccgaaaacgaccgccagcgctgccgccagacagggcagagcgtacgccgcgccgatgacggatccgcagccgctctccgtgtttttctcccaagcggcgtacaattttaaatccgctttaagcggcgctgaaaaatcgtaagcgttcttgcattcggcatccgtgtaccagcctttcagcgtatatccgtctttttccagctgtttggcggaaaccgttttgccgtaatcgtatgcgacctcgaaattctctccgtccgaaacgaacgtcaccgtcagcgtgacgatctgatattttgccacggcgacgatatcttccagatagtccgttccgccgagcgccgtcacctctttgccgtccacaaaccagccgaggaaggtatatccctcgatctgttttcctgcgggcagcgcggtgtccgcgccgtagacgtgcttcgcgggcgaatatccgtccgcagcgctctcggagccgcccaaagactgcttatagacgatattaaactccttcgccgtccataccgcggacagcgtcagatccgaactcacgggcgtggaaacgtcaaagatttccccgccgtccgtcttccagccgccgaaagtgtagccgactttcgcgggagcctgcacgtccgaaacgagcgcgccgaacgcgacgtcctgagaatcgactatgtcatcgccgttcttgaacgtcacggagaaatgtttgagggaatagacggcggtcaccgtaatgtcggaagtatacttttccgccgccaatgcctccaccttctcctcgccgacgtaccagccgacgaaatcgtatccctctaccgcttccgcctcaggaagggcaagccgggtatcgtagacgtactgcgtcggctcgtaagaaaccgtttccgcctcgcgctcacccagtttccgctcataagagatctgatagacgtttgctttccacacggctgtaaacgccatatccgacaacgccgttttgtcggtgaaatcgtagattccttcttctccttcgagtcggaagcccaaaaattcatagccctctttctccgccacttcggggcaggtcaaagcttcccccgcgtcgaaatagcgggattccttgactccgtccacgtcgtaagtgacggaatatttgttctcgaaacgcgcggaagcgaacaccgtttcactgaaagcggcattttccgaaacgagatataaagtcagcgtctttgcgccctctttccaatgatagaaaacgggcagtccgctgttcgtccaatccaccccttgcgattccagcgtttcggttttgccttcgccgtaatccacttccgcggtcagtttcacgggcttggcttcggcatgattcggatagtagatcgctctccccaaaacgccgctcagcgtattgtaaggcagggaggaaacatcgaacgtataggcagcggcgtccgctttggaagtacccgcgataaaaaagattccgtcgctgcaaactacgtttttatccgccgccgcgtcgtacagttccgtttgcttaccgtcccacataaaggtgcggggcgactgatacgcccagatgtcggcggctttctgttccgccgcgtaagacaccagcttgtcgcttttttcaaagaacatgggattgaggaggttgacctgtccttcggcgtattgagtgtccgcgacgacgcgcacctcaaactctttcgcgccttcgggaatcgccgcctggacgacggcgggcgccgtcctcggatcctttcccgtcgcggcgtacgtgccgacggaattgatcagtcccgacgtatacaattcgacgccgtccgcccacagatccacgtgacagccgtatccgttctgcatatagacgagcgaattgaaataggaatagcccttgttttcgatattccatttcatcgacacataatttcccgcgttcgccttatccgcctcatacgtcgcgtaaggcacgttgagaagatgcagaccgagcccttccgtaaattgaagatgctcgtcgtaaatcatgtaatcgaaagcgctgttgtccgcctgcgagtcgtacatcaccaccgctccgtaaccgggaaagccgtagcccgtcgcgctcgtgttcaggcgggaaagagtcctgtttgcgaaaacccttccctccgtttctttttgcagcctgacgtccgtaaacgcgcaggcgccgtcggcgtagcccgccccgccccattcgaggcgcagagtgaccttagcggcgtctttgacgtaagcgcgcatggtcatcggcgcgggcgtcgttcctcccgaggaggtatagacgaccgtatccgccacgacgtcgtcgacgagaacgctgaatttcgccgcgttgctcgccccgtcgggcatacccacgcccagcgtcagatagggatatatggcggaatagtccgaaatgtcgtacacgatatcctgcggggcgtttgacgcgggcaaatgcgtgccgatgctgttgtaatcatacccgacgccgcctatcgacaaggctttcccctcgcagtggagattttttctcacctctccccaaccgcagacgggagttccttcccacgtcagttcctccaccaccgcgatctcctcggcgggcgcctcggcggcagacgcggacgaaacgaagggca

SEQ ID NO: 3530 - DNA, 32759 bp, Unknown
  16S sequences of unknown bacteria
aagtccgcttcgcgcgcggcgagcgccgcccgggcctgcgcgccgaggcgctggcgcagggcgccaagctccttctcccgccccgcaaggtccgagagggcctgcgcgggctgcacgcgggccgccaggcgcgaaagtcggccctcccgctcggcgatggcgcgcaggctccgcgcgcggagcgtttcgcgcaggtcgtccaggcgctgcagcgcgtcccgcacatcaggcaccaggagctccgccgcgttggagggcgtggccgcgcgcgcgtccgcggcaaagtcgcagagggtgaagtccgtctcatgcccgacggcggagaccacgggcacggggcaggcgcgcaccgcgcgcacgaccgcctcctcgttgaaggcccacaggtcctccatggacccgccgccgcgcccgacgatcaccgcgtccaccgcctgcgcgcccagggtctgcacggcctgcgcgatggaggccgccgcgccctcgccctgcacgcggcaggggcagagcaggatgtccacggctgggttgcggcggtgcgccacgcgcacgatgtcccggatcaccgcgccggagggcgaggtcgcaacgccgatgcagcgcggcgcgcgcggcagggggcgcctcttctcgagatcgaagaggccctcggcctgcaggcgggcgcggtcgcgctcaaagcgcagccagagctcgcccacgccgtcgcgctccatgccctcgccgtagaactgatactggccctgcgcctcgtacagggagacatagccggtcagcagcacgcgcatgccgtccctggggacaaaggggagccgcatggcgttctgccggaacatcacgcagcgcacgaggccgccctcgtccttcagagagaagtagaggtggccggagacgtggcgcttaaagccggagatctccccgcgcacgcacaggccgcgcagcagcgagtccgcctgcaggagggagcgcacatagccgttgagctggctgacgctcagggtcaggcggtcactttgcggcatgttccgcggcctccacggcgttctccatgagcatggcgatggtcatggcgccgacgccgccggggacgggcgtgatgcgcgaggccacctgcgcggcgctggcaaagtccacgtcgcccacgaccttgccctccacgcggttgatgcccacgtccagcaccaccgcgccgggcttgatcatgtcgcccgtgatcatgccggccttgcccaccgcaacgaccaggatgtccgccccgcgcgtgacctgcgcaaggtcctgcgtccgggagtgggcgatggtcacggtgcagttcttctgcaggaggagcagcgccatgggcttgcccacgatgttggagcggcccacgaccaccgcgtgcttgccggaaaggggcacgtcctcgatctccagcaggcgcatcacgcccttgggcgtgcagggcacaaagcccggctcgccgatgagcaggcggccggcgttgatgggatggaagccgtccacgtccttgtccggatcgatggcgcggatcacctcgcgctcgtccaggtggcgcggcagggggagctgcacgaggatgccgtggaccgcagggtcctcgttcaggcgctgcacggtgctcagcagctcctgctgcgtggtctcctccggcaggcgcaggaccgtgccgttcatgccgagctttttgcacgcgcgctccttgttgcgcacgtagatggccgaggcggggtcctcccccacgagcacgaccgcaaggccgggcgtgatcccccggctcttgagcgcctccacgcgcggggcaagcccctcgcgcacgcgcagggcaatgccctttccatcgatgatgctggccgccatggcgtcttcctcccttgtctctctatgaattctttccgctttggagttgttgtagtccgagcagcgccgcgcccacggcgttgtcgcccgcgtattccggccgggcgaagtagggccgcaccgggctgccgctgcggcggatgcgctcccgcagaagctcccggaaccgctgcgaggaggcaacgccccccgcaaggagggcgcttcgcagccccgtctcgcggctggcgttcgtcaggagcttttcgatcgtgcgcgccaggcacgaatagacctccgccgcgatctgctccggcgaaaagccgccgctgtccgccatgcgcatgacctgcgcctcggccccggaaaaggagcagtgcaggccgcggcaggtcacgaccaccagggactgcggctgcgcgccgcggctgagcttctccagctccggccccgcggggaagggcagccccagccgcacgcccacgcggtccacgaactggcccgcgtgcaggtcgtccgacccgccaaggagcgagatgctcccgtcctccccgcaggcgaggacctcggtcgtgccgccggacaggtgcagcgccaggtgcggccccgcgggcaggccggaatcgatgcgcgccgcggcgatgtgcccggcctggtggctcgagcggaagcgcggcacgccaaggagcgtcgaaagcgacgcggccatgccgctgcccacggtgaagaccggcatgtaggagccctccacgtcccgcggggcgtccgacgcgcagaccgccgcgatctccatccccggcacggcctccgagagctccgcaatcagctcgggcaggttctgcacgtgctggaacacgccctcgctctgccgcagacccctgccgcccatcttaacgacaagcagccgccttgcgctcccgagcacatgcccgtccagcgcgacagcggcaaccgaggtcgtataacagcttgtgtccatgccaagtacggcttgcaccgcgcctcagcccctttcttccgccggaagggccgccggcgcgcgctcgccctgcgcatcgggagcttcctccgcaatgggggcagcttctgccaggggggcggactccgccaagggggcagcttctgcctcgcgggcgatcgtgcccaggattccgttgatgaaggaggccgccttgccgcccgagaacgcgtgggcaagctccaccgcctcgttgatggccacgcccgtgggcacgtcctcccggtagaacatctcaaagagcgcaaggcgcaaaatggccaggtccacgcgggcgatgcgctccagcgtccagccctgcgcgtgcgcggcgatgcgcgcgtccaggtcctgcgcgcgctccaccgcgcccagaaccacctggtcgatgtattcccggtccgaagtcgtaagggacggcccctcgatcgtctcctcgatggtggaggcgatgccgtcgccccccatctcatactgatagatcaactgcatggcgatctgccgtgcctctttgcgcgccatagttcctcctacaatcccttgttaaaacttaaaacggatgtcgtcgtcccggtccttgggaaagaagcgggcgacaacgtcccaaagacggcgtccgcggtccgcgagcgccccgatccccgcgcccagggcgacgagcacgacgatcagcaccgtgcgccagaaccccagcgtcaaaaacagcacggcgacaatcaaacccagcgccccgcccacgagcgcatacaagtgcgcccggatcaggcgcaggacgtcctctttgttcaacgaaagcccccccttattccacccgcaccggctggggggagccgaccgcctcgacaaagatctgcacgtccgtcaccggcacgcccgcgtgggtctggacgtagtccttgacctcgcgctgaatctgcgccgtcgcctccggcagcaccgaatccggcgcaaagctcacccgcaaaagcacccgcacgccttcctgctccgtggcgagcaggcggctctccacatcgcgcacggcggcgcaggcgcgcaccgagcgctggaccatcgtgtccagggcggaaagcgcgatgaggatggagccgttgtccgtggtcttgatgaggacggactcctgcccctggaccggggccgcggcatggcccagcgccgcgtagagcacgcgcagggcgattagggcgacgacgaccccgaaaatcccgagcacaaggcccgacgcctcgccaaagctctgcagcgccgagcggaacgggcccagggccgcgcccacggcgaacaccgccgccgcaagcagcacgagcgcacacagcgccgcaagcagccgatcgtaccacttcatcttcatcgggaaggtcccccttttctccttgcagggcaggcgcaaaaggcccgcccggctgttgaatgcgcgcataaagaaacctgcgcatggggcgtgcgaccgcgcacgcgcaggctcttccctggcgaacggctattttccttcggggaaattacttgacccggggagcgggcgcctcctcgggcgcggcgatctcggccggggcttccttctcgaacttgacggcctgcacgtggacgttgacttccacaacgcgaaggcccgtcatcgtctcgatggcctttttgacgttctcctgcacggcgcggcaggtctcgggaatgctgatgccgtagtagagggagagatagaggtccacagcggcctcctcggtgcccacctcgaccttgacgcccttggtgtggtcctttttgcccagcatctcgttcagcgacgaggacatgctgcccgccatgctggcaacgcccttgacttccgtcgcggcaaggccggcgatgatggcgatgacgtcatcctcaaaggtcacagagccgatcccgttgtcgatttcgacgttcaccggcatattctcgctcatggtcaacacctccaaacataagttgattctattataacagatgcgcacggattctgcaaaccccttatgcgtcaaacccttccggctttttccaggttttttgcggattggcgcagggctttcgcgcgcgcatttcccaggcaagcgcgccgcctatcctgcgacggggatgatcttgacgttcccggcctcctgttcggtctggcgcatggcgatctccaggatctgggcggtgtcctcgtcggataggcggtcccgctttacgacgattgtgaccgtcccctcctgcacaaaggcggccgcgtcctcaaagcccttggccacaagctgcgtctcgatcgcgcgctcctgctcggtctggcgcgtgagctcgatccggcgcgcgtcggcctcgcgcacggattcctccggcgcgccctcgcggtgcacgatctcgtccagcagggcgatctcgtccgcgcgggcggtctcgcgctgggcgcggaagtcgcggaaaaagtcgcccgtctcctcctgcgcggcaaggacgctcgccgcctccgccgaagcgggttccggctggtttgccgcaagggtgcgcgtgacaagccccagccccagcagcagcaccatcgccgcaagcgtcaccgtggtccggtttttccaaggtcgcatacatcctctctcctctcctcttcgcgcgccggccgtcaatcggtctcgccctgcgcgctgcgggcgaagacctccacgctcgccgccggcacgtccagcgcggtcatggccgcgcgcagcagctccgtctgcacggcgaggtcccccgcgccctcggcgacgaccaggaccccgcgcacgccctcctcgtcctcgttgatgaagaccgtgacctcgcccgcgccccggatgtccgacagcgcggccgaaagccgctcctccaggcccagggccgcgtactcggcgtccgcgctgcgcgcccgctcctcctgccccggcaggaaaaaggagagcgccacaaggccgatccccagcgcgagcagcagcaaaaggcccgcaaacttcctgtcccgcagggcgcgggacagcccctcccatccgctcattctcccatccccattgtggcccgcacgatcgcaagcgccggcgtcagcagcgtcagcaggaccgccagcgagaaggcgaagccgaagtagttcttgaccgatccatccggcagcagcgcgtccagcaccgtggagagcaccgccaggccgcacagcgcggcgaccgcgctgcgaagggtttccatcatgcaaatcccatccccatccgcatcagcgccgcgacaaagacgaagaacatcgcgccgatgctgatcatcaatatgaaaagcgtggtcaaaatatccgcaaagtcctgcagggccggggcgatgcgctccgcgcccaggggctcgatcgccgcggcgcacagccggtaggccgcgatcgtgagcagcacctgcgcgcacggcccgagcaggatcagcagaaaccccgccaggcccaccgcgcccaccgcgttcttgaccacgatcgagcagccgaccagggtgtccgccgtgtccttgaacgccccgccgatgacgggcacgaacttgtccacggcgtacttggccgcgcgcatggtcacgccgtcgtagctggcgctcgtcgcgccctgcacggtcagcacgccgaggaacagtgtaaaccccacgcccagcgcccagtgcaccatcgagcgcaggagcttccccgcgctcgtgagccggatctgcggcgccaggcgcgagaccaccgccaccgccgcggcaaggcccagcagcggaaacagcgcccgctgcgcaaagcccgccagcgtccccgtcgcaaggagccccaggctctgcatctgcgcggcggactgcgcgccgcccatggccgtcagcagcgccagcatcgtgggcagcagcgccgcaaacaggtcgaccatgcgcccggccgtctccttgccggcctgcaggagattggccgcgtccgccgcggccggcagcgccatgcacaggtaggtcatcagctgcaaaaggcgcgccgccccatcgccgaaggtcacggcgcgcaggcgcagcagcgcggcgctgagcaccgcaaggcccacgaggcgcaccatgcgcggggcaaggctgcgaaggttccccgcgagcgcctcgcccgcggcggagaggatctccccgacgggcagggcggcgccgccctgggacgcgctctccaggagcgaggcgacgtccagctccggcgcggcctcctgcaggggcgcaaggtccatctcgcccagcagccgctccgtctcctcgcgcaggagcccggcaaggccgctctcctcctgcgcccgggccgcggggagcgcgagcaggagcaggctcaggagcagcgccgcggccgcggcaatccgtcttgcgcgcaatttcccccctcctttcgccctagcccagcagcaggagcacggcgtcgcacaggtccaggaccatgggcagggccgcgcagaggatcaggatcttgccgccgagctccaccttctgcgccagcgcgccggacccggcgtcccggcagagctgcgcaccgagctccgccgccaccgctatgcccgcgctgcgcagcagaatcccgctcagctccccggaaaggcccgcccggccgaacaggtccggcagcgcgctgagcgcctcgcccgcgccgtgcagcacccgcagcagcagcgcaaggccgcaggcgacctcgcagacgagcgcggcctccttccgcccaaaggcgcgcagcaccgcgcccagggccgcgcccaggatcgcgatgccggcaaggcgcagcacctccgtcatccgtagagggggaagagcgccttgacgctggtgaacaggtcgctgattcccccgaggatcagggccagcgcgagcaccagccccccgatgttgcagaccatggcgatgtcgtcgcgcccggcgctcttgagcacggtcgaggccaccgccatcagcagcccgatcgccgcaatgcgcagcagcagatccacgtccattcccgcttccccccttcttttgtcctcccgctagagcagcagcaccagcgccgcaaaggccgccagcagccccaggcgcggatagagcgccgcgctctggtccagggccgcgcgcttcaggtcccggagctcgcgcagctgctcctgcgcgctgtcaaacgggcccgtctcccctgcgggcagcgtcggcaccgcgcgcagcagggcctgcacgatctgcgcggcgtccttttgcagcccggccgcgcgcagcgccgcctccagcgcctcgcccccgagcggacagcccgcctcccagagcgcgtccgccaggcggcactggccgcgcagcgactccacggcctccggcagcggcaggcgcaggtgctccacctgcgcgcgcagcaggcgcacagcgcgcagcgcgtcctccagggcgtccaggcgcgcgtgctcccgcgcgatccaccagaaccccagcgcgcccagggccagcgccaccaggcacgcgcccaactgcttcagcatggccttccctccccgtccagcaccgcggcgatccgcccgacccgcccgcccagcaccacgatgcggtcgaagacgcccgcgcgcagcaggggctccagcgcggggcggcgcttcgcctgggcaaagcccgcggcgtgcgcgctgcagagcacctgcacgccgcagcgccgcgcgtccagcagcgcggcggcgtccgcctccccgccgatctcgtccgagacgatcacgtccggcgccatggaccgcgtgagcaggcgcacggcctcggccttgcccatgttgtccatgacgtccgtgcaggggccgacgtccagctgcggcacgccccgcacgcaggcggccagctccccgcgctcgtcggcgatggccacctgcgcgcccgcgcggctcagggcgcgcgccagctcccgcagcagcgtggtcttgcccatccccggctcggagaggaccagcgtcgagcgcagcgcgccgcccggtatcgccgccgccagcgcccgcgcgtcgcacgggacctgccgcgcgatgcgcacgttcagggcctggacctgcgtcagggcattgcgccgcgcgccgtccagcgccatgtggccgcacacgcccacgcggtggccgcagggcagggtcaggaacccttggttcagctcctcctgccgggcgtagagcgcctggccgcagaaggagagcagcaggtcccggatctgcgcctcgtccggctccagggggatgcgcaggttcttttcgccccgcagcagcagcggccggcggacgcggatgcggatctcccgcgcgccggccatctcccgcgcgtacggggcgagcgccgcgcggaagggcgggctgaactgggataggagtttgtccattgccttcacctcgcaggagtatatgccccgcccccgcggaatatccgccccgcgcccccttcctcaaacgcaaaaaagcagccttcccaaacggaaggctgcccgcggcgcgccgcgcgccgaatgccggaaagcgggcctgtgcggcccgcctccccccgcttcgccccgagccgtcgttgacggctcgggggttcggccggcttattgggcctatggcccaaacgctcggctttcaggagcttcgctccctgcggcttcgccccgagccgtcgttggcggcccgggggttcagccggcttattgggcctatggcccaaacgctcggccttcaggagcttcgctcccttcggcttcgccccgagccgtcgttgccggctcggggtttcggccggcttattgggcctatggcccaaacgcccggccttcaggagcttcgctcccttcggcttcgccccgagccgtcgttgccggctcggggtttcggccggcttattgggcctatggcccaaacgcccggccttcaggagcttcgctctcttcggcttcgccccgagccgctgttgccggcccgggagttcagccggcttattgggcctatggcccaaacgcccggccttcaggagcttcgctcccttcggcttcgccccgagccgtcgttgccggctcggggtttcggccggcttattgggcctatggcccaaacgcccggccttcaggagcttcgctcccttcggcttcgccccgagtcgctgttgtcggctcggggtttcggccggcttattgggcctacggcccaaacgctcggccttcaggagcttcgctcccttcggcttcgccccgagccgtcgttggcggcccggggtttcggccggcttattgggcctatggcccaaacgctcggccttcaggagcttcgctccctgcgcaggccatgccgccggtgcggattgcagaggaagcggcccagccccttcctgcatctctgaaagcggcaggaagcggttttacaagcaaaggcagccatccgaaacggaaggctgtccgcgccgtcggccaaaagcgcagaaccccccggcgggagaagccggagggttctgcaaggaatgcgccctttcgccctataggacggagggcgaaccggaaaagttccgcgcgcgaaaaaattttttacgcgcgcagcaggcgctgcatcaggggcaggaagtgctccgcgtcgcccgtcgtgtgcagctcgcacccgcccgcgcccgcggcgcgcaggagcccgcgctcctcgagcacgtggcggagctggcgcacggtgcccaggttcccgtccacgaggggaatccccggggcgatgcgctcgagcgcgcggcgcaaaaagaggtagtgcgtgcaccccaggacgatggcgtccgtcggccgggcgaggtgcggcgcgaggaccgcccgcagggccgcctccgccgcggcgtcgtccaggtggcccgactccacgcactcgacaaggccccggccctccacgggcacggcgccctcgccgtagagcgccatcaggcgctggaacttctccatgtgcagcgtcgcgggcgtggccagcaccaggatctggccgccgtgcagcagcgcatgggcgggcttgagcgccggctccatgccgatgacgggcagggcgagggtctcccgcagctcctttgccgccgcggccgtggccgtgttgcaggcgatgaccagggccttgacgtcgcgctgcaggagctcgtccaccacgcggcgcacgcaggcgcggatctcctccggggactttaggccgtagggcgcgttcgcattgtccccataaaataggaagcgctcgtggggcagcagggccatggcgtcccgcaggacgctgacgccgcccacccccgagtcgaagatgccgatgggtctaaacatgctccgcctccaaagaacaggatgtgacagaaacagtataccacatcccgtccccgccgtcacgaggcaaaagcggacaccgggtccagcagcaggtccgcgatgacgtccgccaggggttcggtggcgttcagcgcttcctgcagggtgttctcgttgtggcccacctcgatgagcacggcgcgctcgctcatgtgctggttatatctcccggtcttgaccatgatgtcgcggcagatcccggggatgcgctcgttgagcccctcggtcagggcctcggcgagcttgtagttctcctgccagttgggcttgatggagaagccctcgccgtcgtcgccctcgcccgtgccgatgagcatcatcaggcgcgcgtagtccttcccgttcgcggtcacgcacgaggggttcgtgttccgggcgctggccgcgtcgcggtggatgtccaggaccatgtcgaacgcctccccggcctcctggtacttctccagcgtcgccagggagcggatataggccgtgccgagcttgggcggctcgtgctcggtccggtcgtggacgacctcgatgccgcgcgcctccagctcctccttgagctttgcgcccacggccatgatgttgaagtccgcatccgcgctgcgccactgcgtggtctcctcataggggttatccgggtcctgggcaaaggcctcgtaggagtgggtgtggtagaggagcacgcggggcttttccttaggttcggcctcgaactccccctcgatcttggagatctccacgcggatgcggtccacgtcgtcgggcgcgtcgcccgtttccccctcggcggtgacgggcacggcctcctccccgtcgggcagccaggtgcgaagcgcttggggcttgtccgcggcgggggccccggccgaagccgaaacgcccgcgctctcctgccccagggttgggctgtcctgcgcgcccgcaaagacgcggatgcccacgacgagtgcgacgatgagcagcacggccagaaccgccgcgccgatgacctgcgagagcttgtagaccttgatgcggatcatgttgcctatccccctccggttttccatgtgctggtaaaagcctatgcgcagccggagggaaaaatgccggcacgaaaaaaacggccccctcccggaatccccgggaagcgagccgtttgttttcgctggtcttagccgttcgccttggcggcggcgcgcgcgagctgcgccttcttgcggttggcggcgttcttgtgcatcacgtgcttcgcggcagccttatcgacggcggcggaagtcacgcgcagctggctctcaatctgagaggcgtcgcccgcagcgacggtggcgtcaaacttcttgatctgggtgcgcacggaggacttgaccatgcggttctgcaggttcttcgtggcagtgaccttgacgcgcttgatcgcggacttgatattcggcattcgttttcaccccctcagtacaaatcgacatgcactatcatagcatcttccccctcaaattgcaagtaaaatttccaatttcgcaggaaattaacgccggctttttccggcgcgcggggcaaaatagaaagatcaggaggcgatttgcatgcaagaccctgcattccggacggacctggccatggaggcgcgggaggccgcgggcgaaatccccggcgtggagatgacaaaggagcaggacgcgagcgcggagatcgtccgcgtccgcgtgcggacgaaggagggggccgacgcgctgggcaagcccctggggacctacgtcaccctgacccaccccggcctgtgcgcaggcgaggtgcgcgcggacggagcgctggccgcgcgcctggcgcaggagattgcggcgctcctccccttacgcgagggggcgagcgtgctgctggtgggcctggggaaccggcgcctcacgccggactccctcggcccgcgcgcggcgggcgcggcgctggtgacgcggcacctgcacaaggccctgccgcagctgcggccggtgagcgcgatcctgccgggcgtcacgggcgagacggggctggagacgggagagctcgtcgccgcggtctgccggacctttcacccggaggcggtgctcgcgctggacgcgctggcggcccgcagcgcggagcggctgctgaccacggtgcagatcgcggacgcgggggtcgcgccggggtccggcgtggggaatcaccgcgcggcgctgacgcgggaggagctcggcgtgccggtggtggcggtggggattcccacggtcatccacgcctcgaccatcctgcgcgacgcgctggagcgcatcgcgggcgaggcgggcgcgcgcgtggacgcccgcggccttgccgaggacctgggcgcgggggacctgctggtgacgcccgcgggcatcgacgagcaggtccgcgcggcgtcggcgctccttgcggacgcgatcgacctggcgctccacgcgccgctgacgctggcggacatccgcgccatccgcggcgaatagacaaggggagcgttttgccccgccccagcttgtagcccccctcctctgcaatccgcaggccgaacgttttctcttgcggccatgctccttacatgggttcgaagcgtgccgactttgctgacacgccaaaggggcggggcaaaatgccccgcccctcctatttttttgcggttaggccttgtgcggaatccagccctgcgcgcagaggagctctgcggtctccaccgcgccgccggccgcgccgcgcagcgtgttgtgcgacaggcagacgaagcgatagtcgaagatcgggtcgtcgcgcaggcggccgatgcagatgcccatgccgcgctcgtagtcgcggtcgagcttggtctgcggtcggttgtcctccgcgcagtagtggaggaactgcgccggggcgctgggcagctcgagcttctgcggctcgcccttgaaggtggcccaggccgcgagcatctgctccttggtgggcttgttcttgaacttgacaaagaccgtggccaggtgcccgtcggagaccggcacgcggacgcagtgcgcggagatcttgggcgaactggcgttgacgatgaggccgtcctcgagcttgccccagatcttgagcggctcctgctcgctcttctcctcctcgccggagatgaaggggatgacgttgtccaggatctcgggcatggtggcaaaggtcttgcccgcgccggagatggcctggtaggtcgagaccatcacgctctcgatgccgcaggagtacagcggcgccagcgccgggacgtaggactggatggagcagttgggcttgacggcgatgaagccgaccctggtgcccaggcgctcccgctggcggacgatggcgtgggcgtgctcgggattgatctccgggatgatcatgggcacgtccggcacgccgcggttggccgagttgttggagacgacgggcgtctcggtcttggcgtaggcctcctccagggcgcggatctcgtccttcttcatgtccacggcgcagaagacgaagtcgcagggtccggcgacctcctccacgtgggaggcgtcgagcacgggcattccggcgacctgctccgggatgggcgcagacatggcccagcggtcccccaccgcctcgcggtagggctttcccgcgctgcgggcgctggcggccagggtgcagatctcaaaccaggggtggtcgtgcagcagggtgatgaagcgctggcccaccatgcccgtggcgcccacgatcccaaccttgtatttctgcatggctctttctcctttccaaatctgtccggccttagagggccttggtctcgatctcctcgcgcagcttggcgagaacctcgtcgtaggtcatcgtctccaccgcgcccttgcgggagcggacggacaggacgccgttttcgacctccttgtcgcccaggacgaacatataggggatcttctgcatctgcgcctcgcggatcttaaagccgatcttctcgttgcgcaggtcgatctcggtgcggatgccggccttttcgagcttggcctgcaggtcctttgcggccgcgtccgcgcggtccgtgatggtgaggatgcgcacctgcacgggcgagagccacagcgggaaggcgccggcgaactgctcggtgaggatgccgatgaagcgctcgatggagccgaagaccacgcggtggatcatgaccgggcggtgcttctcgccgtccgcgccaacgtaggtcaggtcaaagcgctcgggcaggttcatgtcgagctggatggtgccgcactgccaggtgcggcccaggcagtcgcgcaggtggaagtcgatcttcgggccgtagaaggcgccgtcgccctcgttgacggtgtaggttacgcccaggtcgtccagcgcgccctgcaggccgtcggtggcaagggcccacatctcgtccgttccgatggagttctccggccgggtggagagctcgaccgtgtactggaagccgaagaccttgtagacctcgtcgatgagctggtagacgcccttgatctcgtcgcggatctggtccgggcgcatgaagatgtgcgcgtcgtcctgcgtaaagcagcgcacgcgcatcaggccgtggagcgtgccgctcttttcgtggcggtggaccaggcccagctcgccgctgcggatgggcaggtcgcggtagctccaggcgcggcgctcgtagaccaggatgccgccggggcagttcatgggcttgatggcgaagtccgtgtcgtcgatcttggtggtgtacatgttctcggcgtagtgatcccagtggccggagcgctcccacagggcgcggttgagcatcatcggggtcttgatctcctcatagccgtgctcgcggtggatcttgcgccagtagtcctccagaaggttgcgcaggatcatgcccttggggtagaagaacgggaagcccggtccctcgtcgcgcacgtcgaagaggtcgagctcgcggccgagcctgcggtggtcgcgcttcttggcctcctccagctgctggacgtaggcgtccaggtccgccttcttggggaaggccgtggcgtagaggcgctggagcatcttgttcttctccgatccgcgccagtaggcgccggcgacggacatgatcttcacggccttgacatagccggtcgagggcaggtgcgggccggcgcacaggtcggtgaagtcgccctgcgtgtagaaggagatgaccgcgtcctcgggcaggtcctcgatgagctcgaccttgtagggctcgcccttttcctgcatgtaggcgatggcctccgcccggggcttttcggagcggacgatggggtagttcgccttgacgatgcgctccatctccttctcgatcttcttgaagtcctcggtggagaaggccgtgtcgcagtcgaagtcgtagtagaagccgttttcgatggccgggccgatggccagcttcgcctcgggccagagggccttgacggcctgggccatgacgtgggaggccgtgtggcggtagacgcggcggccttcctcgtcggcaaaggtgaggaactccagcgcgcagtcgcggtcgatgacggtggtcaggccctgcacctcgccgtcgaccttgacggccagggcctctttcttgagcgcctgggaaagggacgcggcgatctccagcgcggtcttgggcgcctcaaactcgcgcacatcgcccttgagcgtgatcttcatggcaaattccctccaaattcagcgatttttctgtccggttttccgggggaagggatgcaaaaggccccgtcccccctgcagaagaattctgcaaaagggacggggccggacatactgcctttgcgctccccgcggttccacccaaattgccgcgcatccttgcgcgaccgcttgacaggcgctaacgagccttgcttcggcatggtcagaggctggtcttcgccggatctcgcgcgtgagcgcgctctcagccgcgtcgcgctctctcttgcccgcgcaccctgccgggtactcgttcctcgtcgccccatgcgattgagacacagtatagcgcctcttttgtccgctgtcaagagcgttccggttaatttttccccgcagcgcgctcattccaccgcgccgaagagcagcggccggggctgcggcgcctccggcgcaaggcgcaccgcgcccgcggcgagctccagcgcaggctccacgcgcgcctcgtcgttggcgtgcagcaggagcagcgtctgcccgcgccgcacgcggtcgccgacgcggacgcagcactcgatccccacgccatagtcgatggggtcctccttgcgcgcgcggcccgcacccagcgcattggaggcaaggcccaggtcccgcgccgcgagggcagagacgcagccgtcctcctgcgcgcgcaggggcacgcgcagccgcgcgccgggcaggcggtccgtctcctccagcgcgcgcacgtcgccgccctgcgccgcgaccatctcgcacagcttggcaaagccccgcccttcctccagggcggcctttgtgcgcaggcgcgccgcggcaaccgcctcgcccgtgcccagggcgaccatgcgcgcggcgacctccaggcagaggtcgcgcgcgcggcccgtctcctccccgcgcaggatgccgagggcctccctgacctccagcgcgttgccgatgagccggcccaagggctcgtccatgtccgtgatcagcgcgcagacgcgcttgcccgcggccttgccgatgcgcaccatctcctcggccaggcggcgggagtcctccagcgtgggcatcagcgcgccggagccggtctttacgtccagcaggatcgcgtcgcagccggcggcgatcttcttggacaggatgctcgaggcgatcagcgggatgctgtccacggtcgcggtgacgtcccgcagggcgtagagcgccttgtccacaggcgcgaggtccccggtctggccgatgaccgcacagccgatccgctgcacctggcggacgaaggcatccatcgaaaggtccgtgcgcaggccggggatcgcggcgagcttgtcgagcgtgccgcccgtgtgcccgagcgcgcggccgctcatcttggcgaccggcacgccgcaggccgcgcacagcggcacggcgaccagggtcgtcaggtccccgacgccgccggtggagtgcttgtccaccttgacgcccgggatggcggagaggtccgcctgcgcgcccgtgcgcgccatctccagcgtcagggcggccgtctccgcctcatccatgcccatcaggcgcaccgccatcaggaacgcggccgcctggtagtccggcacgctgccgtcgtacacgccgtgcacaaagcaggcgatctcctccggggcgagctttccgccccgcttcttcgtctccaggattgtgcgcatatccgccatgtgttacgcctcctcgtttgcgcggaattcgaccgcgtccggccgcaggggcttttcgcgcggggtataggcgggccggccgatgggcacgaggctcatcaggcgcaggccctccccggccttgcccaggtattcgtcgatctccggcgcggccagggcgggcgcgttcatccagcagccgccgtagcccaggtcctgcgcgcagagcagcaggttttcgatcgccgcgccaaggcccaggatgtccggccgggccaggcgctccatctccgcctcgtaggacaggcccgccccgcgcatggccgcctcgagccgcgcatcggcatacgcgaccgggcgcatgtagaccgcgagcaccaccggcgcgctgcggaagaacgtggagtggcgcacgcggccctcgacatagctttcctccgcctcgggcagaaattcgcggtgcgcgcggcgcacgccggcctccaccgcgcgggccaggccctcgatgtccttgcggccctgcagcacgacgaagagccagttctgcgcgccgcaggcgctgggcgctgcctgggccgcgcgcagcagcgccgccaggtcctccggctgcacggggtcgggcgcgtatttgcggatgctgcgccgggcgcaagcgagttcttcaaacgtggtcatggaaatgcctcctcatgggatttcgcgaagggaaaattcgtcaaacgcagccgcccaggccgcgagcttctccgcaaaggagcgggacgcggccgcggggcttgtcgagggcaggacgcgcacgggaaccgccagcgcaggatgcgcgcgcgtcaggagcttgtgcgaagcctggccgttgcacagcaccgcgcggatgcccgcgtgcgccgcgagaaaggcggggatgtcgttgatctcggccgcgcggatggcgctgtccaggctcccgcggcggaagcaggaggccgcgctgtcccacagggcgacgccgtgggcgccaaggcgcgcaatgcgcccctccggcgtgccctcgtccgcctcgccgtagagcgcggcgaggatcggccagaaggcgttgcgcgggttcgcatagtagaaccccgcggcgatcgacttctccgagggcatggagcccagaaccagcacgcgcgcgcaaccagggcacaagggcgcaagccccgtcttccgctcctccatgcgcggccctcctcccttcttttgtatgcagaaggggcgcccgggttgccgggcgccccgcggtgggttttagtcgttttccaggagctcgacgatggtcttgagctggtccacgcagtcgatgtaggcgtagcggccgccggtgtactcgccgcgctggaggagcttcatgccgttgccctccagggcgaggatcttctccttcatgccgttgacgacaaaggcgatgtggtggacgccctcgcccttttcgttgagcacgttgcgccagacgctgggcgtctcatccggctcgatgagctcgatgtccagggtctcgcccacgtggaagaaggcgagcttggcgcgcgcggggcagggctcgccgttgaactcgccgtgggtcttgtcgatggtgtccgtaaggctccactgcggcttctccacgccgaggaagtcggcgaaggcctgcgaagtcttctcgatgtcgttgaccacaaagccgatctgcgtcacgatcttggtgccaaggattcccttttccatggaaagtcccccccattctttgtatggattgcgccgattttagggcatctcgatttcgaacttctcgtcctcggcgtgcttgacgaccacgcagtcgttggcgtaggtgcgctcgggcaggaccacgagggtggagacctcgccctctaccgcgtagggcgcgaagtgccagacgccgggcttgaggatgaccagcgtgcccttgggcacgaggaaggcttcaaacgcgtcggcgtcgatcttgccgcggttggccggggccaggtggagcacgacgtcgccgtccaggggcaggttgccctcccaggcggcggagtggtactccgaggtatccacgacgttcgggcgctgggccacgcggcagatcgagaaggacgcaaggtcgtgctgcgccaggggcagctggagcatgtccggcgtaaagaccgagggggcgtcgccgtagaactcggcggggcgcagaagggagacgaagtcgccgtaggggcggaaggcctcgcggtccagctttttgacggtgagtttgcgcatgggttggttcctccttcagatgttctctatttttttaggcgaaaataccgggaaaaacgcggtttacagcgggcggaagtccaggccgcgggcggtccgcttctcctgctggggcacgggcacggattcgggcaggcagtcctcgatgtcgatgccatacgtgttggcaagggcgaagaggttgtagagcatgtccccgatggcgccctccatcccctcctcgcgctcgacggcctgggccaggtcgcccatggcgcgcatcaggtgcaggagctgctgcttttccccaagccgcccctcgcggcggcgaaccatctcctgaatgtaggagagcgtgatctcattgcccatggccattcctccgttttcggggtaaagggggatcagatgcggtagtcgcaggagacgctcgtctcccgcacggcgtgcatgtaggccttgaccggacggtgcaccgggtggtccgcataggcggcaaagtgctcctcgttgtcaaacgtgcacaggagcgccaggtgataggaccgctccgaggcgaggaagtccaggccgacctccaggtccaggaggccctcgatcttgccccgcatggagcggagcatctgcgcggccgcctcgaccttgtcgggccgggcgtccttcaagcggaacaggacgatgtgtcgaatcattctctcttcctcccaagcaagaacttctttcccaacagtatagcaaattgcattgcaaaatggaagggcgcaatgtatactggtagggagaaaacgagttcgtcccgcagggaggcaggaggtttgaccatgtccaacgagatcctcgacatcgccgcgcgcatgaaggagctgcgcgagatctgcgaatttaccccggaagagatggcccgggagctgaacgtcacgcccgaggcgtatgcctcctacgagagcggcgccatcgacatccccatcagcgtgctgctggccatggccaacgcctgccacgtcgagccctccgcgctgctgaccggcggggagccgaagctccacgtctactgcctgacgcgcgcgggcaagggcgtgggcatcgaccgccgcaaggaataccgctacaagtccctcgcctataacttcggcaacaaggtggccgagcccttcctggtcacggccggggtcgtgcccgcgggcacgccgctcgtcgtcaacacccacgaggggcaggagttcgactacctcatcgagggcacgctccggctgaccatcaacggcacggagctcctcctctacccgggggacagcatctacttcgactcctcctacccgcacggcatgcaggccgtgggcagcgagccggccaagttcctggcgatcgtgctgtaagcccttttgcgaccgaattttagaaaaaacctgcgcccgggcgccgctttttggctgcgccgggcgcaggtttttttattcgatggcgtaggtcaggccgcggtcggttacgacgaaagcgcgctggcccgcgtagccgggcaggcgcaggttcccctccggggtgacgctgccgtagacaaaggcgcagtccgcgtccttttcgccgcgctcttcagagatgtaggcggcgacagcgcgcgggaagccctcgccctgcgcaaagtgcacggtgacgcactcggcctccagcgcgtagacgtccccgcccaggggcacgagcgcggcgcgcaggcgcgcaggggcgaagcgctgggccggcggcgtcgcggcgcggcgcacgaagtagcacacgcggccgctccacgccgcgaggaactgctccagggggtagagccggcgcacgctggcgttctcgggcgcggcggggtcgtggacgacggcgaagcgctgcccgtccgcgcccgtggcaaagccgcacaggagcatcaggtgcccgttcgtggtgcagggcgcgccctccaggtagggcagcttctcgtttgcggggtcgttggtgtagtggacgctgacgcccaccgggcggtgcgcggcgagctcctcctccacctcgtccaacgtggcgtagcgggcgcaggcctcgtagccgtagcttgcggcgatcgccgcggaaaaggcccagttgccgcagccgcgataggcgctgtcgtagttgttcagggcgatttcctcgggcagcacgttctcgcccagggcgttgagctgcatggcgatggtcgtggccgagcagatcacgttcccgatggcggggtcgcgcaccatctgggagtagcagggcgccggggcgcacaggtccgcgcggggcgcgggggattcggccttggggcgcgcgctgtcccggcaggagagggtcacgctgcgcacgcgcggcgcctcgcccgccggggaaagcgtcggcaggatgcggatctgcacggtgtcggcgcggcggccgtccgcaaggcgcagggtgtccgtatccatcttcgcgctcccatcctgggcgctcttgctgtggcggtcgcagaaggggctccagacgccgaaggagaaccaacccgtgaacgcgccgtccgtgaggcgcacgcgggcctggacctcgacgcttgtgcccggcggcgtgtccgcgcagaaggacagaaggagcgagtcaaaggggcggagcgcgtagagctcctgcaggggttcggggttctcaatccgcaaaaggtcggcgttggactgcatttcggttcctcctgaaaaacgtgagcgtcaagggcgtcactcgccctgcgggatgcggcagacgtcgatccactgcccgcccgtggcgcgggcgagctcctccggcgtcaggcgcacggcggtattggcgccgcccgccgcggggtagacgacgtcgaaccggcgcagggattcgtccaggtagacggaggccccgcccgcggcaaaggggcagacgccgcccaccgggtggccggtgatctcctgcacgcgctcgtgcgggagcatgcgcgccttctcgtggaagcaggccttgaacttcgggttgtcgatgcgcgcgtcgcccgcgcagacgatcagcgcgcagcccccgcccaccgcaaaggacagggtcttggcgatgcgcgccggcgcgcagccgacggcctgcgccgcaaggtcgaccgtcgccgtggagacgcggaactcgcggatgcggtccgcaaggccgcaggcggccagcgcctcgcgcacgcggtcgggcacgccggtgcgcacaaagccgagccaatcgtagatgtgcagcgccggggcgcggaagtcgtccgtctccaggacgatgtagtcgtagcccgcgtccaccaggcagcgcaccgccgcgtagcaggcggccttgcccaggcccttgccgcggaagctcgggtccgcggcgaccatgtggacgtagccgcgcccctcctcaaagacggcggtcgtcgtcgcgccggcgcggccctgcgcgtcctcggcaaagaacacgcgctcgggcgcgacgcccggcttgccgagcagcttctcccgaacgtcgtccagggaccagctctccgtgcccagctcgcccccggcgcagcagcgcaggaacgtctcctcgtccccgggcgcaaaggtgcggatggtcacgcccgcgggcaggtcgtacgcgggcaggtcccggccaaagcgggccatgaaaaagtgcgccatgtctctcctctccccctcttcccgccttgcgcgggtctttgtcggaaattggggtcagtatagcacgccgcgcgcgcaaatgcaaggcccggcgcgtcgatcagcgctcgtgggagaggagccagcgcacaaggccgatctcctcgtccagataggcgcgcgcgggcaggtcgaagtggcccgcatcctccacctccgtgtagcgcgcgtcggggttgacggcgcgcagggccgcgaggaagtcccgcgcggcggccgggtccacgacgtcgtcctgcgcgccggcgatcgcccagacgggcaggtctgccagcgcggcgcgcatctcccgcgtgtcgcggacgcttccgctcagcggggcgacgcaggagaagcgctccggcagggcggccgccacggcgaaggcgccggtcccgcccatgctgtggccggtcaggctgacgcggccggcgtcggcgccgcagtcctccaccacggcgtcgatcagctccgcgaggccctccgtcacgccgttccagcccgtttccccgctggggagctgcggcatgaccacgtaggcgcttagcgcaaggtccccgtcccgcaggaacttcggcaggctctccgcctccatcacgagctccaggtcgtccccgcgcccgctgccgccgtgcaggtacacgatcaggggcaggccgtcgcgcgcgccgggcggggcgtagagccagtagtccaggccgcccgcctcgcccgtctccagggaggccccctcagcctccggcgtcgccgagggggtagccaacggggatgcagaaggcgtcgcggctggggttgcagtgggcgtcgccgagggcgcggcagagggcgtcgcggctggggttgcggtgggcgtcgccgaaggcgcggcggagtcggcgggtgtgcccgcctccaggacgggggtcaagtcctgctgcgccgcgcatccggcgggcgcgagggcgagggtcagcgccagcagcgcgcaggcccatctccggctgtctctcatgtgcatctctcctccgtttttcccaaaaaagaccatcgggaaaacgtccgggggcacttcaatgttccggcggttcccaaattcacgcgctgtacatacactgccacgggaggtggaaacatggaaacattccccaaggagacctgcgtcttctgcgacttgccgtggaagaacaaccgcgtgtgctacggcggcgagctgtgcccgccccccgcggtgcgggcgctggacctgggcggcacgcatgtgacgctctcggaggcgggcgagatcctgggcacgggcgaggacggcgcggagcggttccggttcgagacgggcatccgcccggcggacggaacgctggcctttgacgcgctgcaccgcctgctctacttcgcggcggaccggcggctgatcgcctattcgctgcaggaggggcgcgtcgcctttgcctgcgaggcaaagggcctggccggcagcccgacgctgttcgagttctcggacgcgcagggcgaggcgcgccttgccgtgggctttggtgacggcacgggcgcctacatggcctgcgaccgcgtgacgggcgagacgctctggcgggcgcagacgctgggcacggtcgtggacgcggcggcgcacttcgcgggatacctgtacatggtgctgcgcggcgcgccctgccaggcgctctgcctggaggcgcgcagcggcgacctggtctggtggaaccgcggccggaaggagggcgtgctcggtcaggttctgggcggcgcctactgcgtgcgcagcgcggacgggacggtgcagcgcttcctcctggaggacggcgagcgcctctaaggtcttgccgggctgggggcgaccccggcctacatacccgcctcccgctcttttggttttttgcaaaaacagccccgcccgctgcgtggatgcagggggcggggctgttttgcggggtcagcggttcatcatgagttcggagatggcgtccaggatcttgtcgtggcagccgccgcagccggtggagcacttggtgatcttctggacctccttgaaggtgtcctcgacctcgccaaaggtcttgcactggtgcagcgcgtcgctgacgtcgtagagcgagacgttcttgcacttgcaaatcaggcggttttccatgcgcgcattcctccttgacgacctgcgggcgcgacgggcagtctcccggcgcgccttgcaggatgggattttgatttttcgggtcctacggcgcttagaagtagcgcttcagcaggccgttgaaggccttgccgtggcgggcctcgtccttgcacatctcgtgcacggtgtcgtggatggcgtcatagcccagctccttggcgcgcttggccagggccagcttgccggcggtggcgccgtgctccgcctcgacgcggacggtcaggttcttcttggtgtcggggtagacgatgtcctcgcccagcagctcggcgaacttggcggcgtgctcggcctcctcaaaggcgatgcgcttgtaggcctcggcgacctcgggatagccctcgcggtccgcctggcggctcatggccaggtacatgccgacctcggtgcactcgccggtgaagttggcgcgcaggccctcgacgacctcggcgtccaggccgttggccacgccgatgcggtgctcatccgcgaacttcagctcgccctcttcctgcttggtgaacttggacgcgggcgccttgcagacggggcactccttggggggctcggaaccttcgtagacgtaaccgcagacagaacatacccacttcatgatgcaattcctccattttttctcaatgcgtgccatccgcattggtattcttttgcgttgtgcgggcggtgggctttttgtggcctcctcgcctcacgatttgtatatacccggattcgcgccggttctaacacaggaaaaaactttttttgcagaattttcaggaaaggcgcgcgcgcaggagggcggccaggtcctcggcgctccggtgcagcatggcctcgtccgggccttcgagcatgacgcgcacgagcgcctcggtgccggaggggcgcacgagcacgcggccgcagccggcgagctccgcctcgatctccccgatgcgggcgcagatcgccgcgtcctcggcaaaggcgtgcttcttctcgcccgcgcaggggacgttgacgagcacctggggcaggcgctgcatctgcgcggcgagcgcggagagcggccgccccgtctccgtgaggatggagagcaggtgcagcgcggtctggatgccgtcgccggtggtgttgtcccgcaggaagatgatgtggccggactgctcgccgcccaggacatagccgccctgcagcatgcgctcgagcacgtagcggtcgcccacagccgtgcgctcgacgcggatgccgctttggcgcagggcgatgtccaggcccatgttgctcatgacggtggccacgaccgtgtcgccggggagctggcccttttccttgagcgcgcggccgcagacgacgagcatctcgtccccgtcgacgatcttgcccgtttcgtccacggcgatgaggcggtccgcgtcgccgtcaaaggccaggcctacgtccgcgcccgactccgcgacgagcgcctggagcgcctcgggatgggtggagccgcagtccaggttgatgttcatgccgtccggctcgcaggcgcgggagacgacgcgcgcgcccaggcgcgcgaagagctccggcgcgacgcgggaggccgcgccgtttgcgcagtccagcgcgatggtcaggccggagaggtccgcgcccgcccgctgcaccagcgcctcgaggtattcggcgcgcatctcgggccgggtctcgatcctgccgagctccgcgcccgtgggcgagggcacgcccgcgcagccgccgcgcaccagcgcctcgatctcgtcctccagcgcgtcggagagcttatagccctcgcggttgaagaacttgatgccgttgtacttggcggggttgtgggacgcggagatgaccacgcccgcgtccgcgcacatctgccgcgtcagcagggcgatggcgggcgtgggcagcaccccgaggtccaccgcgtgcgcgccgaccgagcagatgcccgccatcagcgcgcacttgagcagatcgcaggagcggcgcgtgtccgagccgatgatgaccgtgggcttgtgcgtgccctgggtcagcgcctgggcgcccgcgcggcccaagtcataggccaggtttcccgtaagttccgtattggcaatgccgcgcacgccgtccgtgccgaacattcttggcatgatgaactcctccaaatactcgatgctggggggccttaggcgcccaggtccagcgcggccatgctcgcggcgaccgcgccgtccgcggcagcgcagacgacctggcgaaggggctttgtgcggatgtccccggccgcatagaccaggggcaggctggtccgggtgtcctccccggcgcggatgtagccgccgtccgccagctccacctggccgcggacgagcccggtcttgggctccatgcccaccgcgacgaacaggccgtccgccgcaagcgcgcggacgctgccggtcttgacgttccgcagggcgacctcttccagcttttgccctcccgctatggattctactacatggtcgtagacgatgtcaatgttggcggtcttttccatgcggtcgaccagggcgcgcgcggcgcggaaggcgtcccgccggtggacgatgacgacgcgccgggcaaagcgggaaaggtagagcgcgtcctccgccgcggtgtttccgccgccggcgacgaccacgtcccggccgcggtagagcgcgccgtcgcaggtcgcgcagtaggagacgccgcggccgcgcaggcgctcctcgtccgccaggccgagcggccggggcgtggcgcccatgcacaggatgacgctgtgcgccgcaagctcctggcccacggcgaagacgcgcttggtctccccggccagctccacgcgctcgacctcgtcgtagcggatgtccaggccgaggctctgcgcctgttcggccatgttcatgctcagctccggcccgccgatgccctggggaaagccggggtagttctcgatgacgttggtggtggcggcctggccgccgcagaactgccgctcgaacagcgcgcagcgcagccccgcgcgcagcaggtacagccccgcggtcaggcccgccgggccgccgccgatgatgatggaatccagcatgggtttcttcgctccttgccggcgcggctgcgccgggagattttgttctccttttattctacctccggatgggccaaaagaaaacccgcggcgggaaattcttccgctgcaggtgtcttttttcggggaaatgcgctcactgccaggcggaaaagtccgccgcgcccagggcgcggagcacgtcgtaggcttcgtcttccgcggtggagtagtagttgaccgtgatggaataggcgaggctgcccttctgggcgacgctgtccatgccgtcccaataggcctcgtccaggccctcgatccagacgggcgtaaagctctccggccggccgaaggtcgccgtctccatcagcgcgggcagcagggcgcgcgcctgctccgggctgtccatgcagtagacgtcctggtagatccagatggtgtcgccgtccgcggtctcgacgcactcgtgcgtgttgtagacggtcgcggcgagcgagcgggtgacctcgaccgtcgccgggtccacgccctcgagcatctccgtgcgcgtcccctcgtggccgaggtccgcgatcgtcaggtagggcccgtccgcctccgccggcatctcgtaggtctttgttccggcgtactgcgcgacggacagaaccgccaggaccgcgatggccaggcccagcgcgccgcgcacggcgccgtgggcgatgcggcccgcgcggtggtcgctgcggtcgacgggcaggcccctttgcagccgccgggtcagcgcctcggtgcgcgcccagccgtagatgccgttgtagaagatctccgccaggagggccaggtacagcagcacgatggacgtgcccatggtccaggacaggcgccactgcgcggcaaagtcctggaccgcgcgggggaagtcgccgtcgttcgtcacccagaccatgaagaacaggaacgctacgagcaggaaggcccacagccagctccagcggtagctcctgcgcagggagcggagcatctgcacctggccgcgggggtcggtgtagagctcgggcggggcgtcgccgtcctcctgcgcgcagaagacgtaggtcacgccgcagtgcgccgccaaatgccagccgcagtcctcgtagagctcgcgctgctcctcgggcaggtccgcgccctcgaggaattccggctgcgcaagctcgatgcggtagcgcaggcgctgcggcgcctcccggcggaagcggctcagcgtgatcccgcgcttttcgaggacccagcccttggtggccatgcgctcgtagagccgctcgctgtcgccgatggcgtagtccgcggggtggatgcgataggttcgcttcatgtctcttcctccttcagggccgcgccgtcgcgcacgaggcgggaaaggcgcgcgtattcctcgagcagggccctgcgcccggactcggtcagagcgtaggtcttgcgccgctcgtcctcggcggccagctcgatcaggccctccttcttcaggcgcgtcaggatgccgtagagcgtgcccggccccatctccagccggccgccggagatctcccggatgcgccccagcaggccgtagccgtgcgcgggcgtgcgcagcgccagcagcacgtagtacatcgcctcggtcatgggctgtgcgtcgggcaatgcgctcccctcctccctgcaactattctgcgttgcgatatatcgtctggcataatagtagcacaggggcgggatttgcacaagggggaaaagacaaaaaatttccgcgcgcagaaaaagcagacttgcgcgcggaaaacgtgccggggggaaggggccttacttcaggatgcggaacttgccgatgaggggcagctccttggccatgccctgcgcggcgttgacgatgcccaggatcagcagcacgaggaaggcgatgttgaccagggcggcgaccagcgtccagagcagagcgagcgggccgaggaaggcgaagatgacgctcaggatcatgttcgcgacggcaaagatgatttcgcataaaaagaggatcaggccctggttggcgtggaagcgggcgaagggcgattccttggccgcgaggatcgggatcaggaccaggatgccgatgtaggacagcacggccatgaccttgttgttctgcacgtccgcggcggcgtaggatgcggtcgtgtcgggggtgttgaagatgttgctcatacacacaaacctccttgcaaaattcaacctctccgcttacagtgtaccacagatggcatcgcttgccaagggattctgtcgccgggcgtcaaaagagcgcgtcagttccgggcgacctccaggccgcgggcggccatggcgcggcgggcggcctcgagcagggcggcgtgcgcgggctcctctggcgcggcgtagacctcgtcggcgagggcctggatctccggaaggagcgagacgtcggaaaagagggcgagcgtgcgctcgtccgccatgccgctctggcgggtgccgagcaattcgcccgggccgcgcagctccaggtccttcttggcgatgacgaagccgtcgttcgtctcggtcagggcgcgcaggcgcgcggtgggccggtcggccatcaagaagcaccaggaggccttctcgccccgaccgacgcggccgcggagctggtggagctgggccaggccgaagcgctcggcgtcctcgacgaccatgacggtggcgttgggcacgttgacgccgacctcgatgaccgtggtgctgacgagcacctgcgtctcccccgcggcaaagcggtcgaggatggcctccttttccgggcccttcatccggccgtgcaggagctcgaccttcgccccgggcagggcggcggcgaggtccttggccgtgcgctcggcggaggcggcgtccacggcctcgctctcctcgaccagggggcagacgacgtagatctgctggcccgcctccaccgtggcgcgcagaaagccgtagagcccctcgcgcttgcgctcggggacgatgcgggtggccacgggcttgcggcccggcgggagctcgtcgacgacggagacgtccatctccccgtagaggacgagggccatggtgcgcgggatgggtgttgcggacatgacgagcacgtgcggcgcctggcccttgtgctccagggccaggcgctggcgcacgccgaagcggtgctgctcgtccgtcacgaccaggcccaggcggcggtactgcacgccgcccatgatgagcgcgtgcgttccgacgatgaggtccgcctcccccgcc

SEQ ID NO: 3531 - DNA, 32759 bp, Unknown
  16S sequences of unknown bacteria
tgtttcactgttcagttatcaaggttcttaagttgtttctctgttgtctctctaccggagcaactctgatatcatatcacagctttttcagtttgtcaacaacttttttcaacttttttatttttctattttgcagttttttgaactgcttcaacagcgagttatatactatcatctgttttttattttgtcaacagattttttaaactttttttattttttatttctgctcaaaagtttttctttctttttatgtactctcggaatctttttgtgcttgattttgtgagaagattttttgtcaactgcaaagctttctcccttctggaaagcaaagcgaagattcgcacctctttgccgcctgtcccatccggtaaaaaatgagacggccccggccgtctcaaaaaactcttttttatggaattctcaaatgccagaaaccgtaaggcttctctcctccagactctttctgctgatcttattgagtttcccgtcctctgtcactccaccttcgaaaacagaatccggtcattatccagctcttttccagctccggcactgaatttttcaagcaggccatctacggtaagaccggcacgctcctctccactgatatcaagaacgatttttccggagtccatcatcagggtccggtttcccatttcgagagcggaatgcatgttgtgtgtgatcatcaggcaggccagatgattttcttccacgatttttttcgtcaatgcaagtactttttccgccgtcgccggatccagcgctgcggtatgctcatccagcagaaggattttcggcatgacgagtgtcgccatcagaagtgtcagcgcctgtcgctgcccgcctgagagcagtccaaccggctgtttcatccggtcttccagacccatgttcaaaagtgaaagacgctcacgaaacatttcccggtccgcattgctgacacgcgaaaatacagatttcttttttgaaacacgcagataggccagcgcaagattttcttcgatcgtcatatgcggcgccgttcccttcatcggatcctgaaacagacgtccgatctccactgcacgcttatgttccggcatataggtaatattctgattatccagaaaaatacttccctcatccgggtaaaagcttccgccgatgcaattaaacagcgtagattttcctgcaccattgcttccgatgatcgtcacgaaatctccgtcttttacagtcaggcttacgccatccagcgccgtcttttcatttacggtaccttcattaaatacttttctgatattggtcatcttcagcatgacgtatttcctcccttcgccgcagccattttctttctctgaaatgcagccctgctcttaatatatggggctgcaatcgccactgcgacgatcacggatgataccagtttcagacattctgccggcacgtgcagacgaagcgcgatcgcaattgcaaatcgatacaggcagcttccaagtacggctccgatcatccgccgtgtgacagttcgtttgccgaccagcgtctctccaataatcaggctggcaagtgcgattgttaccataccggtaccaaggttgatatcacaggatttctgatactgtccgatcaggcagccggaaagtgcggtcatcgcgcccgagacgcacaggcctaccgtaaccgtaaagcccggattgatactggatgcacgcaccatgtcctcattgtcgccggttgcacggattgaaagcccgagacgcgtgccgaggaaccatttcagcagcagacatacgatcacaacaatcaccgccgagattccaagtttataccaggtggctccaaacagtccttttccaagactgtaaactgtttcacatttaaataaagaaaggttcgatgagaagcccatcgctgcaagattcacggtgtaaagtccggtatttacgataattcctgccagaatcgattccacaccgagttttgtctgcagaaatgccataatgtagccggaacacacacctgctgccattgccgcaaacagtgcaagaatcggatgtcccatgatcgccacctgcgcaccgaccgcgcagccaagggtaaaacatccgtccgtcgaaaggtctgcaatattaaggattgagtaactcaaaaacagcgcgagcgccacaagggcatagatacatcccagttccagtgcgctgatgataaccgggaaggaaagcaacgatgccatatataatctccttttctacagaaatagccagactggaatcccagcctggttatctctttttcgcttcaattttataatcttataatcggcattttcacggaatctgacacttcgaaaatgtttctttgcggcttgcttcctgttctttgccgctatgtttcgtcttatcattctaaacgtgggacgatccgcttattcaaactcctctgccgtaacggtctctactacgccggtgcatttctctgcaaatccgctgtagtcaatgccaagcgcttctgccgtctctgtgttgactgttgcaataccattgtcaaacgttttgactggtgttgctgccggatccgcaccctgcaaaacctctacaaccatgtctgcggtctcaacaccgagctttgcatagtcaacgccatatccgcagaatgctccgtttaatgcaaaggaatctgcaccacagtaatgcgggatgcctgcctcgataaacttctcataaattgccagttctgccgtcatgaccgtgttgtcagtcggggtaaatactgcgtcaacgcctgctgcgatcagggcgtctgctgcctgcgccacttcggtgttgtttgttccggttttttctacgtaatcgatgcctttttcctcaagatatgctttcgcatctgcgatcggctgcttggaagaatcctctgactggctgtaaagaagtcccacggacttaatatccggatttgccacaaacatcagatccaggattgcattcgtattcagtgcatcgctcgttcctgtgatatttgcgcccggtgcatccatcgattctacaagcccggctccgaccggatccgatactgcggaaaatacaaccggaatctgattgtcttcggttgccgtctgtacgatctgtgctgccggtgtcgcaatcgggataatcacatctacgccatcggagatcagctgtgttgcaatctggttcagtgtcgtggaatccgcctgtccattgtatacatttccttcaaaaatataattgtcttcgccctcttcggatttctttgtcagctctgcctcgatattggcttcgatctgatttaaggatgcatcgtctacgaactggataatgcctactttataatctgctgccattgcgcttcctgtaatcattgccgctgctgccatggatactgttacggttgcaaatactctctttttcatagttttgttctcctttttcacttttcttcttttcaaaggatcaaccggtgtatttcctggtaaaacaaaaaccgcctcagatttctctgagacggtaataatttcttattatcgcggtgccactcattttgacaagtcgtccactttcgcgtgtactatcatacactcctgattgataacgggttcggttcccggcatatcctactttgagatttatattgcaatctcgttcagaccgccctcaaaagtccattcagtttcctgctccgtactgcaatcccaccacctgcagttctctgtgccttcacaaatgaaacttactactctttctcatcggtttgttcctttgttgtgttaaagtgtagcacgacgattctgttttgtcaagataaaatgccagaaaactttatcttgttttaaggacaggcagcggagtagattgcgaatgtccgctttacgaccacttcctacccaaaaaatgctgacgcacgcagcacgatcttcaaaaacaaattcgactgatacagccagttcagccaggtgctgctctccaccatcttcatcagctgcattccgatcccggtacccgataccagggacaggatcaggaaggcaagccagagcaccagcattgcctgcaaaagcccgagcgccagaccggccacacgattgaccacgcgaatcaccggcagatttgccagaatgctgagtgccgaaatcgacagccataaaagcagatgcacaataagcacggaagccagaaatgccgctacattcaaaataccggtcgcaataaagccgatcaggtagtcctgaaacgtgctgactcccagcccctgatacccctcttcgttattgtaatcgagcaagatgtcctgcagaaattccggaatcggaagattttcaatcagctctgtctgctcgatcctcgtcagatttccaagcagaacagctcctgaattctcgctttccccactgttcgttgtgtcactgccaaaatactgctgaatatactgttctttatactgctccagctgctcatcgctcaatgcatcgagcaaactgccgtcgtatccgtttgcctccatcagagccttaatctcttcccggcccatattccggtagatgtctgcctgtgagctttctcctgtacttttttctgcccctgaaaacattgcctcaccgatctgcttttccatgaccgtccggcattgctcctcgaccatcgtataaaccggcgtgttttccttcagaaaagcagtgatccacggcagaagtgccgatacgagcaccacagaaacgagcagcgataccatcgccgcaagcttctttacgaatcctttccggtaaccagccgctgcaaagagcagaatcaccgcggccaccgcgatttcaagtatgtttatgttcatgatgtcctcctgtacacagcccgcttcgctgcctatttgacacgaatccagtcaaagctgtcttttgtgacaacgaggtaggtgcggaacgagccaaagtagaacagttcttccacttctttttcatatgcagacgtaaaacgcagacgtcccgtctcactgaatacatcaaaccctttttcattgtacatcaggatttgaccgttttcgatcttgatattgtcaaacgtcgcatcaatcttgcgtgtttttttccgcctgccgctgtaattgtaaagttccatgcgatactcctgatcaccgtcttcattcaggaacagaaaaccgatctggctgtcatcatggaagcttccgataatctcttccgtgaagtcaatttccgccgtctgcgcaggttcttccccgcctccaaacacataaaatccattgtccgccacagctacagctctcgtattgtccacaaaataaagctccggcagtatcgcatcctggtattccacactgctgatgatattgttttcttttttctgccccagcgtgccgaaatcgtaaaatactacgctgctgccaagaattccttctttcattcccagataagacactgccatcctctgcccgtttggggaaaggtctacatccatcgggtaacccgtctcactgaccgtcgtcttgtcatttgccaccacggttccatccgcctgatatagattaatccacgtgatgttgtcctgctcctgcacaacagccaccattccctgcgtggatacgcgcactttcaaaatcggatactgcgtctcaaaatttccgaccagcccatcttcgttgataatatagatctgcgttccctgctgctcggcgatcgccattgtcgtatcacagatatctgcaatcggtgcctgcatattgtacgtaatgctccattttgtatcgctgcttcgcgaaatacaggataccccgtctgaattatagcgatagagcagcttaccggcggaaatatatttcgtaccggaagctgcctcgatcgcctcgcttctgcttatcacataatctttaaaaatataaagctgattgtacagccagaaaccgaataccgcaattaccgcagccccaaaaagcaccagcctcagccgcttaagattccgcttttttcttgcaagcttatctttcagttcctcctgcagcgttcgccccggcgcaatctcttcttcctcgacctccagatcatcctcatcatccagatcttcatcgagccgtaaaaactgcagcttttctttcaggccggccgctgtctttccccatttctttttattcataaacttatcctttctgttcccatatacagacaccgttcatggctccgcgcacccaaagcaatggaatgcttatctgcgttcaaacagtaaaatggctatagaaaacgacatccacatagaagtgctataactataacagaaagtaggcatgcgtgcaagccatcagaacatgcatcgcatttgaaatcccgacagcctgcagcacaggcctgcctgctgatgctgtttctggcacttatgaagcatgctgctgcgtcagggcagcacgatctcctggcccggcaggatcaggttcgcgtccgtgatcccgtttgcactgcagatcagctccagtttgtcgaagcttccgtaatatttactgcagatatccgccagtgtgtcaccctcacggatcgtgtaagtcgcctgcgtacggcgcggccgggcagatgcggactgcagtgtgtcatcgccttgtactgatgccgtacccgcagtctgcccgtcatccctggcagttatggattcctctgcatccccggtatcttctgttgaagagacgctgctttgtgcggcagcaagcccattggaggctgtcatgtttccgcctgcgacggcatctgatgcagattccgttctgtctgcaccgatacttcccgcagccgccccgctctcatctgcaatggcagttgccgctgtgttttccacactgctctgttcttctccggcagtattttccccgctgctctgcccgcctgaaacggcggtgctttcaggcatgccgccggaattttcggaatctggcatgccggtattctgcacgcccgacgaatctcccgcaggtgtatttgtgttttctcccatgcctgccgtatccatataaatatgatcctgcgcttcattttctgctgcgttgtcggaggcattcagcgtctggcgcacttttttcaggtcatccatttttgtgaccgtaactgccgctacagcaagtactgtcacaacaaaaaaagagctcgccatcttcagcatgctgccgctctttctctcgctcttgatccgtaccttctcccggaagcttttgattgctctgtccggaaaactttctttttctacccggtcttccttaaactcatccgaaagatacgcctgcatttttcggttctgctcataaaaaataaaatagccttttattttgtggtatgttccatctcgctgtgcgtacagcgtctcctcctgctcctgcagatgatacacgatatgtcctgcatcctcaatccgcgtccgcacttctcggatccgctccatatcatagaccccgatcacacagcagccctgtaccgtccagtccggaaaatattttgtgcgctgtttctccagtttttccgcaaaggattccggctcccatgttttggaaagttccaggattccccggataaacacatactctgtttccgcctcccgtctgcgttctccaaagaaaatcccgagatacccttctttttcctgctgttcctttttatggatacatgtcatcacatagtcttccagacagattttttcctcccctctgacttctccgatctgacgtatgtttttcggcagtgctgtctctttttccatactctgctcactccttttcccattttccgcgaaagtgaacattttcagattcccctccgcggctgcatgatcataaggtgagatccgttcacagcaaggactcataagcagccttcccacaagcggttttctccttatacgattctgcgttcactctaccatacactgtatgcagaatttagtatttcatggacaaaaaagaaaatttttttcgcagcactttgaattcctgctccaatttttcttttaccgcatacaccctggctgccctggatacactgtaacatgtatccaggcacggcaggaaaccataattcgctttgctgccctgactcgggtcaaagcgcggaacttacctgactcagatcaaataaaaaggagtccttatatgaaatcagaattatctgatattaaaacagatgtttaccatgcacaggagtcgatcccgctctgtccggattcgcttctgctcctgcttggcagctgccgcacttctttttccagaaaatcaggccggccggtcattctctgtatcggcacggaccggctgatcggtgacagccttggtccgatcaccggaagttttcttcttcggtacggctgtccctgtccggtctacggcacgctgatgcagcccgtccatgctttaaatctggacgtgcagtcctccattatccgcaaacatcacccgaattctccggttcttgcgatcgatgcttcgcttggtccctgttcgagaatcggcgcactttccctgcatccttacggtctgctgcccggctccggcgtacacaagcatctgccgcacaccggtgatatctcgattaccggaattacaaattcagagagtctgcatccttatctcgcgcttcagacagcccgcctttccaccgtaataaaaatggcagaagaggtatgcgaatgcattctctcctgcctgttatgaaactcagcaattttacagtgccgtccgaccctccagcgcccgcagaagcgtcacctcgtcaatatactccagatcgccgccgaccggaacgccgcttgcgatccggctgaccttgatgccggtcggtttgatcagcttgctgatgtacattgccgtcgtctcaccttccaggcttgagttcgtggcaatgattacttcatttacatctccctgcagacgctgcatcagctctttcagccgaatatccgccggtccgatcccaagcatcggcgagattgctccatgaagaacgtgatatacgccctcatactttcctgtcttttcatacgccgcaagatcacgcgtattttccacaaccatgatcgtcttatgatcccgctgtgcattcgcacagatcgggcatatctcctgatccgtcagcgtacagcattctttacagtagcggatattctcgcgtgcgtctgtaatcgctgatgtcagctgcctgacctgttctttcggcatatgaatgatatgaaatgccagccgctgagcagattttccgccgatgcccggcagagaagagagctgctcaatcagctttgacatctgacttccgtagtaatccatcagaatccgaatcccccaagaccgccaaggccgccagtcagcttcgacataacagatgctgctgcctcctcagcctgacgcatcgcctcgtttgtcgctgccacgatcaggtcttcgagcatctcgatatcgtccgggtcaaccacctcttctgacagctttacacgcttcacttcacgcttgccagtcacagttacttccactacaccgccgcctgctgccgctgtgaattctttctcttccagctctttctgattctcttccatctgcttctgcattttctgtgcctgcttcatcagattattcatattgcccggcatgccgcccggaaaacctccgcgtttcgccatttttatttcctccatttattttattgttctatcagtttctgtccggcatttggcatacaccatacaaaaaatctcatacgtttcacgattgccttatcattatccgcaatccgtctccagatttctgtctgtgccagctccggctttcctattctatcagttttcgtctacgatttctatatctgtatgaataaattcgcggattctttcgtccagatcgatctccgccagcttatttttctggatatcttcatctgcctccagcatcagcttcacttccacctgttttccgatcttatccgcaatgatgccctcaagctcagccttgcgctctgccatctgtccggcattcctggtatagcgctctgccagaaaatcggtaaagacgacgaaaagacgattatcattttcgtctcctgcattgtattttacctgcgcggaagcaagtgccatccgaaaggcaggcgatgtctccgcaatgatatttttccacatggaacgaacctttttcaggtcttccggtgccgctttggctgccggcgaaggcgtaccgcctgcctgccccgcgctacctgccgggacaaagccgtccggccacgggtaagcgccattgtagccgtcgccagtcggataaccattttcatcaaagcctgcaccaggacagggtgcgttcttctccggataacctgcgctgccgccttgcgctgccatcaccactccatcttccagccttttttccagcctgcgcagccgctccgcgatcgacagttcatctttttccgcctccggacggcacagcttgatcagtgccatttccagcatcacgcgcttgttgactgcataccggattgttcctgataattcagaaaaaatgcggatatagcgcatcagtgaatcgctgcggatcactgccgcctcttttttgagctgcgccagattctctgtcgacacatccaggatatcttccatgtcatctgatgccttgatcagcatcagattgcgcagataccatgtaaaatcactgacaaactgcgtcagatctcttccgtctaaaatcagccggtccagaagtgcgatcgaatccgtgatccggtcctttaaaatatgatcgagcagttcgctgaacacctccgtatccaccgccccaagcacatcgagtacccggtcatacgtcagtgtctcgcccatataaaatgcaatgcactggtcgagcaggcttaaggagtctcgcatcgagccgtctccctttcgcgccacgtagcgcagtgctttttcctctgcctctacgtgttcctgttccatcaggtcctgaagtcttttcagaattgtctcctggctgattctccggaaatcgtagcgctggcatcttgacagaatcgtcaccggaattttgtgcgcttctgtcgtcgccagaataaagatcacatacgacggcggctcctccagcgtttttaacagtgcgttaaacgcaccaatagagagcatatgcacctcgtcgatgatataaaccttatattttccctccgtcggcggataggctacttcctcgcggatctcgcggatattttccacaccgttgttggatgccgcgtcgatctcgatcacattcattgatgctccggccgcaatcgcacggcaggatgcacactcattgcacgggctgccgtcaatcggatgctcacagtttaccgccttcgccaggatcttcgcaatcgtcgtttttccggtgccacgtgtcccgcaaaacagataagcgtgccctgcacggtccgcacggatctgatttttcagtgtctttacaatgtgatcctgtccctttacatcctcaaacgtatccgggcgaaattttctgtataacgctgtgtagcccataattcctcctgttaatcctttttccttacacaaaagacagcctgtgcagatatcctgcctcaggctgtccgtccgcagcttcttccggcttcatttgaagccctttcgttctgaccaaaaagctgcttttttgcattcattttcgtcaggtgactatgccaatttcatcagtcaccgaaactgatgcccatcagctttgcttcctgaatgatggaatccttcggagataccattttcagcttcccggaaacctccgcaagcggcaccttcttcatttttccgtttacgatgccgaccatatagccgtactcttcatcaagaatcatcttcgcagctgtcacgccgattctcgtcgaaaggacacggtcatacgggcacgggctgccgcctcgctgcgtgtggcccggaaccgtaatacgcacctccggtccgttggctgccttgatctgctctgcaagctcatatgcgaccgacggatatttctgcgcctcaatttttttgcggtattcttttttgctgagctttgcgtcttcttttgagatcgcaccttctgcaaccgcaatgacagtaaagcccttgcctgctttcgttctgcggtcgatcgcctctacaacacgcctgatgtcatacgggatctccggaatcaggatgatatccgcgccgcctgcaataccagaataaagcgtcagccagcctactttgtgacccatgacttccacaataaatacacggttgtgggatgccgccgtcgtgtggatacagtcgatcgcctcagtcgcgatattgaccgcgctgtaaaagccaaaggtcatatcggtgccatagatatcattgtcgatcgtcttcggaagatggatgatattcagcccttcctcccgcagcagattcgcagtcttctgcgtaccatttccgccgaggattacaagacagtccagacggagcttgtaataattctgcttcattgcctctactttatcgaggcctttttcatccggctcacgcatcagcttgaacggctgcctggaagatccgaggatcgtaccgcccttcgtcagaataccggaaaaatcacgggaggtcagaagtctgtaatcaccatagatcagacctttgtagccattcataaagccgtatacctccagctccgtgaggtttgcggaaagaccctttaccacgccgcgcatcgtcgcattgagcgcctggcagtctccgccgctcgtcagaagtcctattctcttcatagttcgtcacatccttcgttttttatgatgaaagtcctggtcggccgttacataagccccacaggcgcaaagtaactgactttcctgttttcatagacttagtataccgcattcttctgcccaccacaacaattttcaaaacgaaattcttcgatgtgttatcattccatctcgcggatacgccacagcggtgaaatgcgcagcattttgccgctgtgcctctgaacagattttcatcacgggcagaaaccctcaaaaatgaagcagtcataatatggccgcacctgttcaagctgagcggcagagcgcaccgtccaggccgcacacgggcagtcgaaaatgctcctgcagatcgtcttggatagcgccttccgatcccggatatcataggcaataaaatccggctttgagaaaaagttgtagagcagatggcgggatgccatacgttccggtccataatgcccctcttgccgctgataattcatcgccagctgtccgcgcggaacctccggccggtgtctgcggtaccacagaagtgccatcgggctgaacgattcgatggtatagctgccgcgatatccctgcagttcctgatccgtcaggcggcagatttcacagccaagatccggacacttcagttcaatcagaagcggcaccgcaccgtttacaagctgaagtacatctgcaaactctggaatccgctgattggttccctcgatcgaaaactgctgcagttcctcaaatgtataatcctttacgcgcccttccgccgagcagacccgctttaatgtaaaatcatgaaacacaaccgggatttgatctctcgtcagctgcacatccaattcaatcccgtaccctttttctaccgctgccgcaaacgccgccatactgttttccggcacacctgcctccagatcatgcagcccgcggtgcgcataaaaaatgcctttcatccgctccgcccggtgctttcgctccggcatgattgccagcagataagctccggctgcgccgagcgcaccaaggagccattctccttcgtgtttcatctctgatcccctcttttctttcgaatgtactctcggagtctttcctgcactcacttttgtggccgattttctgccagccgcacacaaatttcatcaacgtgccccccgtgagtacatttaaccgagtcaagcaagtcccctgcttcaattgcgcggagcaataagcagtgggtagggacttgcttgtatcaggagtggtacaagccactcctgataagctgcgaagcagctactcggttatgagcaagtagcgaagcggattgcgaatatccgctttgactcacagatgttctgatttgccctgtatactacatctacacatcaagttctgtcagcactcttcttgcccggtccggataatttgtaatgatcgcgtccacgccctctttcgcaaggtactccatcatatcactgccgttgacggtccagacatgcagcttcagtcctctctgttttgcttctgcgaggaatcccgtatactgcagattgtaataggccggatgcagtgcctccgcctgaatgcgtgacgcatattccggcacattcagccagccatccgcataaagaatccccgtcctcacgcccggatccagttttttcagcgccacaagcgtagaatggttgaatgaggaataccagatccgctccttcatccccatttcttcggcaagctccagcactttgccgcagatgcccggataaaaataaacgcctgtcttcatctccacattcaccgtaatcccagacggctttacgagctcatagacctcacgcagcgtcgggatcttcgccgatgcatactccggatgtgtcttgttgaagttcagtgcttttaactcttttaacgtatgatcctgcacgcggcccgtgccgtttccggtccggtcaatcgtctcgtcatggatcacgacgagttcaccgtccttcgtcatctgtacgtccaactcgataccatccgccttctgctcaattgccagttcaaaggattccagtgtgttttccggtgcataaccggatgcgcctctgtgcgcccagatttttgtgttcataatgatacctcctgttctttctggtacattgtttcgtaaataactatatcaatcgcgcagaatgcggatttgagtgtgcagatgaaaaaacgcaggcgtagcgggctacgctgagactttttcatctgtgcaatcggattcgcagacaagtgagtggtatagttatttcgataacgatgtacccgttaaagtcaaaactgcccggaacctctgatcccgagcagcctttttcttacgtctttttctttttccggcctgcccattttacaaaaaggacagccgccgcagtgcttaccgctgtcgccgcgatcgcaggtcccgtgataactgccggatccgcgctgtggtactggctccggtatgcaattaccgtgaccgggatcagctgcagcgacgaaatattcaggatcagaaatgcacacatttcgtcgctcgccgttccggcctccccgcctttttgttcccgcagcgcctccagctccttcatcgcctgaagtcctgccggagtcgctgcccacccaaggccgagaaaattcgcggcaaaatttaaggtgatcgcaccggatgccggatgattctccgggattcccggaaacagaaaccggatcagcggtttcatttttgccgaaatcactgaaactgctcctccgtcctgcgcgatctgcatcagtcccatccacagcccggtgatgccaagcatggtaatgcacagcgccactgcgtcacgggaagaatccagcaccgcggcagagactgcttccgtccgcccggtcattactccgtaaatgatccccaccaggagcattccgccccagattccattcatggcggtgcctccgctgcattatcttctcaagtatatgaagatacgggatcatatagtaccgtattgcgcagattactacactgatttcgcctcagtcatcggctggttttccatgtcctgcaggttccgtgttttcttctccagccgcccggcgctccagctttctggagatcagataacgcggccttccttttacttcctcataaatcttcgcgatatagtatccaataataccgaggctgatcataatgatgctgccaatgatcaggatcagcaggattaccgtcgtaaagccttccacggcatgtccgctgaaataccgcaccagtgactgaatgccaagcacgatcgccagcaggaacacaaacacgcccgccaccgtcacacactgcatcggcaccgtcgaaaacgaaacaatattttttacggcgtacttgatcagcgatttcgtcgaccatttcgattcaccctcggtgcgttcctgcacatcaaactccacggtcgtcttccggtagccgatccatgaggagagcgcccggaaaaatacatttctctccggcatatcaagcaacgcgttcaccgctttgcggtccaggagtttgaaatctgaagcccgcgacatatcgatcttcactgcacttgagatcagtttataaaacagtccggcacttgccttatgcagcgcactctcttttccgcggctgtgtttgacaccctctactacctcatacccctgctcccacagacggtacatctccaccagtatctccggcggatgctgcaggtcgcagtccatcaccgcacagcaatcgcccgaagcgcttgccagccctgcatacatcgcagattccttaccgaaattgcgggaaaaattgacgcccgtcacatttgggttgcgcccggccgcacgttcaatctcctcccacgtgcggtccttcgaaccatcgtttacaaaaacgatctcatatgggatcttctctgcattcaggatccggtcgatcgtatcggctgccttttgtatcattttttcttcgttgtaagctggtaaaactacggataacatcgtttttatccttcctgtttctctttttccttaccgatccggaagtcggagtaggctccaagatccgtcagtacgatactgtggctggttctgcggtggcttaccgggatcatctgcatgtaatctccgtagagatacgtcagatatttatcgtattcctttggaaccgggaactggtagccctcaaaatccacataaaccacttcatccagccatttcttcggaaatgcgccgcgctttaaattgcggcccatcccgtcatagagatagtctgtcccgcgatccctgaaaaattccagactgcggttctgcgcccaaagcgcaaagcgcatcggaatcagatactttgccttatcgacaaatttgcagatcagcggatgattgccgccgctcttgatatctgtatttccccacttattaaacaccacagagcgtgacagcattgtgaccatcaggtgaagtttctgtgaccatttatgatttccggtgcggtcatgcgacagcacatcgaaaaagatgccattgtgcatgtccataaaatgtccggtaaactccgtcgcaaacatcgtgtcgttgatgcgcagcttcgtaaacgggttgtaatttcccttttctgttgtcggcagctgcacaaaaatattatccggcagttcccgctgcgccaccttacggaagcggtcgtaatcctcacgcagcatcataacatccgcgtcgtcatcccagggaataaatccgtgatggcggattgcaccaagcagcgtaccgcccgccagaaaatatttgatgtcgttctggcggcagatccggtcgatctcaagaagatagccgagcagaatcttctgtactttttcaagctttccaaggtatgtgttgtcaaaaatgaaaacctctccggtctgctgcagacatttcaccagaatgatcagtccgtcctccatcgtgatcgacggttcaaaaccgtagtgctcgatcagctgcgtgttcagaagaacgccaggcggcacgaatgaacgctcctgcacttctgttttcgcttcggccatatcttccctgatccgcatttccgctgtggccgtattctgctcattgcattcgtctgaagctttttttcctgtctccgtcgtcaggtccagccggcactgctttggaaaattctgatacagcgtcatcgcaagttcagccgggaaacggtccgaatcctttccctttacattgaaaatcttattttccggaagcgcagtcagcacatactggatcgcagtcagcacgtcatggatacagatgtaggaatcgcgttctgccgaaagtctcagctcgatcttttccccgcgtgctgttttctttgcaagggtagccgctgcatgatccatcatcggaatgcatggcccataaatccagccggtgcgcaggatctgatacggtttttggtgcgttcggcattttgtgatcagaatactctccatcgcctgcagcagatactgctgcgcaaaagccgggtctgaaggatccgttgcgccggcctcgtactcggaaaccgcaaatgcatgagccgtccgcccatagacccgcccgtcagaaagcagcaaaatctccgggtctgcattcccgcagagtgcatcaaccacatccgaaaatgatttcagatatgcaaacgatgcatccgctccttcaggcgccttcgcacagcaaagtcccgtcaggatcaccacatcggcttcctttatctggaatccttcttccgtaaaaacatggcgcacttccaaagcaccctctgcgtttaaaaaggcttcctcaacacggatccctgcttttgcctcatcattccatgccataaaggaccacgccgccgcatcctggagcgcctcctgttctccgaccagaagtatctttttcttttttatttttttcagtgggatctggccggaccggtaagcagcctgcgcccagtccagttcaaattcatttaaaaaatcccgcagtaacatagcatcccttactttccaagcttttctgctttcgtcgtatcggtcacaaccgtcatcggtgagagcggcgatgtgctgatctcaccgttttcaatctcataatccgtcagtccatgtgccttcgcctcgatgttccccgggtcattttcccgcagccaggtaccggaagcgctccgctcccgttcgagcattgcctgtcggtcctcccgttcctctttccgatcctgaaatgacacaatcttcggatctccgatccgaatcggcttttttccatccactgacgttttcggcttttccgctgccggttcgtctttctttcctgagatattgtagatttctccagatgcgccgagcatcagcacacgcattgcctgaagcggcagtcggcgaagcgcttctgtctccgcgtttccgtccatccgcacgacccgcaccggaagatttttttccgctgccagacggcaggcaaactgttctgccatgcgcatgcactgcgccgctgcgtctgctgcattcgtatggcagatatagccaagatcttcttccttttttgcctggcgatatccatagctttttccatagacttcatttccggaaataagaagcactccggccggctttttctccggcagactccgaagcgtttccaaaagcttcatcgtttcctcccagtcatcggccgccatgctccagtcttcaggctttgttgtccactctgatgccttccgttttcgatccggcaccgcagtccgtgtaaaaagcagcacataatcgccttcacggatctgttcctctccgtctgacactgcgaccgctccgcccatctggcttgccaccgttccaaggctctctccaaaaagtgcccggtcactgtttctgactccggcaagcacgatacggcttccctcaaaatttttccatatcatttccggtgtaattttctgttccatccggtattcctcttttctttgctgcggaactcctgctctgtcctaacaacctgtgtcttactcaaggcattcctttttactgctgctcattccttttacagcgaatgctgcagcaaatatttttctttgccaccggcctgcgcttactcctcctgcgcccgcatactgcggatcagccgttcaaacatctccggcagtgatacctctgccttccagccaagtgcatttaatttttccgagcacaccagcatccgcgaagtcggcgcatacccaaacctgttcgcatcctccgggatatcgaagatcagatttgagccgctccacggatacttttcgatcagcatctctgccatctgccggatcgtgccgtaggtagcctcgttggagacattgtatgcctcaccgttttctccttttaagagaatcgtcagaaggccaagcaccgcgtccgtcgtgtagcagtagcagtgcgccttgcttccgtcggtatgcagcacgatgtcctctccatgcataacgctgcgtgcaaactgcgcaaagacacggttttcatttttcggaacacccgcgccgaacgtctgcgccagacgcgccgtttttaccggaacctgatattcatgcgcataagcaccgcacagcccctctgccatccgcttactctcagaataactgctgcgcacctgaagcggatctatgtaaccgtaatccttttcacgcacgatataattggcatcccccaccacgccgtatgcctccatggaggaaagataaaccatgctctttacctgtttttcgcgtgcaaactcaaggagattttttgtgccctgaagtgccgtcatgatcgtttccaccggatgatccacaaaatcctttgatgcagtcatgccggctccgtgaatgacgtaatccaccggtccgtcaatcttgaccggactctggatatcctgcacagcaagttccagtcctgcactgataaattcgcccagctgtttctgtgccttttctctgctgcgcaccacagccacgactttcagattcaatccacgcagttcgctcgcacacacaagcgcacgtaccagcataccgccgatcagaccggtagctccggtcaccacgatccggcttccccttaatttctcccagtcgatctgttctgagcgcgtaatccgttccagatcttcctgcagcgcttcatcctctgtccagcgtttcatgtttttccctcccgcctgctcatcctgttttttctcttcctgcactttcttgccccggtagcggttcatctttgccgccagccggttcgtcaggccaaatccaaatgcctgctcattttctttatactgcaaaagtgcccgaaacatatatacatcttccggcgtcgtcaccttgatgttgccccgattgccctgtaccatatgcggctgacggccgatcgcacggtagatcgtgcaggcatcgaccatattttcatacccattttccgtagcccggatgatctcatgtgcgctcagaatatctttcagatagaagctctgcggcgcctgtgcagaatagctgtcctttctaagcggcagtgtctccacctgctccccgtcacggctgatcagaatggtctcatagcagagcgtcgacgtgatcgcacttccatactttttgacggacgcaatgttgtcactgataacctcgtattccacaaacggccgcacgccatcgtggatcagcacgacactgtctccggaatgctccgctgccgccctcttcagcgcattgtaaatggagtcctgcgcggtctcgcctcccggtacaaccgccgacaccttgtcgatccggtaatcttttaaaagctgctgtgtataacagatgtattcctcattgactgcaagataaatacagtcgatctcttcatgctcctgaaacagctgcagtgtgtgaatcaggatcggttttccattgatctccagaaactgcttcggcacccccgctcccatgcgcacgccgctgcctccggcaaaaataatcgcaatgttttccatgccatctcccctccttcgctcgtattctctctgtgaaattctatgagaagatccggaaatcatgcctgttctctttctccgtatcattccgcctgtcagactgtcaggatcctttttgctttattgtatctgtctttccagtcccgccagttccaggatccgctccgtcgcgtttccatcacaggaaccggtatacaggtaaataaaatcctctatttccttttcgtgctttttccactcctgcgccgcaccgcgaatcgtctccgcaagctgtgtgccgtcctccacaaccggaaacggcatcttccgatagtcaaggtaaaatccccgcttcttctcgtattccgccagatccggtgcaaacaggacaagcggttttcggtagatcaggtaatcaaacatcgtcgaagaataatccgtgatcaggagatctgccagggaaaacagctcctctgtcggaagatcacagttggaaacctttccgtgcgcatcgatatgcggatgtgccttgatcacaacaaaccacgcatcgccaagttcacgcgcggcgcgtttcacatcctccgttccgacaagatacggcatcgccgcatttccacggaaggttggtgcccagacggctatcttttttccacgtgcctgcggatactgctccagaaatctttcacggcatttcgtattccagtctgcatcaaaataataatcggtgcggctgatgcccgtcgcacggatccggcttttatcaaggtgcagtgcccgcgcatgcaccggcacacagaccggtgcgctcatcgtcagatacgtataattgccgaacatatctccatgataatttttcgggatatcgtcccccgcatcaaacgcgatctttttcatcaggccacaggaatgccaaagctggatcagcttcgtctcctttcgctttttgcatgaggaggccggaaggaaataatcgcagataaatacacattctgcctgcgcatatgctttcataaaccgaatcagaaatgcagccatcgccccgaatgacaggtgtgaaaaattcgcaatgaacagttccggctcatacccgcgttttttcagttcctcccatacgcgccgcatggaaaacggcatctcatcgtgatgcgcatccgccatcagaatccgccccggctgtaccggttttctgcggtaccacccgtaaacgacgggcagcagtacattctgcagcagcattttgatccactgtctgattcgaaacatgaggcattttctccttcctgtctatcctgcaaagcgtgatctgttccattcccccaaagccggagaatgcttatcttccatacgtccgctgtcccctctgcgccattttcaccgatgcgtccgctgatactccagcgcatcttcaaaaattctccggcagttttcgtgatccccaaaagcaaaaaatgcatcctcacgcacacggtacgcttctttcagtgcacagccggattccagataactgcacagttcctctaccagctcatctacgctctggcagatctcgccaaacccctgctcctcataggaaaaacctccgtctgaaaaatgcggcggcagtgtgggcggctggaaataaactaccggcttgcgcatgtaggcaaagtcaaactgtacaccggagtaatccgtcaccatcaggctcgactgcgtcagaatctcctcgtaattgatctccgttgccgggagaatctttacatttccgctcactttgaagtcctctttctgcgcacttaaaatcggatgcagcagataaatgatccgatagccggttcgcttcgccgtctccttcagcttctcattttccagaagctgctggaagacacggtaatattccgtgtgcttaaattccggattgtacgatcttgaggaacccatcactgccggcatcgcaatgtaggcccgccacgtcggcgtgatcaggatctgcttctgctcacggttcaccaggccatcataccgggcaagccctgtcagccgcagcacctcccggtcgtaatcatactccggtccggaaagattttcaatctcgcacggcgatgcacagtaataccgtttgttgttattgatgatccggttggaatccagcgtcagatcctgcaccgaaagcccatgctgaatgcaggtgttcgacgcttttaagagatcctgtacaaaccgcacttcccacttcgagaatccgcaaaatccatgtacgctgctgtgcgttgcaaagatcatcgaagcatgcaggtaaatcagacgctgcctccatgtcagatagtacagtggatgcagcccctcctgcgccaggcgttttccgtccggcacatcacttcggatgatatagtacgggtccacttcgcctctgcgcgtcctcatatagcgataaaaatactcgccgcagtcgccgcccttgtaaagcttgtcgaacgtcagccagatattttttctgccatatatgggttttgtcagccagtacagggcacgcatggcaaacattttctttgatccgtacggcgcggtcgcgatctcttttaagagggcaagctcgcggcgcaggcgctgtgcttttcctgccctgcagattcggatcgccagaacgctgtttttgtccggatcgggacatccttccggactggtttttggacttttcaaagggctttctccagaatccatctgccgctccagcgtcaccatatcattttcaaaacaccagtacgaatttttcagctgcattgtcaccttcgactgatagtcaagcgtgatgaccggcagccgcacttccctggtcccatcaaaggcccagaaggtcagatctgacaccctgccagataattccaccggcagatccgctgcaaacggtgctttcactccgatcttctctccgaaaaaaccggctccgccaaaccgtttcgtaaaatgaagcggaactgtttttccatcctgcttcatgcgaagttccatgtgctcctgtctgatcagaaaacgatccaccgatgcatcaagatgcagcctgccattttcatattccagaagttccagtgtcacaaacgggcaaaaatcaagttctgaaagtttcagccccggaagctgcccgtattttacatcctccagtgcactccagagaccgtgggagatccgccgctccgggtgcgccttttcatcgaccacaagcagttctccggatatcttccgcagacagctgccgcagcctgataaaaacgtgcgcagcctgtctccctgcagcacatttttattctgctttccggcgtttgcgctgaaaaaaatttcgatctccgaaagcgcctgtgcctgcaaaaaaagagaaccatccgccgccagaagcgattcgatccgctgtagcctgcgcgtataccagccgccgtccagccattcctgacgaaatccgtcgagatgcggaaagatagattctgcataaaagtaaagattttttgcaaatgcaaccgtctgctttcgcccaagtacctgacacagcaagaactcatcccagccgtcctctccgatcagctccggcagctcttcacgaatcgcatcggtacaaaaaagaattccgtgcagacttcccggaagacgcaggatctccttcgcttttgtaagagaaaccactttcccaccggcagatgcgccgtcttttgccggcgttttgcgcgtcacatgctcacacagcaccgcatccgccgcatcctgcaccgatgagagatactgcacggcctgctccagcgcatttccatgccacgtttccccggcagaaatcacggtaacaaactctgtagtgacctgtgctgccgccatagcggcatcgcagcaccacacgatgccgcaatcccattttcccgctttctccttcgccgcagcttcggatgtatcctccggtccttttcctgccatgccataactggagttttctgcggcacccctgtcagcactaacactctcaccacagcttccatcctgcccacggcgctccagcaccaccgtcttcacccgctctgcgtaagaatccccgaaggacgccatcgtcttattcagtttttcctcgtcgccgtcgtaacagatgcagacggtgatctgctttttttcactcatcagccaagttccttctccgatgcatccagcgctgcgcggatgaccttgtccatgtcataataacggtacagcccaagccttccgccaaagatcacattttcttctttctcggcaagttcgcggtacttctcatacagcgctccgtttttctcgtcattaaccgggtaatatggctctgatcccggcccccactcttccgaatattctctggaaatgatcgtgtaatccttcggatttttgcgctcctcttccggtgcaaaatgcttgtgctcgatcacacgcgtatacggcacatcgcgctgtgtataattgaccaccgcgttgccctgataattttcttcctcgatgcgttctgtatcaaaacgcaccgtacggtactgcagatgaccgaactgataatcaaaatactcatcaatcatgcccgtgtaaacaactttcttaaactgatccgcatgccctttgcgatactcaaagaaatccgtatcagtcatcacatcgatatcctccagcagcttttccaccatctgtgtatagccgccgatcggaatgccctgataccggtcattgaaataattgttgtcatacgtgaaacgcagcggcagccgcttgatgataaacgccggcagttctttacaatcgcgtccccactgcttttccgtgtagccgcggatcagcttttcgtacacatccggaccaaccagggagagtgcctgctcctccagatttttcggttctgtgatgtgcaggtctgcgatctgagacgcaatcttttcctttacttcctgcggtctgcggatgccccagagctggctgaacgtattcatattaaatggaagattatacagctcgtccttgtacaccgctaccggagaattaatgtaattgttgaactccgtcagcttgtttacgtaatcccaaacctctttgtcgctcgtgtggaaaatgtgtgcgccgtaacggtgcacctgaatgccgtccacattctcggtatagacatttcctccaatgtggcttcgtttgtcgatcacaaggcagcgctttcctgccagcgccatctcatgtgcaaacaccgcaccgaacagtccggcaccgacaaccagataatcgtactgttttccttcttctctcatcttttttctcttcttttctttgtttgcatgtgccgttgcttcctgctccgccagatatgcatcgcacaccgggcctgactctccgctcatgcgcatcacacctttgtccagccagatcgcatgatcacaaagtccttttactgtctgaatattatgggaaacgaataaaagcgttgtcccgcccgccagcatctggcgcatccgctcattgcagcggcggcggaaattgtaatcgccaacctccagcacttcatctacgaccaggatatccggattgaccaccgttgccaccgaaaatccaagccgcgctttcataccggaagaaaaattcttgatcggggaatcgagaaacttccggatattcgcgaagtcgacgatctcctcaaaatgctcctccataaattttctggaatggccgagcaccatgccgtttaagaaaatattctcccgcgcggtcagattgccgtcaaagccggcgccaagctcgatcagaggcgcgatgcttccgtgcttcgtgatcgtccccttatacggcttcaaaattccgctgatcgttttcaaaagcgtcgacttgccggaaccgttcgttccgatcagcccccatgcctctcctttttttactttcagggacacgtcctgcagtgcaaaaaattcctgaaacatcagctcatgctttagcatcttaatcgcgtactccttaaggttatccaccttctggctcgcgaggttaaatcttatccacaaatgatccacgtctactatataatcgtgatcgtccataaattcctccattgtgtaaagcgaatgttatgttactgttcagggcttcgctttgaacagtttatatatagagaataaacttgtccttcgatctctggaagctccagattccgaatgcaagcatcgcaaatgcgatcagccaaccgccggcaaatacccgcatacctggaaatcttccataataaatgagatcccggaactgagtcacgtaatagtacagcggatttccatattttacaagcgtctgcagatagcccggaagtacgtcgagcggatacatgatcggcgtcagataaagccatgcggtcagtactgcgctgtaaatgtattcgatgtcacggaaaaacacatgcatctgcgcaaggaaaaatccaagcccgcagcagaacagatacacctgcacgatcacgatcgggcagagcagaaattccgggtaaaacggcgctcttgtaaagatcattacaatgatcagcgctcccatcgacagcaccatgtccaccatgcagctcgtcaccttcgataccgtgaagatgtattttggcatatagacttttttcaaaagcggtgcgtttaccgtcaccgatttgagcgcgttcgtcgtgctcgccttcataaaatcatacagaatccggccggtgaaaagataaaccggaaaattttcgatcgatttctgaaataaactagaaaatacgagtgtcagtacaatcatgatcatcagcggattcaagacactccatacgtaccccagaaaacttcttcgatatttcagcttcaggtcgcggctgaccagcgcaccgatcagatccttataccggaaaaatgtcctgacccgatatctcagcagattcattcttattcctcctgcattttttatcatctcattatcttaacatactgcgaggcgcatttcaacgccgcttttcttccggtattcttaaaaaagccgaaaataaggcaaaatttatatgaagccgcacttttgaacgccatatttctgcttatgaaaaattttttcattgaaatcaaaaatgagccaaaaatatttgtgatccatttccggacgtgtttataagcgtaaataagcaggatgtcccgccatatggcggttcatcctgctctcaatcactcacgcaaagcggttcctgaaagtccgctccacagcctgcgtttctgtttccttttacgcatcactgtactcatttatttcgtttcttttgcatactttccaataataccaagaataatcttcaccgaaagatccatgccctcgaccgtgatatgctcatacggtccatggaacgcataaccgcccgtgccaagattcgggcacggaagtcccataaaggaaaggcgtgcgccgtctgtaccgccgcgtaccggtgaaacatccggtgtcagccccagttctttcatgacttcctttgcatgatcgatcaaatgcatgcacggttttattttttctgccatattgcggtactgctcatggatttccagcttcactgtacctttgccatatttttcattgagcaccttttcaatgtgccgaagtgttttctccttcgcctcaaagcaggcactgtcatgatcgcggacaatataggacagctcggcatgctcgacattaccagacataccagtcagatgataaaatccctcatacatctcggtatgctccggagattccagcttcggaagcatggaattgatttccattgccacgatcgatgcgtttatcattttatccttcgcatcacccgggtgaatgttcacaccgtttatcttgaattttgcactgcttgcattgaagttctcataaacaatctccgtctcaatgccgccgtccacggtataggcatagtccgcgccaaatccctgcacatcaaacagatccgcgccgcttccgacctcctcatccggtgtgaatccgatacagatctttccgtgcggcgcatcgcttccaagcagctgctccaccgccgtcataatttccgaaacaccggccttgtcatctgcaccgagaagtgtcgtgccgtccgtcgtgatcagtgtccggccttttaaggtctgcagatgcgaaaactgcttcggtgagagcacccggccgctgtgtccaagcacaacctctcctccgtcgtaattttcaatgatctgcggtcttacattttctccgctgaaatcaggcgccgtatccatgtgtgcgataaaaccgatcgccggtgccatctcacagcccggtgtcgccggaatcgtaccatatacataacagttcgcgtccacacgcgcatcctccacgccaagttctttcagctcatcgaccaggcggtttgccaggtcaaattcccggtctgccgacgggatctgctcctgatcctccacgcttgtcgtatacacccttacgtaatccagaaatctctcgtatgcccgcatttttctatctgcttcctttcgtctttctcatcagccttttgcttttttcttataattgatatagtccatgatcagatccaccgctccgtcgataccgacttcgctgctctcaatacagaggttgtagcttgatgccgcaccccactgcttctctgactggaaattgtaatagtttgcgcgctttttatccgtctttacaagcaagtcacgcacttttgcatccggaagcttatactcctctgcgatacgcgccgcacggaaatcagaatttgcgtgaacaaatacgcttaccagctccgggtgatcacggagtatgtaatctgcgcatcttccgacaatcacacacggctcgccgtccgccagcctgcggatcgtatcgtagttcgcctgatagatctgctggtcaattgtcggtcccgtatacatcacagacggataaatatccatcacaatcgaatacagaaggctgttggtcggcttctcatcgtagctctccagcactttctcacacagtccgctttgttttgcaatcagcttaatcagctctttatcataaaatttaattccaagtttttttgcaagcttctccccgatctcatgtccgccgcttccaaactgtcgtccgattgttataattaaacttttctgcatatagaacccctcctgccatatcttatccgtttatgatccgtaaggacaccgtgactgtatccagccgcatccggcatccaccctgcagataaaatttcatttcatctgccttcgaatcatatccgttccgtaccgcccctgcggcgtagccttttccacctatagtatagcacatccgtctgtatttgtgcaaaaaaattcgaatatttaacgattttttatttctttgcaggttatttcacaaaattttcagtttttcaggctatatcctcaattctttttcccactgccgaaatcttttccaaacaggatgataaaatcattctcatcgtatcgccgtttccccatcttcatctttcgaaaaaaacggtttgacctctggattgccttcccgaccatttcgatcacatctttgattgtcacttccgtgccgttctccaccgctgtcgaaatcttttctgcaagcgcatcctgaccttcctcaccgatcacataatcctgtgcattcgcgtagatctgtccgaaataaatcagctcctgcgccgtatactgcggaatgtagatctgcgccgtatacttcatcgtaaaacgtggatggctcatcagcagttcatgcacgtacttctgctcatcctccagaattacgatcagtccgtccgtgcggaactccatcgctgtcgtcagctgttcgatcgtattgtcatccagatcgccggcctcctcaatgatcagcgtgccgcctgcaatcctggctacggtcgacgcaatatccttcttattaagatccgccgcataaatcttcgccatcttgaccacctggctgccgcggtcctgtgcgatcgcctttgcaaggttcattgcaagtgtcgtctttccagagccatgtgcaccgaaaatgaggatatttcctgtcttggaagtacggtcacttcccttggcttctgcctgaatgattgcattggcaatctgatcctccagctccggaatctgcgtaaagccagcaaacagactgcgcagatgctccggaatcgtcagatagtcaccgtcttcatacggtgcgtcatcatactcattctctgcgtaatcttcttcatatgccgcagcattatctgtctcatccgctccggcatcttcgtaattgccgtcatttgcatacgcttcctcttctgaaacgctgtcactttcagccgcacagtcaatatcctgtccttcaaaaccgtcttcttccggataagcatcatccgcatcctcgcctgcttcatattccatatcgaggtcttcatagccggtatcctcgccatacagatcatccgctttatcgtcagccatctccgccgcagctgcagcttcctgcttagcctgtgcttccgccgcatactcatccgcatctgtctgtccggcttccctgtcattttggatcgcagaagattccagaacctgctgcggtgcgtcctgctgtgccggtttggaggtcagcgaaagttcctgctcctccagctcctcgccctcatttcgggctgcggctgctttctctgaatagcggctgccaaatctgcctctgcgaaccggtttctgttcttcttttgcacccgcaagcttcttctctgcctgctctttcggaaggcggatcttctcctcttccatcagttcctggcgtgcagcttccatcagttcttcccgctccggcatccggatcgtactgcccggtgcctcctcttcctcatacgtcggaagtgccctgctgttgcgaagcagtttttccgggttgcttgtatactgcagtgcttctctttgtgcatctgtcagttcttcctgcacgacatccgccatcgtcgtcttcggcatggaagcacggcgctcttcttcctcacgctgccgttcttcttcctcctcgagacgctgctgctcctgacgtcttgcttcctcctggcgcttctgct

SEQ ID NO: 3532 - DNA, 29847 bp, Unknown
  16S sequences of unknown bacteria
atgacggggtctattttcccctcgcgagccttctgcgtgaggtcggtcccgaatttgaaattagcgagcgggcccttttccgcacgcgcgccgttttgcgctgcggcaggattggcggcgtacggctccgccgaaaaacggataaaggtcggcgcactgtactcgtcgcgcacgtctgtatcctcttcggaaaagcccatttccttgtcgagcgcggaaacgagcccggaaatatccgcgccgagcatttttaaaatgcggaaggcgatggaatcttcgtcgtcgagaatggcgagaagcatatgttcggtgccgaccatggcgcccgcgccgtcgcagagggcgaactcgcacgcgcgctcgaacatatttttggtgcgcggcgtaaagccggcgactttggtgttcttgtcgaggctgcgcacgaatacggcgcggtacgccccttcgttgacgcccgccgcctttaaaagtttacaggcgcggcactcaggcacgtttaaaatgccgaacaggatatgttcgctcccgatataactgctcccgaaatgcttggcagcatccgaggaaactttgatcgccttttgcaaattgatggtgaatttatcgaaataactcataaaagaagcctccgttatccttattttgccgcttcaaggagtgcggacgtacatttagccgcgcggcagacgttctgttccagttcgctcacttcgcggtcgctgaataaattgatattggcggggcgcacggcgacgatcaggtcgtcgatcttggatatatcgccgatgggcacatagcccagcgccgcgcccagttttacgttggagatcaactgcaggaattccttaaaagaaactttttcgcagttggtgagaatgccgaacgagcggcggcagtcgtccttgacgccgatgagatcgtttttgacgagttgttccctcgcgcgggcttccagcccgacgacttccaatacggcgttttccacttcggaaagtatggtttcctcctccacgcccaaagtcacttcgttgctgatctgatacatatacccttccgcaacgctcccctctccgtacacgccgcgcaccgtgagccccaggcgggaaatgtggtgaatgagattgttcatcttattgaggcgcgtgagtcccggcagaaagagcatgaccgaggcgcgtaagcccgtgcccagattggtgggacaggcggtcagatagcccaactgtttgtcgtacgcaaagcgtatggatttggacagcatatcgtccattgcggaaattttttcgtaggcgcggttcagacgaaagccgcgcaaaagatactgttcgcgcaggtggtcctcctcgttgatcatgatggagaacttctcttcctcgtcgatgagcgccgcgccgtattttttgttggcaatgaggtccgcgctgatgagatgatcttccatcagacagcgcgccacgatatcggaaactgcatccataaaatagagattgaacacgcccacgcggctcgcctcggtattgacgagtcggatgatctctttcgcctgttcggtatttttcagtttcgagggaaaaggatagcccgcgatattgcgcgcgagacgcacgcgggtggaaacgatggtgctttccagatctcggttgttaatcatcgctccctccgaaatcgcctctgtatattattttgttgatggcgcggatatctttgttgatgcggtcggcgtccttcatccgcttttctttgagcgcgcgttccagttccgcgcgcagcaggcgctgttcttccagaagttcgtaataggtgctctcgcccgaggggtgcttgcccttatgcgtcgtcttgccgtggatcttgcggatggcgggcatcagttcctcgcggaacgcctcgtaacacttttcacagcctaaaatgcccgttttggaatattccgcgagcgtcgtgccgcaattttcgcagcagcggctttcctcggaaatatccttcgtgaaaaaggaggcgaaaaggtcgggcccgaacacgggatcctcttgcgcccgcgcatagcattcctcgcagaggaacatttcttccacgcccgcctcggtatcttttttgatgcagtgcgccgcctgcctttgtttgcattgattacagagcatcagtcttgtctctcctgtatgagttcgagaatgatatttttgaggatctgcgcccgcaggcggtctttgatgacgatgggcgaagacagggaactgtcggacatcgccaggtttaaaagcgcgctttcgcgccgcgtgacgacgtttcgctcggcgagtgtttccagaatgctctgcgccctgcggcaggagatctcttccccgatctcgcggcacaatatttcgtttaaataaccgtccttgctgacgtcgatcttgcgtatttcgatgtatccgcccccgccgcggcggctcgcggtgagatagcccctgtcggcggtaaagcgggtggtgagcacgtaattgatctggctgggcgcgcagtcgaaatgctgcgccagattgttgcgcgaaatgagcacaacgccgtcttcggaaaacgcgtcgagcaaaaattgttctatcgcgtcgcagatattcatatgccgccctcctttatagactttctttgacctttgactatattatagcaccgagccgcccttctgtaaacgattttcggaaaatttgtgataaaatttttaaagccgccgcgaaaacactttcgcggcggcggaattttgttcaatccataaaaaaatcgcagcgcttcaactcttcgcgcaccttttccacggcgcgcttttcgatacgcgatatgtacgagcgggaaattttcaaaaacttggcgacttcgcgctgcggcagcggcgcgccccctttcagcccgtagcgaagacacaaaatggtgtattcgcgctcggtcaggacctgttccaacactttcatgaacttttctttgagcagtttggattccaccgtcttgaaaacgccctcctccttttcgaagagaaggtccatcagcgtcagttcgttcccgtccttatccacgcccacgggatcggaaagcgatacgttgttcttgtgctttttgttgctgcgtatcagcataagcatctcgttttcgatgcagcgggcggtataggtcgcaagttgggtaccccgccccggctcgtaggtgttgatcgccttgatgagcccgatgctgcccacggaaatcagatcgtcggtttccgccgcgccgttgtattttttgacgatgtgcgcgaccaggcgcatattgtgacgcacgagtgtatccttggcatttttgtcgccttcgcgcgcgaggcgcaggtacttcgcctcgtcctcgggagagagaggtttgggaaaagaactttttccgccgatggcggaagtgaaaaagaccaacttgcctaaaacggcatacagaaattcaaaaaacatacgtcacctcattgtaggtttaatgtatgtttttctctgcttgtactattacgccgcgggcaatttaggacaggcggagcctgttttttttgcgatggcgacggagcaggaagactgcggcacacgcggtgagtatctccgccacgggaaaggagagccagacgcccgtcatgtcaaagagcgcagagagcgcgaaggcggcgggaatgatgaatataaagccgcgcataagcgagatggcaaaagattcgcgcggcagatctatgccgccgaagtacaccgccgttacgatattgacgcccgcgaatacaaagcccgcaaaatacagatacagtccgtggacggcgatctgcgtcagttgcgcgtcgttgtcgcggttgaagatattcacgatggggtttgcgaacagcgcgccgaaaagatacgccgaaagcgcgaatcccgccgccgtcaagagggcgagtttcatcgccttggcggcgtttttctcctctccctgccccagatagcggctgaccacgggctgcaagccctgcgcgatgcccgtaaatacggacagcacgacgagcgaaatattggcgatcacgccgtacgccgcaacgccgacgtccccgttcagtcttaaaataatcacgttgaacacgagaatgaccagccccgaggaaagttccgtgatgaaagacgacacgcccagcgagcacatatcccccaaatgacggaaagacggaagcgcgcatacaaggcggaaagtattttttcgctgcaaaaaatgcacggacgagagcagtacgccgagcatgggtgcgaatcccgtcgcgagcgccgcgccgaacatccccatattgcatggaaacacgaacacgtaatcgagcgcgatattcaaaaaactgccgctgagcatggagatcatggcgagattgggatttttgtcgttgcggataaaacacagcatcacgttattgaccatgaacgcgggcgaaaatttgagaaaagtgcccagatagtcggcggtcatgtccagaacttcgccgcgcgcgccgagcgcgtaggaaatcggacgtgcgagaaacagcccgcacagcaggtataaaacgccgaacgccagcgcgaaacagagggcgctcgtaaatacgcggtttcctttttccgtttcgccccgcccttgcaagagagaaaagcgggtggcggcgcccatgccgatcatcagccccgtaccgtgcaggacgctgtacgcgggcagcgcgagattgagcgcggtcagtccgtcccgccccacgccgcgcgcgatgaaaaaagtatccgccaggatatagcaggaaatgcccaccatgcccagcacgctgaaaaaagtataccttaagaacgttttgccgacgcttgccgtttgcacccctaacctccataaaaaaaacgtccgatcatccctctccttcttcggcctacggaaagggcatcgaacgtgcagcggaagggagatccggcgatccccgcccgcttttgtttttttatcatgttaccatttttacggaaatttggcaagcgaatgccgcccgaaattcacgcttttttcaaatagcggagcatcgcctcgtacgtttcgccgctgatcatatgctcgaaacggcaggcgtccgcctccgcggtctcctcatttacgcccagcgcgcatagaaacgccgcgatatttttgtgcttttcgtacacggcttgcgcgtattcccgtccttcgtccgtaagaacgatatggttgttttccacttccacatagcctttggcgcgcaggatcttcatcgcctttgtaacggcgggcttggatacgcccagtttgcgggcgacgtccaccgaatgcacttccctttcggacgaggcaagttgcaataccgcttcgagatagtcttctcccgattcgttatcgatcatgcgtcctttccctccttcttgcgtttttcttcttctatccaggaagcgaggcaagcctctttatctgcagtcagttttaaaagttcggtaagttcctctatattgtccgcgcccaacacttcgatatatttatcgaaatatgcgagcagaaaatcatacttttcgtcgaggtaactctttcccgattccgtgagcagcaccgtcatcttacggcggtcttcctcggaaatatccatcgtcacatagcccttttcgcgcaatgtgcgcaaaatgatggcggtgcgcgcgcggctgatacgcagattgtcgctgatcatggaagggataattgtcgtatctccgctgacgtttaaaaaccacaacgtggcgagttctccctcgataaattcgcgcaggtgcgtgacgatatccattttattcatgcgccaaagttgctggatcagcgcgtcgcgcaatttttcatcttccatcagacagttcctctcctgtgtttattcgttggactttaaggaatccgccatattgatcttattgagtttgatcagcatgaaagcatagacgattcccgcgaacagtaccgtaagtcccaacgaataaaaataacttccgacgccgatgacgctcgcaaacatcatggcgacgccgttgatacgcgtgaccagaaacatatgcagaagtacgccaagtcccaggcccaaaagcgcgccgatgacggtcagaaccgcgctttcgcggtaaatataacctgcgacctcccgcttgcggtagcccagaacgcgcagcgtcgcgatctcccgccgcctttcgtcgatatttatattcgtcagattgtagagcacgatcgccgccagcgctcccgcgcagacgacaaggaccgcgatcacaaagcccatggtctgttccaatccctcgtaagtctttctgttgttagccgtgaaggtgaccccgtttaccccgctgtcggaaaggagcgttttcgcaaggtcgtcgtaatcttcgggggagatccccgtcttgacgaagagcgtgttgtctttcttttctccgaacagttcggcgtaatacgcgctgtcgacgtacagataattacccatataattttccgcgatcgccgtaacggtcaaggtttccttcgttccgtcggaacgcctgtaaacaatggaatcgccgacggctaccccatagccgtccgctatattttccgaaatcgccaccccgtttttactcaaatctattatagcagactttttggaattacgcaaggctaaaaacgagttaaatttttgatcgtccgcttttacggcgtaaagttctaccgattcggtgaatttttccccgtctttttgcagttccacgtgcccgtcttcaccgtacagcgaaacgtaatcttcgcaatccgttccttggagaaaagattcgagcgcgcctccctcgtcgatggcgctgtactccacgagcgcctcgtattgaacgatctcgttgaactgcgtgtcgatggcagccgttaccgaatcgttcagcccgaaccctacgagcatgagcgcggtacagcccatgaccgagagaattgtcataaacatattccgtttatagcggaatatattgcgcagcgtcgctttatacttgaatttcaaatgattccacacgaatccgacgcgttcgagaacgatgcgtttgcccgctttgggcgccttgggctgcatgagttgggaaggcttttctttgagcgacgagcgtgccgcaaagtaagtgaccagcatggtgcccgccagcgccacggcgagcgtgatgacggcgaaccaaggggaaaacgcgagcgagagcggcggcagatagtacatgatcttatatgcctgccagaagatggtgggcaaaaggctgaatccgaacagcacgccgaccacgcagcccacgatgctcgcgatacagcagtagatcatatatttagacatgatgcgcccgttcgtgtagccgagcgccttgaacgtgccgatctgcatgcggtcctcttcgaccatgcgcgtcatggacgtgagcgcgaccagcgccgcgaccacgataaagaatacgggaaaaatacccgcgatgtccgctactttttccgcgttcattccgaacccgatataacttaaattcgtggtaacgatatccagcacgtaccattccgcggcgggcagatctcccgcgagcgaggcgaatttttccagttcggcattgagcgcgacgcactgctttgcgccgagttccttgtaatcttcgatgcgccccttgacgaaatcttcgaaagcgggcgtaaacgccatccgttcgtccgaaccttttaaaagcacggatatatccgtgtacatggaatgcccttcctcttcgtaaaacagattgttatacaggtatttgaagagcatattgttcgtcaggtcgaaaacgctttcctgcgcgtaaaagatcgtgccgagaacgcccgtgccgagcgtggtcacttcccgcgcgtcgaaataataataatcgggcgaggaaaccacgccgacgacttcgaacgtcgattccgtaagcacggatttgctcagaggcacgtcgaaatcgagcgtcgtatcgcccgtcaccgtaatcacgtcgcccaccttcacgtcgagaatataattcgtctttcgctgaacgacgacttcgtccggtttttcggggaaacgcccttcgaccaacgtcaggcggttgacgccgccgtcgccctgcaacgccgcgaaatcgaccgcgttgacgcgcgcgatggtttcgacgtccgcctccccgccgcgcgtgatcgttacgggcgcgtctgcggaagtgtaggcaaaagcgcgctcggtgagcgcttttccgttctcgtcctgtaaagcgagtacttcggcgacgtcgtcctcggaaaaagcgtagaccgatttgagtcccagatcgaacgcggcgttttcctcgtaatatttgtccatggaatttttcatgtcgggcgtggcctgcatcacgccgatcatgaaaccgacgccgagcgcgatgatcgccatgatggcgataaaacgcccgaaccccgacgtgaattcctttgcgattgttttggtaaatcttttcatactaacaccgcccgtaaggaattatttttaccattcgatgacatccacgtcggcgggatgcgcattgagttcttcgccgctgactttgccgtttttgacgtgaatgacgcggtcggccatgcgggtgatcgcctggttgtgcgtaatgacgatgaccgttttatgattttcgcggcagatcttttgcagaagtttgaggatattttttcccgtttcgtagtcgagcgcgcccgtcggctcgtcgcaaagtaaaagtttgggatttttcgcaatggcacgcgcgatggaaacacgctgctgttcgccgcccgaaagttgcgcggggaaattgctcatgcgctcggacagccccacttcttccagcgtttttctggcgtccagcggatttttgcagatctccgaggcgatctccacgttttcgagcgcagtcagattctgtatcagattgtaaaactggaatacgaacccgacgtcgtagcggcgatagtcggtgagtttccgctcgttgaagtcgctgatcttcacgccgtccacgaaaatctctccgcccgtgacctgatccatgccgccgagcatattcagaacggtcgtcttgcccgcgccgctcggccccaccaccacgcagaattcgccctgcccgatgctgaaattgacgtcgtccgccgccttgatcacgttgctgcccattatgtagtgcttgctcacgtttttgaattccacaaagttcatattgttccctccgaagatgttgtcaccctatgtaacgtcctttttgacaaagtcagcgcagtctgttacaatatcactaattgtttttactgctaatcaatttcatttttattatattctaaagatgtgaaaaagtcaacccctccgcggttaaaattatgtgaaaaaaaagcgccgtgaaagcgcttttttcccaaagattaataatcgtatttggtgaatctcaggtatccgcgggcgaatacggtcgaaataatcagccagattgcggcgagcgcgatgatgacataggtaatgatcgcaccgatacttctatctcccataaacacggccgaaacgagattgaaattaaaggccccgtacaatccccagttaactgctcctaaaagcacgaggatgtaagaaactaaatttgcaataaacattttccacctccgaataacagtttgcgcaacaatccctattctatacgccgcgaaatctcttgctttttgcgcgcatttcgtgtaaaatatataatacgcgagtgtgttggaactggcagacaagatagacttagaatctattgcttcggcgtgcaggttcaaatcctgtcactcgcaccaaaggcgcggaagggatcccttccgcgcctttttcatgcgtccatatattgcgagagcgcgttatttttcaataacgacgcgggcggggcgaaatcgacgattttgcccccgtccatgacgcagatataatcgtatttttccaataggtctgcgtgcagtttatgcgatacgttgagaacggtcttatcccgcagcgccaaaatatttttttcgacgcggtaggcggtttccttatcgagcgacgaagtcacttcgtctagcaacagaatatccgtgtccttgtaaatcgcgcgggcaagcccgacgcgctgcttttccccgcccgaaatctggttgatctcctcgctgatctgttcgtccaaaccgtttttctgcgcgagcacgaaatcgcggagttccgcaatttcgacggcgtgttccaaaagttgcgcgtcgcccgtcccgttgaaatcgatattttcacgcaccgtaagatcgaacagataacttttctgctgggcaaacgcgatgtttttgtagagttcgcgctcggaaatatttttgtaatcgacgccgtctatctcgattttcccgacgtatccgttgaaagtcttgccgatcagtttcaacagcgtggactttccgctccccgactttccgacaataagatatttttttcccttttcgaatgcggcgctcacgttttttaaagtgagatcttcatgatcgggatagctgaaaccgacgttttcgactctgatccctctctcgaaaccgaaaagtttttcaccctgcgcttcgggcggctgcgccatcgcgagcaaagtttcatcgagttcccttatccccgaaatgagcgcggctttgcccgcgatctgcatgagcggcgaatacatattgccgctgagttgcaccaccgcgatgacggcgccgatgagaatgaccgattgcagcatcatatagcccgcgatcgcgatactgcccagttgcaggagcaccacgataaaaattccgacgtcccccgcatacaaattcagtttgtcgagcaccgtgttctttttgcaaagcgtttcgttgatacgcgcgatctcgcgctccgtccgctcttcgctgccgaaatttttcacgacgtcgatcccgagaaaggtctgtttgagcgcggcggtatattgcttgacggcgtcggacaaccgcacgttcgcgcggttgagcggcttattgaaaacgacgggcacgatgaagatgagcagcgtgagcccgagcatggtcaaagcgaccacgtaattgatgaaaaacgccgcggcaaccgcgaaaacaaatgtaaatatttcttcgggaagtgtgatcacggaattaaaaccgcttacggcaacggttttgatatcgtttgtgagatgggaaaggtatttcgccgtgtcgttcgaggcgaaatcttcgtagcgttcgtgcagaaggctgtgcgtcagatcattgcgaagcagcatgaccgccttgttgatatatgccgtgctcgctttatcttttaaaagcaggatcgcggtgaataccgcgacgtacccgatcgctatgcccacgcaaaagaataactgatcggccgtcgccccgtcggcagtgatcgtgttgaccagccattgcaaaatgagcgcgaaacctacgaacgcggcggcgtacagcgctttgaacaggacgagcgcgataaacttgattttactgtaaacgatgtaccgtttcattcgaccgcctccgcaagcgcgaccgccaaaggagccagagcgcccttttccatattaagcatattttcgacgacggtcaaaaattcttgcagacgaagaacggaagacgactcttcctccgtaaaaaatctgtcgttaaacataaactgcgcggcgatgagcagcgtttccacagtcgttttcggaaactgcacgcggcacagcccctgttcgttgccctcctctacgatatccgtcagaacgggcaccagacatagtacggacacgacaagacttttgagatgcaaaagttcgttgccctcctgatggatcgccgcgacgatgcgctgtttgaacaaactgtcggaacaactcgcctcgacgatgactttgataaacttttcgaccgcgttcagatcgctttcacgcccgattccgttcagtttcgccgtaaggtcgcgggtgtacatttcgatcgcctcgtccaaaagttcttcctttgatttgaaataatagtaaaaagtcccctttgcgatattcacggccgctaaaatatcgttgaccgacgtgttccgaaatcccttttccgcgaataaccgcacggcttcgtttacgatctcttcgcgccgttcgtccgcttctttgacaatcctcatagatgtggctccctttcaattgttatagaccgaccgtcggtctataaacattatatgtgctttccaaggaaatgtcaaacgttttgcaagaaaaaaaaggatatgcgtttcgcaaatcctttttatgtattattctttgatacccgagccgtagcggcagaaaaatccgtttttagagtggtgctcctctttttgccgatacatttccttttccgcgcgcaccatcagcgtttcgagccgaacgcccttgtcgtcgtaacaagagccgacggaacaaggaagattctgcgtttgaatatgttcgctcaactgccgcatttttccttccgtcttttctttgcccaaatcgggcaggaacagtacgaattcgtcgccgcccgtgcggaaaatatcaatattcggaaagacgtcggtcaaaactttcgcggtttcgatgagatatttatctcccagatcgtgccccagcgtatcgttggtctcttttaaattatcgagatcgagatagacgacgcccatattggcaaatttttctttgcgcaggcgcatgaccgtatccttgaaacagttccgatttttaagccccgtgagcatatccgtataactggcgtaagcgagttgctcgataaggcggcgcttttccatttcctgccagataaatttcgacgccgagtgcatgagcgtgcggttttcgagattggaagacggatcgtccaccccgaaaaaccccgtcacttttccttctttgaaaaaaggtaccgccatcaaactgcggatattctgcgcttccagaatgcggaaatcttcgcctttcggatccatttcgtcatatagcgaagatatgaaaaactctcccgtcttttcgaatttatcgatccagtcggaaagcagatcgagcgaaagccccttcagattatcgatttgcgaagtgacgccttccgagcaccattcgaaggtgttgtcagccacctttttatccgtatcgaattcgaagatataggagcgcgcagcctggtaaaaacgccccacgacttccagaaatcgattgaccgcctgggaaatttccgtcccctcagacagagcgctgacgcattccaacagcgcctgttcgctcgtcagttttttcgacagacgcatgatctcgtctttttgcagaaaaaagtcgtgcacgacttccagccgatactcccttccgtcgatctctatgatgctgtcctcgatcgaggcgctgcgtttaagcgtttcgttgaaatgttcccagcaatatttttcccctcgcacgagtttcgcgttcgtgcagtaaggacaaggcgagtttcttccctgcaatatctcataacatttgcggccgagatagtccttttccgactgcaagccgaacatacgcaatccgggatcggacagaaacagcatttcgtatgtttccatatcggagatataacaaaccatggagagatggtcgatgataaaagtattgagtttttcgcgtttcatgtatgttattctcccgattgatactatcattttacactaattttatgttaaaagcaagggcttttgccgctttctttttggtaaaataaaagcgcgcgtacgtttccatacgcgcataatctttacaggctgtcgggagaaaatttttcaacggattcgtttagacatcaaaaaaggtactctgcggcaggtctggatggcgagaatgcctaaaattgagcagcacagcggctggatgctgtccagcgcgaggtttaaaagcgccgcgctccaccccacaagaaatacggagttgaacacgtaatagcctgcgagcatccataccgacgcggcgaccgcgccgagtacgcagcgccaaaatgtaggctcttctcccgcgatcaaacagaaaatgagcgccatgaccgccttgatgatcagcgtggcgggcgcgtatacgggaaaggcgatgacgtcggccagcgcgctgcccattgcagacgcggcgatcgcatacggtttttttaagaaaaaacaggcaagaaagataaacgtgtcgcccagatggatatatcccgtgagcggcagcgggatcttgacgaatgccgtcgtgaccatgacgagcgccatgaacagggcggcgaccgccagcgatttcgttcgcataacaaattctccttataatacagaaagccccgcacgggaaccgtacggagctttttcctttggatttacaccacgccgtgcgccatcatcgcctcggcaaccttttcgaagcccgcgatattcgcgccgacaacgtaattgccctcaaagccgtatttcttcgccgcagcgtcgatatttttgaagatatttaccataatggtgcggagtttcgcatccacttcctcgaaagaccagaagagcctgccgctcgactgcgccatttccagcgcggaagtcgcaacgccgcccgcgttcgccgcctttccgggcaggaacacgacgcccgcctcctgcaaaatatgcgtcgcctgcaaagtcgtgggcatattcgcgccctcgcccaccagcgtcacgccgtttttgacgaggatctttgccgattcttcgtccagttcgttctgcgtcgcgcagggcagagccacgttgcaggggatcgtccagatgcccttgcaaccctcgtgatattcggagcctttcacgcggtcggcgtattctttgatgcgtccgcgctccacttccttgatctgtttcacgacgtcgagccgaatgccgttccgatcgtaaatatagccgttggaatcgcacatcgcgaccactttcgcgcccaactccatcgccttttcgcaggcatagatcgcgacgttgcccgaaccggagatgacgcaagtcttacctttgaggctgtcgcccctgctcttcaacgcctcttcggtgatatagacgagaccgtagcccgtcgcctcttttctcgcaaggctgccgccgtaggagagcccgcggccggtgagaacgcccacgtgttcgtcgcggatacgtttatactgtccgaacaaaaacccgatctcacgcgcgcccacgccgatgtcgccggcgggaacgtcggtatccgcgccgatgtggcgatagagttcggtcataaaactctggcagaaacgcatgatctcgttgtcgctcttgcccttgggatcgaagttgctgccgcccttgccgccgccgatgggcagccccgtcaggctgtttttgaagatctgttcgaaaccgagaaatttgatgatggaaagattgacggaaggatgaaaacgtaggcctcccttataaggaccgatcgcgctgttaaactggacgcggtagcccttgttcacgtgcacgttgccctgatcgtccacccaaggcacgcggaaaagaatggtgcgttcgggctcgacaaggcgttccagaagccccgctttttcataggcgggattggcgtcgatggcgcattgcaaactgttcaacacctcggtcgccgcctggtggaactcaggctcgttgggattctgctctttcaaacgcgtcaaaacgctctctacataagacatggctaaataaactcctttgtttagttcaggattattttagcattttccgcgcacgaaagcaatcgttgccgcgcacaatatctattcgaaattattatatctcttataactttgcgttaacgacttcaataacgtccgtacttatgcgccgcgttgtacatggcgaccacgttttccacgggcgtattatcctggatctgatgcgtgggcgcgaagtgatagccgcgcacttgcatcatgatttccagcgtgtctttgcatacctgctcggtctgcgcggcggtgccgtaggcgagcggacccgccgtggaaatacaaccgcggaaattcagcctgccgccgaaagtctttgcaagatacgcggggctcatgttcacagcctcgggctgcaaggtatccacgccgcgcacgcccatttcgatgaaatcttcgtaagcccaactgctgctgccgcaggtatgcacgatagcgggaagacggtaatgctttgcaaggtcgacgaaagttttgtgaatgggtttgatctgcgcgcggtatagttccaggctgatcatgggcgcgatctgtgtgccgagatcctctcccagccagatgaaatcgagatgatctttgcatttttccacgagccgttccatcatgcccaactgaaacgccgccctgcggcggataaagcgcatggctgcctcgtcgtccagcatgacgtggcacaatacgtcctccacgcccatgatgcggccgttggagttgagaacgtcgggcacgccggcgctgccgacgtacaaccccatatcttttccgtacgccttgcactgcgcgagcgccgcgtcgtaatcgaaatcgtcggggtcgggaacggggaaatcgtcgaacatttcgtccgtcgcgtctttcaagggaaaatcgcagaaatcccaatatccgcccgtttcgtgttccacccagcgcatcacgcacccttcgagcgggtctacccgcctgttctcgggcgcgcggtacagcggctttccgatatagggcgcggcaatgccgcggtaatcgacgcccagtttttgcagcagcgtttcgtagtcgtcctcccgcacgcccagcgcgcggcaaaggttgcggtgaatgacggggttagtgtcgtaaccgatggtcacgcggtcggtcttttcgtattcgaacgtgcggcgcacgcgctctttcgcgctcatgcgctcgggtgctttcagaatttccataaacgatcctctctcgctttacttttatctctctttattatataataaaatcgaactgtaaacaatgcactaaacaacctaaaaattatagtttcgcacaattatggaatcatttaccgcacaattcagagtgatcaatcatttcccctgcgaaaagggattttccacgccgccgcgcgtgttcgattacccctatcttttgtacgtgcacggcggcaggggcgcgtataaagtgaacggccgccgctacgaatgcgaacggggcgatcttttttattgcccgccgttcgaggaaaacgtcatttttgcggacgaatacgagccgtttattctctcggggctggaatttaccgtttccgacgtgcactttctgaacgagaatatgccgcggcgggcgaacctgaacgacgatccgttcgcggcgagttgcattttaaaaatgatcgacgaatacctgtacgacaagacgggcgcgggcgagatctgttcgcaccttttaagcgcgcttttgctggaactgttccgcgcgcagacgcgaagcgcggcgcccccaaaacgccccgcccgcgaaatcatgcggtatctttcgcagaacgcggcgaaaaaggtgacgtacgcggaactttccgaaaacttccactatcacaaaaacaccatcaatcggcttgtgaaagaggcggcgggcgtgacgccgaaagaatacgcgatccggcaaaagatcaaagaggcgcagaaatttctgtgctttaccgatatgagcgcggaagagatctcgcaggcgctcgggtattcctccccctgttttttcagccagcaattcaagcagaaaacgggtttcacgcccgcgcagttccgaaaccgcaacaaaacgccgtgaaaaaatttcacggcgttttgcagtagaataatatatcggagaatgtgtaatcattttctgcgcggacgggcataaaacgcgcgttcgctcacgttcagccccgcaagaaggctgaggctttcgatcatttcgtccaactcgtcgcccgagcccgcaaacgatccgaataccatcgcgcggcgggcgggcacagcactttccgcaccgagcacgcgccgaacgcgcgaaaggtacgcttgcgcaaaatcgtcgtcaagacgcgcgatttccgcgtgtctttcgccccgcgtgactctgtgttccccaaacgacagagcgggcacatagcacgcgcttttctctcttttcatccgttttacgagcgaagataaaattttcataacttgtcctcctgtttacgcgcctattataacaaataatacttgacagatattgtcatatattctaaaataattctaaaaagttttcaataaaaggcggaaatctcatgaaattcgaagtgatgctgggcattttgttccgattgctgcgcagaacgaaagcgagcgcggcggaattggcggatctttacggcgtttcgcagcgcagtatttatcgttatgtggaagaacttatcgtatcgggtgtcccgataaatattatacgggggcgcaacggcggaatattccttcccgatacatataaattgcctgaaaattttttatccaaggaggaatacgccgcggcggttggcgcgatggaagttttttacgcgcagacgcgggacgagagcctgcatgccgcgctggaaaaaatgagcgcgcagcagaaagaccacagccgaaacctgtccctttcgggaaatattttagtggacagcggcacctggggcgacgcctacaatttttcggaaaaactgaaagtactggaagaggcggtggaaaaaaatctctgcctggacgtttcctacatcaaccgcggcggcgaggagagcaggcgcgtcatcgagccgcacattctcgtgtataaacagaacgtgtggtacgtgtacgcctggtgccgtctcagggaagaattccgcttattcaagatcgggcgcgttaaggcggcgcggcggacgggcgagatcttcgaaaagcgccccttcgagcgggaaaagatccccttgaaattcaatttcgaatcgtacgaactcattcccgtgcgcctgcgcatcgaaaacgccgccctgcccgacgtagaagaatggctgggcacagacaatatccgccgcgagggcggcgccctcgtcgcggacgtgactctgcccgacagccccgcgctgatctccaaactcgcctccttcggcagcggtatccgcatcgagtccccttcttcgctcatcgaaaaagtgcgatcatacgcgcgggaacttgtttctttatatgaaggcaactaaaaaaaagaacggctgcataacagccgttctttttaatcttccaatatttgcaacgcgttgccgtaaaaaattttttcttcccataaagggggcaaccgcatggctttgagataagcgagcgtacgcgcgggggtatcccacgggcagtcggttccgaacagaacgcgctccgcgccgaacgcttctatcacttcgcgccccgccgatagcggaacgtactgcgaggaaaacgcggtgtccgtaaatacgttggcaaggggcgccagaaattcgacgctctccttcgccgagcgcattccgcccagatgcgcgaaaataaaatttgccgagggaaacgcttttgcggcgcgcgccatgcgcgcgggcgaacacttttcgggcggcgaaaacgccagatcggcgccgccgtggaagagcatggcaagccccagccgcccgcattccgcgtaaacgggaaaagccttttcgtcgtccgcaaaaaaattctgatattcgttatggaattttacgcccttgacgccagcctctttcaatgcgagaagttcctctttccagcgggcggaatcgggatgcaccgagccgaacgagggatggcgggcgctgttcgtctgccgcgcgaacgcgttcacgttgccctcgtttttcggcgacgtggcgatgtgcaaaagaacgaaccgatccacgccctccctgtccatcagcgccgtaagagagccgagcgtgccgtcggtatagtgcgggatatgcgcctttgcgcccagcgtttccaccgtgcgcgacgccagtttttcgggatagatatgcgtatgaaagtcaatcagcatagatcgtttttatgtttctccctgtattttttattgcgtttgatatagatcgccgcggcggtcgcggcaagcgcggcgacgacggcgacgacagccgccagcgtccagccgaatacgtcgtcggcagacagattttcgacgccgagcgtgagcagaacggtatcccccatggcctccaccgtgaatccgtccttttgcatttcccgcgccatagcgaaaaattccacgacgcggtcggaattttcatcgatacgcaggcgatatttaaagagggatacgacaatgccctcctccgttttgcgatgcgaataaccgtataagtccgcctcttcgacgtcgccgcggaataagaccttaaccgcgtactttccgacttcttcttcggttgcgggcatctcttccgaaacgatctcccacgggtatgctttgaacagcggcgcgtcctcggcaaaggcgacgaattcctcttccgaaccgaatatctccgtacggacgacggccgcttcccttcgcatatccatctgttgcagcacgacggcgccgacggccgccgcgagcacgacgataccgcaaaggagcgtaaaacttttggcgcggaagcgggcatagccgtgctcggacgcatcaaagcacttatttttgcccgctgccgcaaggcagacgggataaccgatcagcaagaacagcacggcgccgacgagcccgaacccgagcgcatagggaaattcgaatccgaaatgcggcgggataaaagcattgggcaggataaatccgaaagccgccgcgtctatcagaaggacgcgcgccgccgtacggaacaggtatttccgaaaatcttttagtttatcgccctctatttcgtccgacgacacgttaaaaagcaggcgcttatacacgacgacgatacatacggcggaggcgatgagcacgacggtaccgagaagaaagcccaacaggctctgatacgccacggcggcgagaacgagcgttaaaatcattgcaaagacggcaagcccgccgcagatccacgacgccgcgttcgccgtgccgcggcaccgttccagccgcagggcgagagatttttccagacgttcccgcgaaatcttttcgggctcgcccgcgtgtatgcgttccccgcgcaagagttcgtcgcaagtcacgccgtataattcggcgatggcgggcagcatggagatatcggggcacgagccgccgcattcccaactgctcaccgtcttgtttgaaacgcccagaatatccgcgacctcctgttgggtataccccttggattttcgcagaacggacaaaaattctcccatcggcaattttgacataaaattctccttttccgtgttttcttaaaagtctaacgcctacggagagaaaaaacaacacgagagagtcggaatttatctcatatccttggaatcggcaagttccgacttcaatttacgcacgatcggcgcgtcggcgggcgcccagttattttcatccaactcgtccccgcgtaaaaagtccgcacgttcgtgttccaaaacctgaaagtccgaaaggaagcggcaaagataggtttgcagcgtcacgataaaatcgggatattcgtgcgtcaccgtcatgtaatgggaaatcacttctatttttgcgcccatctcctcgcaaagttcgcgcgtaagcgcctgttcgggcgtttcgcccgcctcgatcttgccgccgacgaactcgtatttgtgcgcgacgtacgcgtatttgctttcgccgcgcatggaagcgagcactttcccttttcggataaagatcccgccgacgacctctatatgctttttcatgattccttcccgcccttacagaatttttcgagataacgcacgtccagtttccatgcgggcacgaggttgcggcggcgatggtcttcgttggccttgccgagcgccgcgcggtactgcgcatatgtacaaccgttcaccttttgaaaccatgcctccgcctcgcgctctcttcccatcaactgcgtgcgcccgatatggatcacctcgtggcaccggcggcaaaccgccaccacgtcggcaagtttctgcgtctgcgtgctttcgtcgtattcccaacgctcgtgcgcttccaagcgcttggcgggacagccgcagatcatgcatctcccttccgcacgcgcgtacgcgtctttccgcaccacgtcccattgggcgggcgtaagaatggagcgcagattgctgtaccaacaactgtcgggcaccagttcgaaattcaatttgtattccatatcttttattataaacctttccgaaaaattttacaacaaaaaagcctttcctcatgcgggaaaggcttttttcttatgccaccagattgagtttgtgcgtgacgatatatttcgtggaaaggaaacaaacggccgctatcgccgcgaaaaataagatcgacagcaaggtacttacatattgattgagttgatacagccacgtgtacagatccgacaaaaacggttgcagaaagagaacgataaaaaatataaccacataaaataaaacggtcaccatgctcttgcgcgatttggaaagttgccccacgcagatccccgtaaaaataaacaggataccgcttacggatgcgacgagcgccaggacaagttgttcagcaaagagcagcggatctttcgcgacatcatggaaaaattcgttgaagaacgtcgaccattgactgagcgagttctcaatatcgaaagatcggagcgagagcgaaaacaataaagagaaaacaaagaagagcagcagcgtatatatccataaaatcatagcggaaacgagtttcgcgacgattaattgtacgggcgtggcgggaatggaaaaagtcatataaccctcgcccgaaaacatcgtttttcggaaccgtttggcaatggggcctaaaagcatggcgatcacgccgtagatcaaaacgacgagcatgatgagcgacagcatccaataaaagagcgaattttgcgcaaacgacatgatccaggaaagaacggtcaaccccagtaccacgatggtcacgggccagaccgagcggaaataggcatacaattcgtgtttgatcaatttttttaccatcggaacacctccctgaatatttcgtccagacttttccctttttcgctgcgcacgatctccgcgtcctcatcgagcacgacgcgcccgcggttcaaaaagatcgcgtgcgtcaaaatgggttccacgtccgcgatcaggtgcgtgcacaaaaagatggtcgcatgcgcgggcttattggcaagcacggtttcgagaatgaaatcgcgcgcggcgggatcgacgcccgcgatcggctcgtcgagaatgaaaagttccgcttcccgcgccatggtgaggatcagccccaacttttccttattgcccttggaaagcgtgcggataggctgtttcagcccgattcccagcctatccagcatggcttccgccttttcccgcctaaagtcggcgaaaaagtccatggaataggcgagcgcctgctccacgcgcatccagttcgacaaaaaattcgtgtcgggaagataggcagtgacagatttggtcgcgggacagggttttaagccgccgatgcgcacttcgcccgacgtaggctgcagcatccccatcgcaagtttgatgagcgtggatttgccgctgccgttggggcctaaaagccccacgatcccccctcttccgatattcaaatccacgttatccagcgcgagcgtagatgcgtacgccttgcataatgcggaacattcgagaatgtttccgtcggtacggatctgtaattgttcttttttcaaatctctcctcccaataaaatgcttggatacagtataacacaccccgccgccgattgcaacgtatccgtgaaaaaaccccgcggaaattttccgcggggaaatgattaaaatgcagacatcagacccgaaacgagaatggcgatgaggcagacgggcgcgacgaatcgtatcatgatcttaaaatacttttcgcgcgcggacttttctttcagtccgatctcttcggtaatgaggcgcacgttggtaaaatatccgacgatgacgcacgttccgatggcgacgagcggcatcaaaacgctgttgctgataaagtcgaacatatctaagatcgtcttaccgttcagttgtatgccgttcaagacgccgaacccgagcgaagacaaagtgcccagcaccacgatcacgccgaaaacgataaaacaggaaaccaatcgtttgagtttgaaatgtcggcacaataccgcgacgatcgcctcgaagagcgatatggcggacgtgagcgcggcaaacagcaccaaaaggaaaaagagcattcctatgagatttccgaacgaggaaaaagcgccgaatacgttgggcaaaaccacaaacatgagcgaggggcccgaacttgccagatctccgtcgggattggcggaaaaggcgaagatggcgggaatgatgatgagacttgccacgatcgcgaacgacgtatcgcacacgctgatctgccgtccgctcttttggatattcgcgtcctttttcatgtacgagccgtacgtgatcatgatacacatggcaagcgacatggaatagaacagttgtccgagcgcgtccagcagcatctcccccgaaaatttgccgaaatcgggcacgaaaatgtaacttaaccctttccaggcgttgggctgacagaggacaaacaccgccagaacgacggcgaggattgcgagaatgggcatgaggatcttactgaccttttcgatgcctttctgcacgcctaacacgactacgacgaaagccatcgccgcgaagatgagaaaataaataagcggttcccaactgcccgaaataaacgtggcgaaaaagtcgcccgtcaatgcgcccgtcgcacccattccgttcatataggaaacgaggtatttgagaacccagccgccgatcacgcaatagtacggcacgatgatgacgggcaccaccagggagaaaaagccgaaccatttggtctttttgttgagttcgccgaacgcgcccacgacgtctttccccgtcttgcgtccgatcgcgatctccagaatcagcagcgcgaatccgaacgtgacggcaaacgcaatgtagaaaaggataaagatcccgccgtgccttgcggcaaggtagggaaagcgccacaaatttccaagtcccacggcggaacccgccgccgcgagcacaaagccgagtttgctcgaaaaaccgtgatgtttcttttcgtgcgcagcgcccttttcttcctgcactgcggcttgttcctggttttcgttctcgctcatacgaacctctctgttttttaattttctcgttatgcgtggaatttatacgccgcggacatagaccgacacgcggcgcttggcgttcattatactaaaatttgcccgttctgtcaatctttcccgcgggaaacgaacagattgttcaatgcggcgcacagcgcctcgaaggaggattgtatgatatcctcgtcgatgccggcgccccagcctgtttttccgtccccttccacgcccacgaaggagagcgctttggaagtcgactgctcgcccagcgaatgttgttcgtaggtcgtgagcgtgtacgctgcgccgaaatgttttttaagcgcgttggaaaccgcgtccagccgcccgtttccgaccgcctgcacgacgctcttttttccctgttccgcgacggtgaccgtcgcctcgataccgcccgcaagttgtttaaaatgacattcgctcacgtcgaacaagggacggttttccacgaaacgctccaaaaatacgcggtatacctcgtcgggtttcaactctttgtgcgtcttatccgatacgtctttggcggcgtagcccatcgcctctttgaatttgggaggaaggttcacgccgaagttttcctgtaatataaagcccacgccgccctttcccgactggctgttgatacggatgacgtccgtctgatattcgcggcccacgtccgcgggatcgatgggaagatacggcactgtccagaattcgcattttttgtcgcgccgccactgcatgcccttggcgatggcgtcctgatgggagccggaaaaagccgcgaacacgagcgcgcccgcgtacggctgacggggtgatatttccatctgcgtgaattccctgtatttttcgcagatctcgggcataaaggaaaaatccagttcgggatcgacgccctgcgaaaagaggttcatggcgacggtgacgatatcggcgttgcccgtgcgttcgccgttgccgaacagcgtgccttccacgcggtcggcgcccgccaaaagccccatttccgatgcggcgacgccgcatccgcggtcattgtgcgggtgcaggctgagcaccacgttcccgcggaatttgagatttttcgagatatattccacctgttgggcgaacacgtgcggcatggcgttttccacggtcgcgggtatgttgatgatcgccttgcggtctttcgtcggctgccatacgtctaaaacggcgttgcagacttccagcgcgtattcgggttctgtgcccgtaaaactttcgggactgtattcgaaacggtagttttcccccgcttcgtccgctagttttttcaataatttcgcgccgtccaccgcgatcttcaaaatttcttcgcggctctttttaaacacctgctcgcgctgggcgaccgacgtggaattatacacgtgcacgatcgcgtttttcgcgcctttgatcgcctcgaacgtcttgcggatgatgtgttcgcgcgcctgcgtcagaacctgcacggtaacgtcgtcgggaatgagatcgttttcgatgagggtgcgcaaaaactcgtattccgtttcgctcgcggcgggaaagcccacttcgatctccttaaagccgatctttaaaaggagtttgaaaaattcgactttctgaccgaggctcatcggttcgatgagcgcctggttgccgtcgcgaagatccacgctgcaccagacgggcgctttctccacgcacgttttttcagcccaatccatgctgcgcacgggcggcatggagaacattttggtatatctctgataatttttcattataatcactccttttcttgttcagaataaaaaaataaacctgttttcgtcttttttgaagacgaaaacaggttccgcggtaccacttcatttcacgcgatttccttcgcgcgctcttacaaagaatacttgtcttttccgacgcatatccctctcttgtaacggtgagataccgttttgcttctactcgtttcctttcgagcaaaccgctcggcggggagttctcccaaaaccattgaccgtctcgcatcatccgacggttttctgcaacccgtttttgagatactgttccgcttcacagcgtttccatataaaactatatgttgataacataatagcatatcccgcccgatttggcaaccgttttgttgaagatttttaaaaaatttctatttttgtcaggcgacgtttgcgtttacgcgcgagatattttcgtcgatcacggtgaaatccacggcattgccgcaactttgatgcgtcagatcgaatttcatcgtgatgaccgatacgagtatcatcgtgccgtcgagtttgacgagatcgtaataatctttgccttcgagacgggcgcgggtaatattcagcgtcagttcgcccaaggcggaatcgcccgcgatcgcgcccacgtcgagtttcagcgtatgcacgtcgtttgcgaaagaatagcccttcaccatttcgcccgcgtccttcgtcgtgcccgagccgccgtccgaggaatttatctgtttggaaatataacttttcgcgccgtcgctcagattgatcgcgaaaaagatctgatccatcgcgtcgcccgcaaattcttccagcgacattttgcggtactgatattcgggcgtgatcggtaagaaagcgtatgagatccaatttttcttctgccaggaggtagactgcacgcgcgtcatgtaaatcgatccgtctttgaacgtaatgtccgtttccgtatcgccgtttgttacgacctgcgtaccgaaaatagcgagaaccaagatattattataaccgttcgttttcagatttacgttcagatacggcgttccgtccgtctctacgccgactttcagttcgatgttcaccgtaaggtcgaggtctatccccaaaaggctcaatccgagcgaacctttgagttcatagcccgtatcggtatattgataggcgttgagcagatcttcgaacaacagcgaaaccgaagagatatcgatatacgttttgctcgtatcgaccgctatttcacccgctctttgcgccgtgatcgaaagcgaaagcgtttcgccgtttccgacagacagcccgctcagcgtgaaagaaatatcgccgttttcgtttgcgccgaacgcaaacaacgacagattttccgacagcgccgccacgccgtcagccgatacgccctgcgcctgcggtatgccgtcaagcaattttagaagatccgcaaactggatcgcactgaaaatacccgtcgtaaactgcgtttcgcccgcggaaaggagatgatcgatcagatcgtaatacggagcgttcgcgtccagtcccatgatgggcagaagcatatttccgatcttatacaactgctctacgggaatactgacgtacagcgcggtatcggcattgtagccactcaacgaataggaaacataagccgtttcgcccaccgccgtcatattgaggtaatgggagcctgcatcgattttctccgccgcatcgttcaacgcgaaggtatggatctcggcgcgaagatcgaaattgatagaaagttctgttcccgtatcggacgcgggcacaaattcgaacaatccgctcacgttcgcctgcaaaagttcggaatcgtattgcgccgaaacgttgaggtatttcgtatcgaagagcgcaacgtaagcgttgagcgcaaattcgaatacgttgccgcattcttccgcgcccgaaaaatcgtacgggaattcgtcggcggcaggccagagcgatacttcgagcatattcacgggcaagccgaaaacaaccgtgccgccgacaaggcctgcggacaatttctgtccgtccgtcgatatctctattcgtgtttccgaaagccgctcgtcaagaagtctcagatccgcaaacaagccgagaatggttttcccttcttccgtacgtcccgaaaggcacaggctctccagaaacgcctgcaaatcgatgccgtcttcgctgaataacaggatcgccgcctgcaaaccttgatctgcggtttcacccttcgaggcaaacaatccgccgagtttttgcgcgatctgttgcaattgcgatacgggcacgcgcatcatcttgccttcatagaccagcgttacgtagtcgtcgcgataagtcaactctatcacttcatccgcaaatccgtccacaaagatctccgctttcagatacgcctgcatatcctgtccgatatgtttgatctcgaccgaaagcgcgaccgtcatttcgacgtcgtgaatttttgcgccgaattccagagcaatcgcgatatcgtcgctctttacaagattctggacaggctcgataaacttttcaaaaagttcaagcgaaacgtaatcgtccgcgtccgcgggcgcgcccgcttcgcgggcggtcacgccctgcattttcgccgttacgccgtatacggacaaaccgaaagcgttttccgcgggcatgaagtttgcagagagttcgccgaggttcatatccgcta

SEQ ID NO: 3533 - DNA, 4100 bp, Unknown
  16S sequences of unknown bacteria
ttaccgacgctctggcaattctccaggcttcggttaacaaaatcacccttcccattgttaaataataattaacggcaaataaacgaaagactgtgtttcaaaatgagaaacacagtctttttttgaattaaattttcggcagcgtgacggtaacggatgtgcccttgttttcctcgctttcaagggaaacgtctccgcccagcagcttgacggcgtgcttgactatggaaagcccgagccctgtgccgccgacctccttggagtggcttttgtccacacggtagaaccgttcaaacacgcggttgatcgcgctgcccggaattcctattcccgtgtctgccaccgtgaccgacacaaaatcgggctgttcctttatcgttatgtcgacccgtccgccatctttgttatatttaacggcgttgtcgcaaagattgtagactacttccgaaagcagccttttgacggtatttatcgtcacatcgtcgcccgaaagagaaacggtcacattttttctttgggcgctgtccttcaaaatatcaataacggtggaaaccgtttccttgacgttcacaggctccttgtttgtgtcaaccgtgccgtcgtcaagtcgggaaagtccgattatgtcctccacaagggttatcattctttttgattcggaataaattctctcgccgaatttttccacgtcctcgggctttataagaccgttctgcataagctcggcgcagcccgaaatggtttgaaggggcgttttcagctcgtgggaaacgttggcggtgaattctctccgcatttgctcggccttttcacgctcggtgatgtccacaataagcagcgctatggctgtcaccttgccgtcggtcatgacggggcttgcggtgacctcatagtcggcgtcgtcaagggggacgataagctcgcagtggcggccctccttggccttgccgatgagctcctgcatctcaaaggaattgttgagcagcaaaatgtccttgcccacgcagtagctgctgattgaaagcagctttgaggccgaatcgtttatgctcagaattttgcccttttcgttgagaagcacaagaccctcggtcatcttttttgtggcggcattgaattcgtccttgcggcgtttaagctcggcctccttatatttaagctcctctttctggctttctatgcgggaaacgagaggggaaagctcctcataatatccttcggggggattttctccgtcaaaatccattttgttgagcggctccacaattcttttggaaagtcggaacgcgaggaaaagcgacagaccgaccgccgcgaagaagacggccaccaccggctcgagcatacccacaaaaagcgtccaccatgtatactgtgaacaggaaagacggagaacccgtccgtcggacagcctctttgccgaataaagctggcgctccataagggtgcttgaatatcgggtggcctgaccctcgccgtttttcagcgcgtcctttatttccttgcgctcaagatgattttccatttgcgccgaatcggcagccgagtcaaattccacgctgccgtcggaatctatgagcgtcacacggtaatcgtcggccgtaaggcttttgagatagtcgacccccgcaagctcaaccccttgggatgcaagctcgacctgggagccgagaagcttcatttggttggaggaataatagccgtaaagggcacccatgattacaaccaccgagcacagaaaaaccgtcagcgccacggcgaatatcgagcgaaaaatcttttttgtcataaacggtcctccattctgtaacccacgcctctgaccgtgcgtatgctgtcaccccatttgccgagcttgctcctcagcgtgccgatatgtacgtcaaccgttcgggtctcgcccataaactgctctccccaaatttcggaaagcagcttttcgcgggaaaaaacaagccccttgtgctccaaaaataattttaaaagattgaattcctttaaggtcaaatccaccggttcgccgccgatcttaacggtgtgttcggcgggattcatttcaagatcgccgatggaaagcagcttttccggctctccgcccgaggttctgcggagcagcgccttgacccgcgacaccatttccatcatgccgaagggcttggaaagataatcgtcggcgcccatgtcaaggccgatgaccttgtcatattctgcgctttttgccgaggccattataatgggaaggttttttgtggaaggattttgccgcagctttttgagtatggtaaggccgtcctctcccggcagcattatgtcgagaataacaagctcgggaagctttttttcgagcgccttccaaaagccgtcgcttctttcaaagccttcggcctcaaagcccgacgccttaagggcgtaaatcataaggtcgcgaattcccgaatcgtcctcaacgagataaatcataaaaactccccttttaccgaaaagcccgagcggacttttcgcaaattcttcttttctttacattttcataatacaacggcaaggtaaaatcaaaaagcctgataatgtaaaatccgtgtaaaatcaagcggctttgggccgattttgattctttacaaggtaattataacacataaagtaaattttcaaaataaaatattaaaataatgttattttaattgaacttacaggggaaaaatgatagaataaaggtatcttaacaaagaggtgcaaaatgaaaaaatttctgtccgcagctcttgcgggacttattatattttccttttcgtcatgtaaaaaggacacgggcggaaaggtcataacctttgaaaccgaaacggcggccgataccgtcgatccgctgctttgctcaaacaaaaccgagctgacggcggtttacaatattttcgaacctctcgttattctcgagagcgacgggacgctgtcgccgggggcggccgaaagctatgaaatttcttccgacaaattaaaaataacctttaatctgcgggagggcgcctgctggtcggacggcgagcgggtgaccgccgacgattttgcctataccctcgagcgcgccgtcgatcccgtcaccaagttttccggggcgtcggctctttccaacatcaaaaatgccgctgaaatttcaaacggctcgatgtcggcaagctcgctcggcgtgacggcatcgggaaataggcttgaggtggagctttcctctgtcgacggcgacattatatactgttttgcggggcccgcgggtatgccctgccgaagggatgttttcgaagccgccaagggaaaatattgcatgaccaaggagaccaccgtttccaacggccccttttatgtttcccgctgggtaaaatcccaaggggaagaagctcttaaatttattaaaaacgagcattatgtcgggcttcacgaggccgtttcccaaggagtttactgccccgtcaaaaagaccgacggccgtcttgaccgactgaaaaacggaaatatcgacagcggatttttgccctccgagcttgtttcctcggcgcaaaacggaaagaatacgctgctttcgacatatacctcaaccgcggttttggccttttctacttcggaaaaatcccctcttgccgacagcacactccgccgcggactttacatgacggccgacctagcctcggtttcgtcggttctgcccgaaagctgcgaacaggccggcgacattatccctcccggcagcatatgctcggcgggaatctggcgaaacgacaacccgcccgatgttcaaagcatacgatctcaggaaacgaatgatcttatttcaaaatcaaaggatgttttggctcagaacaaggttgttgcgctgaccgtcgcatatgaaaccgaaaccgacaaggccgccgtcaattataccgttcaaaattggcaaaagcagttcggtcttaaggtcgaaacggtgcaggcaagcagggcttcggtgattttggggcttaaagacgggaaatatgccgcgggaattttcaaaattccctctgccgacaaaatggcggccacaaccctgctcgagctttcctcggcgggtctttccctttcaaacagccgttttg

SEQ ID NO: 3534 - DNA, 4782 bp, Unknown
  16S sequences of unknown bacteria
gcctgaaaccacgatgtgcttgcacaggagtggttttatggcttaatgacccgccaaacatgagaaagtagcgatttacgtagtaaatcagcggatttcgaatttatctgtatgtccggtaagcctcccgcctgtacgcgccatcacccagtccggaagctctccattcataaccgcagtaaaaatacggttcagggctccatgatgatcccggttcagatttgcgagcagctctttcatatactggcgctgcgtgtagccgtcaaccggacatggatttttgacgaccggaagctgatacttcttcataaacccttttacatccggctcctcgacaaagatcagtgggcggatcagggtcagaccggtccggtcgagatgcgtgaccggagaaaaggtataaatccgaccttccataatcagtgacatcataaaggtctctaccacatcatttttgtgatgcgcataggcgatcttattacatccaagctccagcgctttttcattaaaggcacccttgcggagcttcgcacacaacgcacatggatgcgactcttttctggcctcaaacaaaatcccggaaatctgtgtatgcacgatcgtatatggcacctccagctcgtcacagagcgcctgtaccggcgagagatcaaatccttcgtaccccggatggaccgtgatcgcttcgattgtaaaatgtttcggataaaagcgctgcagatagctcagtgcatagagtaaggtcaggctatccttccctcccgagattccgactgcaatcttatccccctcttcgatcatatggaattcatcaacagcctgacgggtcaggctcagcaggcgttgtagcttcatttgtatatggctcctttctgcttcctgaaaaaacgtatcttaaacggattgtcgcaatccgtccgtttctctagaaacgataacatagcttctcttctgcgtcaatccgggactctgccaaaaatcatatagactctgcactttgcaaatcattcagagtatgataaaatcgtataatgtcgtgaaaacaacgaaagaggagattttattatgaaatttgtgatacagcgtgtaaccgaggcttctgtggaagtcgatgagaaaatcattggggaaattgcaaacggatatctggtactgatcggtgtcggacaggaggatacgaccgcagaggctgaccgcctcatcaaaaaaatgatcaacctgcgtatcttttctgatgaaaatggaaagacaaatctgtctttaaaagacgtcaatggcgggcttctgctcgtctctcagtttactctttatgctaactgcaagcatggcaaccgtccttcctttacagaagccggcgatccgaaaaaggccgaggagctctatgagtacatcatcgctgagtgccgcaggcagatcccggtcgtccagaccggaagcttcggtgcagatatgaaagtgcggctgtgcaacgacgggccgtttacaatccttctggagagctgataaaacgatgtattttgagatttatacgacagagcgttcccggaaggatccgcgaaaggccttccggcgcttcccgtcggtccgccgtaccggaaagaatatgtaccggattcaggcggaagagcgcaaagaacgcaaaatccgccgcatctgccgcaggcggcactacgaactgaaacgcatctacccggaaaatctcggccgaagcgatcactatcgccgggattttttttcgtactacccaagaccgctcggcggctatcgctgccgctattgtcatcgccgtattccggataaaaagctgtgcatcgaccatatctaccccatctaccgcaccaagaccggcaatgatttctggctgcggctgcttcgcatcgaggatgtgaacgatgtgcgcaatctcgctcccgcctgccgccgctgcaatacaaaaaaaggccgcaacgccggaatctgggtgctgcgcgccattcttggcaggtacgaggcatattgggtgctgcggaaggtttgttttgtggcgttggtcgtgggcctagtattcctgctaaactttttttcttaacttttccagcaatccttcaaaatattccggcagcggtgcatggaactccatatattcccctgtcgtaggatgtataaacccgatcgtcatcgcatggagtgtctgaccttccagtccggcaaacggacacttcgacggtccgtagacatcgtcaccgagaatcggatgtccgatactcttcatatgcacacgaatctgatgtgtgcgtccggtctccagctgacactcaatgtaggtaaaccggtcaaacgtctccagtacccggtaatgcgtgatggcatcctttccatttggaacattgaccgccatcagcttgcgattctgtggatgacgtccgatcgttgtgtggaccaccccgtcttcggtcagtcgtccatgcacgattgcacggtatttgcgcgtgatggaatgtaccttgagctgtgccgcaatcccctggtgggcacggtcatttttacagataatcagagatccggtcgtattctgatcaatgcgatgtacgattccgggacgcagtacaccattgattccggataaagaatcaccgcaatgatacagaaccgcattgacgagcgtaccgctataatgtcctgctgccggatgaacgaccatcccctttggcttattgaccacaagcagatccgcatcctcgtaaagaatatcgagcggaatattttccggctcaatggcgagcggttccggttccggaagctccagatgtatcacatccccttccgccgctttatagctggcacggatcagcttctcatttgcaagcacatctccgtccctgatcattttctgaatataggagcgggtcagctccggaaaacgatctgcaagaagtcggtcaatccgtattccgttctccgcagatgtcactgtaatctgttctttttctgtcatctttcctaccattcaatcctgcaaaccgtctcttctgacaaaacgattcttggatactacaagttttgttttcgccttttattctttttccggattcaggcactcgaaattatcgttccgatatagcgtaaaaatcagtacaatcaaaagcagtgccccaacgaccacatagcagtctgcaacattaaagaccggaaaatcaatgagtgatacatacagaaaatcaatgacgtaccggtgcagcagacggtcgatcatatttccggctgcacctgccgcgatcaataccgtgcagatccgcatcgccagaaaatgcaaagtcaccggaaggtatacatacacgtatatagccacggcgaccatcgcgagtgcaatcatcacgaaaacccactgccggtttgccaaaataccaaaggccgctccgcgattctgcagataaaacagttcaaaaacaccgggaatgaccggtttcgtaccgattcccttcagatacgtctccgccgcatactttgtaaactgatccagtacgatcagcagtccaaaaaatgccatgcccgctaaatacattcgcaggcttttttcaggtctcttcatcgtatcctctcctgcctagtctgccttcaggctcttgatcgcctctcgcatctccgtctcagtcacatcggtgacaatctgtgccttgccaagctttttcagcaaaatgaagcggatctgtcctgcatccatttttttgtcgctccttgttgcctcaataatatcgtccaccgaaatcccgtcaaaggaaatcggaagcccgaatccgacgttcatatcacgaatctcatagaactcatcctcatccagatatcctctctgccaggaaatgtaggcggctgccaccgtgccaagtgcgacacaggctccgtgagaaagcgtaaaatccttaagcttctcgatcgcatggccgatcgtatgaccaaaattcaaaagtgcacgatcacctttttccgtcgggtctttctctacaatatacttcttcagtgcgcagcactttgcgatgagacaggtcatcgtctccgaatcgcgctcatcgatctcttccatgtgctcgatgcaccactcataaaaatctgcatcaaagctcaggccatacttgagcagctcgccgacaccgcttgcaagctgatcatccggcaaagtcttcagcaccggaacattgatatagacaagtgacggctgatgaaatgctccgaccatatttttatactggtcaaaatccacaccggtctttcctcccacactgctgtcgatctgtgccagaaggctcgtcggaatctggacaaaacgaattccacgcagataggtcgccgctgcatagcctgccagatcgccgaccacgccgccgccaagtgccagcagataatccttgcggtcaaagcctgcctggatcagtgtctcatagagctgctgaaccgtagcaagcgtcttgctctgctctccagccggaaatacaaaggaaatgacttcttttccgcattttttcgcctcttccatcacttctttcaggtacagatctgctacgttcgaatccgatacgatacagagtctgcgaccgccgcagcctatcccatcaagctcctgtgccagcgaagaaaaagaattcttcaggcagatatcataaggtgtatttccctcggtctttactgtaagtctgtttactgctgtctttgccataattattctcctgtttttctggtttttatgatgatgataccagggtcaaaaggtcatgcgtttcatgcttgcatgaaagagcatgacttattgac

SEQ ID NO: 3535 - DNA, 32759 bp, Unknown
  16S sequences of unknown bacteria
aaaaagaagctaccgaggggagatggaagcactttgcgatcattatatagagcgtctggacgcactgaaagtgccgaaatcttttcaatgacagaatgcggcgggtcgggggcaccacttcccgtcgcttaataaaacttcaatgcaaaaaggagaaagaacatgaaaacagcattgacgatcgctggaagcgattccagcggaggcgccggaattcaggccgatatcaagaccatgacggccaatggcgtttatgccatgagcgccatcaccgctctgacggcccagaataccaccggcgtttacggcattatggaagcaaccccggaatttttggaagagcagctggagcgggtgtttaccgacatctaccccgacgctgtcaaaaccggtatggtttcctcttccgctctcatcgccgttattggcaaggttctgcggcggcatcaggcaaaaaacatcgtggtggacccggtgatggtctccaccagcggctctcggctcattgcggaggatgcagtgaccgctttgaaagaagagctgctgcctttgtgcacggtgtgcacccccaacattccggaagcccaggtgctggccgatatggccgtcacctgcccggaggaaatggagcaggccgctcagcgcatcggggaaaaatatggatgcgctgttttgtgcaaaggcggccatcaggtgagcaccgccgacgattacctctggcagaatggaaagggcacctggatacggggccagcggattgaaaaccccaacacccacggcactggctgcactttgtccagcgccattgccgcaaacctggccaaaggctatgacctgcctggggcggtggagcgggccaaggcctatatttccggggcgctggctgctatgttggatctgggatctgggagcggcccgctggaccatctcttcgatctgaaaggggagtttgtgaaatgaagcgggatctgctgaaagtctgtctggaagaaaatacgcccctgtgggatcagtgcctggataccccatttttgcagggaattgcccagggcactttgccggaggattgcttcaaggggtatattgtggacgacagtctgtatttgcgggaatattccaaggtctttgcctgggggatgctccacgcccaggatatggcggagatccgggcttattattctcttctgtcctttgtcaacgaaggggaaggggccacccgtcgccagtatctgaagaaatacggcctcaccgatgagagtatccagcatctgcccctgcggccggaaaaccgggcctatgtggaccggatgatcgaaggggcccgggatggagaaggggcggcggaatgcctgatggccagcctgccctgcatgctcagctatggctatatttttcgtaaaatggtggagcgcaatcccggggtgctggacaccgtctatggcccctttgtgcgggattacgccggggaaaaatacgaggaaagctgctgccagtggatggagtttgcagagaaggtctgcaaagagctgccggaggagcggtgggaaagctgccgcaagctgttctgggattgctcggtgcatgagcagaagttctgggaaatgagccagaatccaagagaagatgtgtaatgatagcgggcctggcggcgagccgccgctcccgttttatatcggttttcgatacgctctggcgggcctgcttttgcaggcccgtttttcttttgcgctcttgtgaaaaaggcgagggctatggtatgataaaatcagtaaaatagaaggaggatatgccatgaccagagaggaaaaactggcctccatttaccggggcggcacagtctatcgtccgctgcaggaggaaaaaagcatcctgctggaagtgcagctgggatgcagctggcacaaatgcgccttctgcgatttcacacgggatcattttgagcttctgcccctggaagaggtgcgctgggcggcggagattctgggagaactgaaggtggagggaaaccgggtatttctgctggggcagaatcctttctgccgctccacttccgatctgctgcatatcttcggctatatccaccattatctcccctgggtcagtgagatcagcatgtatgcccgggccgatgatatcctgcgtaaatccccggaagatctgcgtacgctgcgccaaatggggctgcgggatctccatgtgggcgtggagtcgggcagcgataccgtgctgctcatggccaacaagggggagacggcggccgatttgctgcgggccttccgcaagttggacgaggccggtatccagtatctggtcacctccatcctggggctggggggcaagcagatgtggaagagccacgccatcgaaaccgcccggctgtataaccagatccatccccggaacatctgggtgctggcgctgaaactgtttccaggaacacagctgtaccggcaggccagccagggcctttttgagccgatgaccccttggcagatgctgcgggaggagcggctgctggtccagtgcctggaagtgaaggactgcttttatatggataccaccgccctcaatcaatacaccctggcggcccatcttcccgatgggaaagaaggactgttgcaggccatccaccagctgttggtggacgaagagctgccggtggggcctggaagcggagaaggaggagtgctgtcgtgaacggggaaacacaggaaaagctgcccttggggcgctggcgccacttcaaaggcggagaatatcaggtgtatggggtggccatccattcggagacagaggaagaatatgtggtgtaccgccccttgtatggggaagggaagctgtggatccgccctctttccatgtggctggaagaagtggagcgggatggaaaaaagcagcaacgcttcacctatatcggggaataaaagctcctgtttctggaaaaaataaaaaatgtgacgaaaatccttgcaatggggaagcagatccgatataatataagaaattttaggcatctgtcgcggcgcggcgcggaagccggaataaaaagaatttcgcctgcacgcaaagccttcagttgactgggggcttttctttcggtcagccgccgcagaataggaggtttttatgggaaagaatttgctggaactgaaaagcctggatgtgtccgaaatcgtttccatcctggatcaggcccaagcctttcacgatggggaagtctttcgcggcctggaaggacgcattgccgccaatttgttttttgaaccctcgacccgtacccagtacagcttcaatgtggctgaagtgaaactgggtctacgggtcgtttcttttaatccggctggctcctctttgcagaagaacgagagcttctatgacaccgtcaaaacattcgacagcttcggccccgatctgctggtcatccgccatgtggaaaatgagtactataaccagctgctgggccatgtgaatgccaagattttgaacggcggcgacggcaccggcaaccatcctacccagtctttgctggatctgctcaccatccgccaggagttcggccattttgaagggttgaaggtggccatcatcggggatgtgtcccacagccgggtggcccacaccaacttcgaggtgatgggacggctgggcatggaagtgtgcaccagcggcccggaggaatatatggaaaccgccctcaattataagccctttgaagaggcggtgcgggaaagcgatgtggtgatgctccttcgggtgcagcacgaacgccacaaagagaagatgcacctttcggtggaagaataccaccggcgctacggcatggacaaggacaagctcagctggatgaaggatggggctatcatcatgcaccccgctcccttcaaccggggcgtggagatcgccgatgaagtggtggaatgcagccgctcccgcatcttcaagcaggtgaacaacggcgtgtttgtccgcatggccgccatcaagcgggccctgtgggattaaacgccgggcagaacagagaagaaataacccaccattgtgggaagacagatacagggaggaaacacagatggaaaaaacccaacgctttgaccgcaagttggtttttgaaaacgggcgtgagtttctgggcgcaggcttcggcagcccgcgggaagctctgtaccagtgcagctttgacaccgctatgatcggctatcaggagatcctcagcgatccggcctgcgccggggaagctctggtgatgacctatccggtgatcggcagctatggcatggccgacgaggactatgagtcccgggcctgctacgccggatgcctgattgtccgccgctataacgaccgcccctccaactttcgctacaccaaaacgctggaagaagtgatggtggaaaacgacatccccggcatccagggtgtggacacccgggctatcggccggatgctccgggacgagggcagcatgaaggtgctgctcaccgacaaggacaccagcctggagaaggccatggagctcattcgtcaggccgctcccgaagagggcctggccaaaaaggtgggcggcaagaaggtccgttacagccgtacggcaaacttccgctacaatgtggcggcggtggactgcggcatccgccagagcagcatccgctgcctgaacaagcggggctgcaatgtgaccatcgtgccccaggatatcacagcggaggaactgaaggctctcaagcccgacggcctgtttctctccagcggcccgggcgatcccaaggaatgtgagggagttatcgctctggtgaaggagatgtggggccagatgcccatcttcggcgtgggactgggctgccagatcatcgccctggccgccggcggcgatacctataagatgaagcatggtcacaacggcggcaatgtgcctgtcaagaccatctatggagacaagcgggagatcacttcccagagccacagctttgccatctgcgaaaagagtctggagaacaccggtttgaaggtgacccaccgccatctgctggatgacactgtggaaggcatcatggaggaaaagagccgggtgatcggcgtgcagcattatccggagaacgatcccggtgccgacgactgcgcttatgtatacgacacctttatcaccatgatggacaacgccaaagagggaggaagcaacaatgcctaaacgcaccgatatcaataagatcctggtgatcggttccggccccatcgtcatcggacaggcggcggaattcgattactcgggcacccaggcctgcctggccctgaaggaagagggctacaaggtcattctggtcaactccaacccggccaccatcatgaccgataccaacatcgccgacaaggtgtatatggaacccctgaatctggaatatgtggcccggatcatccgcatggagcggcccgatgccatcatccccaccctgggcggccagaccggtctgaacctggccatgcagctggcccagaagggcgtactggacgagtgcggcgtggagattctgggcactccctttgattccatcgaccaggcggaggaccgggagaagttcaaagacctgtgcgtgcgcatcggcgagccggtgctggaaagctacatcgcccattcggtggagcaggccaaggaagaggcggaaaagatcggctatcccatcgtgctccgtccggcttttaccctgggcggcaccggcggcggtttctgcgacaacgaggaagaactgctgaacctggccgaaagcgccctgcatctgtccccggtgggccaggtgctggtggaaaagtccatcaagggctataaagaaatcgagtttgaggtgatgcgggacaagaacgacaccgccattgccatctgctccatggagaacatcgaccctgtgggcgttcacaccggcgacagcatggtggtggcccccgctcagaccctgaccggcaaggaataccatatgctccgggatgccgcgctgcggatcatccgggaactgggcatcgaaggcggctgcaatgtgcagtttgctttggacccctattccttccgctattatgtcatcgaagtcaacccccgtgtgtcccgttcttccgctctggcttccaaagccagcggcttccccatcgccaaggtgtccgccaagatcgccgtaggcatggctctggacgagatcaatctgggcagcgttcccgccagctttgagccctccctggactacatcgtctgcaaggtggcccgcttccccttcgataaattcgacaaggcctccaagctgctgaccacccagatgaaggccaccggcgaagtcatggccatcggccgcaccatggaggaaagcctgctgaaggcggtgcgttccctggaagccggcgtcaaccatgtgtggaaggaaaaattcgaccactttaccgtggacgagctgctgcaggagatcgccacccccaccgacgagcgcctctatgccattgccgagctggtgcgccggaatgtggatctgatgatgatctgccagcagaccaagatcgactacttctttatcgacgccatccgcaacatcgtggaatatgagacggtgtgcaaggaaaatccgggagatgccgaggtgctgaaggaggccaagcgtctgggcttctccgatgccttcctgggcaagctgtggggcatggatgagctggaagtgctcaagctgcgccaggagcacaacatctggccggtatacaagaccatcgacacctgcgccggtgagtttgccgcttatgtgccctatttctactccacctacgaggaggagaacgagtccattgtcaccgacaagccctcggtgctggtgctgggcagcggccccatccgtatcggtcagggcgtggaattcgactattccactgtgcacgccatctgggccatccgggaagccggatatgaggccattatcatcaacaacaacccggagaccgtttccaccgactacaccgtcagcgataagctgtattttgagcccctgtgcgtggaagatgtgatgaacctgatccatctggaaaaccccatgggcgttgtggtctccctgggcggccagaccgccatcaacctggccgagcggctgcacaagctgggcgtcaagatcatcggcaccggtgtggaagctatcgacaaggcggaaaaccgcgacagctttgaaaagctgatgcacgagctgaacattccccagccggccggtaaggcggtgacccgcattgaggacggcatccgggtggcaaacgaaatcggctatcctgttctggtgcgtccttcctatgtgctgggcggccgggctatgcagatcgtccgggacgacgagcagctgcgccggtatctggccgaagccgtggtggccagcgaagagcaccccgtgctggtggacaaatacatttccggcaaggagctggaagtggacgccatctgcgacggtgagaccgtgctcatccccggcatcatggagcatgtggagcacaccggcgttcattccggcgactccttcagcgtctatcccaccttctctgtgggtgaaaaggcccgcaaggccattctggactataccatccgcctgggccggggcatcggtatccagggcctgttcaacatccagtttatcgtcagcgaggatgagactgtccatgtcatcgaggtcaacccccgctcctcccgtaccgtgcccttcctctccaaggccaccggtattcctctgcccaagatcgccacaaaggtcatgctgggacagagcctgaaggagcagggctatgaaacaggggaaatgccccggaagaaccggtggtatgtcaaggcgccggtgttcagcttcagcaagctgcgcggcgccgatgtatatctgtctcccgagatgaagtccaccggcgaagccattggctatgacaacagcctgaaccgggcactgtacaaggccctgaaagccgccaatatgcgggtggccaactacggcacggtgttcttcaccatcgccgaccatgacaaagagcgggcgctgcccctggtgcgccggttctacaacctgggctttaatatcgaggctacccggggcacggctcagttcctcaaggagcacggcatccgcacccgcagccggaaaaagatcagcgaaggcagcgaggagatcctggattctctgcgggccggtcatgtgacctatgtgatcaacaccctgggacccaatgaaatggccaacaccgacggttttgccatccgccgcagtgctgtggagaacaatgtgaccatgttcacctctctggacaccgtcagcgtgctgctggatgtgctggaagaaatcaccgtgggcgtctccaccatcgacagtgaaggggaaagcaaatgacaaacggtatgtatgagatcgtcagcaatcggcgcatcgcccaggacacctatgaaatggtgctccagggagatctgagctttgcagaaaatcccggtcagttcgtcaacatcaagctggaagggctctatctgcgccgccccatcagcatctgcgattgggacgacgccaccctcacgctgatctataaagtggtgggcaagggtacacagcagctggccgggatgaagccggggaaagagctggatcttctctgcggcctgggcaatggctttgatatgaaaaaggccggagagcacagtctgctcatcggcggaggggtgggggttccccccctctatggcctggcccggcgcatggtgtatgaaggaaagaaagtcaccgccgttctgggcttcggcaacaagaaccaggctttttatgtggaaaaattcaaagcccttggctgcccggtagaggtggccaccgaggacggcagcctggggacaaagggatttgtcacccatgtgatggaaaacctgtcctatgattattatttcgcctgcggccccatgcccatgcttcgggcggtgcacgcctgcggaaaaccgggccagctctcctttgaggagcggatgggctgcggcttcggcgcctgcatgggctgcagctgcgaaactctggtgggcaacaagcgcatttgtgtggacggcccggtgatggatagcagcgaggtgaaattttaatgagcagactgactgtgaaactgggggattgggagctggataaccccatcatccccgccagcggcacttttggcttcggctatgagtttgcccaatattatgatctggatcttctgggctccatgagcctgaagggcaccaccaaagatccccgtttcggcaaccccacaccccgtatcgccgagtgtgaaatgggcctgctcaatgccatcggtttgcagaatcccggggtgcacaaggtgatcgaagaagagctgcccaagctgcggcaggtctatcacaagaaggccatcgccaatatctccggtttttcggtggaggactatgcctataccgccgccctttttgacaaggaagaggatatgggcattctggagatcaacatcagctgccccaatgtgaagcacggaggcatggccttcggcaccgatccccaggcggcggccaccgtctgccgggcggtgaaggaagtgaccacaaagccggtttatatgaagctgtctcccaatgtcaccgacattgtggccatcgccaaagcggtggtggaagcaggggccgacgggctggtgctcatcaacaccctgtttggtatgcgtatcgatccccgcacaggtaagcccatcgtctccaccaagatggcgggcttctccggcccggccatcaagccggtggccctgcggatggtctatcaggtgtgccaggcggtggatgtgccggtgatcggcgtgggcggcatccagaatgccgacgatgtgctggaattcctttccgccggtgcctctgccgtgcaggtgggcgcccagaacctggtggacccctgggcctgcccccggatcatcgaggagctgccccggaagatggacgaatacggtattgaaactttggaagagatcatagggagggctcagaaatgaaaaaacatgatgtgatcatcgcctgcgatttccccaccggacaggatgcacttgatttcctcagccagttcaaggaggaaaagccctttgtgaaaatcggcatggagctgttctatggcgaagggccggacattgtccgcaagctgaaggccatgggccacgatgtgttcctggatctgaagctccatgatatccccaacaccgtgaacaaagccatgcgcaacctggccaagctgggagtcaacatgaccaatgtgcacgccgccggcaccatcgacatgatgcgggccgccaaagagggcctggccgagggagcacagggagaagtgcccatgctcatcgctgtcacccagctgaccagcacctctcaggagcggatgcagaaagaactgctcatccccaacaccattgaggagacagtggctcactatgcccggaacacccagcaggccggtctggacggcgtggtctgctctcccctggaggcgggcattgtaaagaaggcctgcggcacatccttccgcaccgtcaccccgggtatccggtatcccgacggcgatgtgggagaccagtcccggatcaccacgccccagaaggcccgggagatcggcaccgactatatcgtggtgggccgtcccatcaccaaggcacaggacccggtggaagcctatcgccgggtgctgcgggactttttgggagaataaggaggaaatatcatggaaaacatggaaaagaagatcgcatcctgcctgctggagatcaaggccgtgttcctgcgtccccaggagccctttacctgggccagcggcatcaaatcccccatttactgcgataaccggctgactctgtcctatccccatatccggaatcaggtggagcagggcctggcagagaacatccgcaagcattatcccgactgcgaagtggtggcgggcaccagcaccgccggcattgctcacgccgctttggtggccgacatcctgggcctgcccatgtgctatgtgcgctccagcgccaaggaccatggccggaacaaccagatcgaaggcaaggtggaaaagggccagaaagtggttgtggtggaagatctgatctccaccggcggctctgtcatcgaagtggtcaatgtgctgcgggaagtgggggccgaggttctgggcattgcttccatctttacctatggcctgcagaagggcatcgaccggatgcaggaggcccaggtgaaaaatgtatccctttccaattacgatgctttggtggaagtggctgtggagcaggactacatcaaggcagaagatgtgaagaagctgcaagccttccagaaaaatccctccgacagcggttggatggacctgtaaaaacaaaatacagtcagaatatagaaaaaagccctgcggaatcattccgcagggcttttttacaaggcattttacgatgttaagaatgcatcaggccagagactggacttcttccaccacttcctcccagtccatgccagagagaaagtcctttttctgctggttactggattggacggcgatgtggtaaattgtgctatcggtttcggcctgggcggtgagggtggggagggttcccggatcctcgctgaaaaaatgagaggaaagacaggctttgctgccatccttccgcacttccccaggttcgctgctgagggagtaggtgttctggccttctttcaggaaaaggagataggtttctcccatttgcggctctgtaaaggtatagaacggcatctggtaggggatgtcctgcccttcggcccggtgggtcatccggatggaatatcccttgctcaccgtgatggtcttgggcacatcttcgcctttcagcacttgttttacctggaaggagtaatcacggctttgggaatccgcattgggagaatcgcccttttcggcgtccagcgcctttttataagtacccaataaaacagcgtctgctttttccgtcatggtgcgcagagaggaagagagggacacatcgggataggcgtataccgtcacatcttcttcttttttgtttgttttctgctcctccggagcggctgcgcaggaggccagaagcacaagggacagagtcagagcagcaaggcgtgaaagctgtttcattgagatcggctcctttcgaagggatggattatatttataataacacaaaaatatacaaagtcaatgttccttgggagaaggttttatatgctttttacccaaagcaaatggggtggtgacagaaaggggagtacaatataatcatcctgcaagcgagcgaaatggagtgataacgatgcttccctgtcagatcatctgcgcggcctattacagcggatgccacaaaagttgtccttattggaaacgattccagcaggaacagaaggaaaggcgtcaggcccaaaaacgatatttggatcattatatggatcagtgcgccgtggagatgcggcaataccgggccatgcagccccggtaccccacgcggccataaaaaaagcaggagccaaaggctcctgcttttttgttatactgcttcttcggtgggttcaaactggctgttatacaggtttgcatagaagccgcctttttccagcagctcttcatgggtgccctgctccacaatgtccccttcccgcagcaccagaatgcggtcggcatcccggatggtggacaggcggtgggcgatgatgaagctggtgcggccctgcatcagccggttcatggcctgctgaatgagcacctcggtacgggtatccaccgaggaggtggcttcgtccagaatcagcaccgccgggtcggccagaatggcccgggcaatggtcaaaagctgtttctgaccgtgggacacattgctggcttcctcattgagcacaaagtcatagcctcctggcagggtgcggataaagtggtcggcacaagccatgcgggcggccttttccacctcttcatcggtggcatccagacggccatagcggatgttgtcccggatggtaccattgaagagccaggtatcctggagaaccatgccgatctgactgcgcagaacgccccggggcagatccttgatgtccaccccgtccagcagaatggagccggagttcagttcatagaagtgcatcagcagcttgacgatggtggtcttgccggcaccggtggggccgacgatggcgatgcgctggccgtctttcacatgggtggaaaaatcgtggatgatggtcttttccggagtgtaaccgaaatccacatggtcaaaggtcacatcgccccgcacgccttcggccggcagcttggctttgccgtcgtcggcttcttccggctgctccaggaaggtgaagacccgctcggctgcggccacggtggactggagggtgttcatgatctgggccgactgcatcaccggctgattgaaccggcgcacatactgaataaaggattggatgtcgccgatggtgatgcggccctggatggtaaggtagccgcccagcacacataccgccacatagcccaggttgctcacaaagctgagcaccggctgcatcataccggacaggaactggctgcgccagccggcggcatagagctttttgttcatctggtggaaggtttcccggctgcgttcttccccgttgaacagccgcaccacattgtggccgctgtacatctcttcgatgtggccgttcacatgacccaggtattcctgctgggcccggaagtgccgctggctgcggcgaaccaccaaagagatgatcaggaaggacaggggcagggtgatcaggctggtcagagtcatccatccgctgatggagaacatcatcacaaggacacccagcagggtggtgatggcggtgatcatctgggtcaggctttggttcagggtggtggagacggtatccacatcgttggagatcagactgagggtttcgccgtgggtggtcttgtcataaaaggacaagggcaggcggttcatttttttgttgatctgatcccgcagctcataggacaccttctgggccacgccgctcatcaggaagttttgcagatagcccagaatggctcccagcaaaatcagcacaatgagcaccatgatgatgtgtcccacagcctcctggtcaatgccgggacggctctggaggctggtttccagaagttcatcctggtattgaggcgggatgttttcgatgatggactgaccgttttccatggcgccaaggtagtcgccgatggtctcaaaggactgggcctgcccgctttggcccatctggctcagctgggaaaggggaagggccgaaagggtctggcgcagatttttgtccaggccttggagagcatcttcgggcaggaggccctgctccatcagagtgcccagggtggcgttttcgtcctgagccagggcggccatttgctggggaggaatgtctgcaagggctttccccattttttccatggccttttgggtgtccgtgatggtgtcatagacattgcgtttcatcagccccaccatgatttcgtcggtggcattgcccagtaccttggggatgttcagcgtgaggatgacgctgccgatggccagcaagaaggccagcaggatcaccggcacactggaacgcatgaagcggatggttttttgcaaagtgcctttgaaatcccgggctttgccgccggggatcatcatgccccggggaccgtggcccataggcctgccacccatgggcgggcgggatgtttggttctggttcattgagcgatctcctcctcggaaagctgggaacgggcaatttcttcatagaccttgcaggttttgagcagctctttgtgagtgcccttgcccacgatcttcccgtcttccagcacgatgatctggtcggcattcataatggtgctcactcgctgggccacgatgagagtggtgcgtcccttggtctcctgggccagggcccggcgcaaagcggcgtcggtcttgaagtccagggcggaaaagctgtcgtcgaaaatcagcaccggagcctgcttggccagggctcgggcgatggacagccgctgtttctggccgccggacacattggagcctccctgggccaccgggtcctcataacccttgggcttttcctggatgaattcagtggcctgggccacggcagccgccttttccacctgctcctgggaaatgtccggagcgccatagcggatattgctttggatggtgccactgaagagcacgcccttctggggaacgaaggagatcagctcgtggagatgatggaggttcagatcccgcacatcggtgccgccgatggttaccttgccttcgctcacatcgtacagccgggggatcaggctgatgagcgtggttttgcccgagccggtgctgccgatgaaggcggtggtctcaccggggtttgcggtaaaggagatgtcggtcagcacatctcccggcgcgccgggataacggaaggacacatggtcgaatgtgacagggcagggtttgtgaagatccagcacctggggtttctccgggtttttgatgtccaccgggctctccaggatctcgcagatccggttggccgacaccgaggcccggggcagaatgacaaagaccagagcgatcatcataaagctcatgatgatctggatggcatactgcataaaggccatcatattgcccacatcggcgatgttggaggcggtgagggaggcgatccacaccacggccagggagacgccgttcatcaccatggtcatcacaggcatcatcagggagatggtgcggttgacgaagaggtggttttttgtcaggtcccggttggcgttgtcaaagcgctcttcctcatagccctcggtgccgaaggcccggatgaccagcaggccgctgagccgttcccgggataccagattcagccggtccagcagtttctgggcctttttgaaccgggggatgacgatggccatcagggtgccgatcaaaagaagcatcaccaggatgctcacagcgatggtgaccgtcatgccgggcatattgctgcttttggcctgggcccgcaggatgccgcccacgcccatgatgggagcatagaacaccaggcggatcatcacggtgcagaacatctggatctgggtgatgtcgttggtggagcgggtaatgagggaagaaaccgaaaaacggtcaaattccgggttggaaaaggaagtgaccttgtcgaaaacctgtccccgcaggtcccgggctacccctgagccgatgcgggcggccagaaggcccaccagaatggcgcatacggcgctggccagggcgatgagcagcatgacggcgcccttttgcagcacatagcccatatcgcccacggccacaccctgggaaaccagagaggacatataatcgggcagggccagctcggccatggcctggccgaagagcagggcgaaggccagcagcatccagccggcatagcgttttaaatgtgtcaatagcttgagcatggtattcctccagaaggcagagttcaaagatgagtggggcaaaggggatgtccctggggacggatgagctgggccatgatggcaggcatctcatcgggatgagtgcggggtttttcctccagccagcacaccagcaccgccgacagcgtggcggctcgggtggcgataaaatagggagcggctttgtcgtctatatgaatgtggcggcggaaaaattccatgttgcggtgaagggcccgggcaaaggcatcggtgagcagattggtggtgcctgtggccatcagcacttccgcggcctgggagtgagccgtccaaaagagaaaaaaggcgtggaaaaaccccatttccccggtggcctgccgcagagcccgctgatccatcatataggcgatcatctgctccacggcctggtcggtttcataacggagcacatcgtcgatggtgtcaaagctgcggtaaaaggtggctttgctcactccggcctccttggccagagcggtcaccgagatctgacggtaaggggtagcggcgatcagctggtgcagagccttcccgatggattccaccgattggttcacccgcttgtcgctgtggatatggtacatggcatcaactccctccatgatatttcgcttcgatagtatagtcctgtgggaaaaacaagtcaatcgtatcgtaaatctttttacaaactggtcatatttttttgccgtatcctggggaaaaagaaaaaatccccgggaaagctcccggggatttttgggtggttttatgcttttttgtaacggcagacgccggaaacccaggcttcttccacatgggtgtggagaatttcttccgggtcgatctggaagagatcctgatccagcaaaatgaaatcggccagtttgccgggggtgatggagcctttcagatgctcttctccggaggcgtaggccccttcgatggtgtagcatttcagggcctgttccatggtcatggcctcctggggcaggaaggcccgctttccctctccggacacattctgccgggtgacggcggaatacaggttgggcatggtatcgaacttttccaccgggcagtcggtgccgaagctcacatggacgccgttttcatacagattgcgccaggcgtaggaggtggaggtgagagcctcgcccacacggctctggcagatgttcatgtcgtaatcgatgaagatgggctggacaaaggccagcacatccagggtgcggaaccggcgaagcagagcctggtcggtgatctggcaatggacgatgccgtggcggggatggttttccgggcagagcagctgggcattttcaatagcgtccagggccatttccactgcccggtctccgatggcgtggatggccaccggcatattatggcggtgagcacacagcaccaggccgttgagctggggctgggtgaacatttccaggcccttggtggagggatcgtcggcatagggctggcgcatggcggcggtgcgggcgcccaggctgccatcggccagcagcttgatgcagctgggccggaaccaggcagaaccccactggtcgtcatagccggcgtcaaagaattcctggatcagctcttccttttgcagcaggcactgttcgctcacccggatgtggagtgcgccctgggcctccagctgggcaaaggcgcggaagagcagatggtagtcggccttgggggtgtagcccacatcgtcgctttgcagggaagtgatgccctggctcagagcctgctcctgggcggagaggatgatctttttcagcgtctccaggttcaggctggagatctgggccttggtgtcgtccagcaggctttctttgatgatgccgttgggttcgccgttttcatccacttccaccagatcgccataggagggagcggtctcccgggtgatgttcagcgctttcagggcggcggagttgagcacgccgatgtggaagcaggcccgcatgatcatcatgggcacggtggaggacacctgatccaggtcggcccgcagggggaagcggcgctcgccttcggtgaaatagtcctggttccagccttctccttctacaaaagcatcggggccggcgggacgcagacggacgccttcggccatccgctcctgaatttccttaatagaatgggtgccggtgaggttgacgctcatcaggcctttggcaaaatggatgaaatgcatatgggaatcgttgaggccggggagcatcagccggtctttggcgtccacttcccgggcctgctggccacggcggcacagctccacctgggctccttccagagaacccacaaagacaaaccggtcgtcttcgatgagagcggcctgggccacagggcgccggtcatccatggtgtggatgcgggcatttttgatcagggtaagcatggggtattcctcctgtttttttgtaaaaataggatagcgatcgtatttgaatcaaggcgatctcattatatcacacccatttgcattccggggagaaagcggaaaaataggggaaatgctacaaatttgcacaagagtttttggtcaagatgctgaattgatgtgaaaaattgaccttgtcccccttgccaagcgtgttataataaaagcaaaaggcccctgaaaacagtatttcggggagaatatggaagcgaggagggaagaggaaaatgcgccacagcgacatgatcaacagcatcgtggaagccgagcatcatgcccgggagatcaccgacaaagccgaagaaaagcggcgtcacctggacgaggaagtggcccaggcggtgtgccagatggaaaaagaatatgaagaaaaagcaaagctgcggatcgaacaggccaaaagggaagaggaagccctgcggcagcggtctctggccgagctggaagggcgtctgcaatcggccatggacgatctggaaaagaaaagccagatccaacatgatgcttgggtagacgccttgttttctcatattgtaggtgaggaagcagaacggggggacggcgggtgctgagagagctgttcgactatgcagccataggcggcaaagtccatgccatgctgggaaaccggctgcggcaggaggattttgacaagctgatgcagatgcacaccgtgccggaaaccgcagccttcttgctgaatacccctggctgggggaactgcctgcaggggatggatgtggagcatgtgcaccggggtgagctggaaaaacggctgcgcatgggtcttgcgggggaatatgaccggctggccacctttgcttccaaggggatgcgccagcttctgcgggccatggctgccaaagccgaagcggtggaactgcttcgctttctccggtatttttccgcaggacacccggcggattttgccgtgagtctcccggcggggcttctgcgccgcagtcatatccggtttgataaactggctgcccggcccgattaccagggacttttgcaggccgtggagggaacggtgttctattcttccctgaaaaagacccagccgggagaaaatggctttgattacaccatggccgaagcggccgtgcaaagcgcctattaccggggggtgctcaccagcatccagcgggctttccatggggaggaccggcgggaactggaggaatatttcctgcgccagtgtgattttcagaacattgtgcgtattctgcggatgaagcggtacttcaaggtggagagcgaagaagtgcttcggggattgctgcctttctccttaaagctgaaggacggttacctgaaggagctgatcaaggcccccacctgggatgaggccatgagtattctgaaggaagggccctatggaccggtgttccgggaagaagagcaccggcaaatcgaggattacgccttttcctttttccagaaaggccgccagatgatacggcgtgggcgtccatcagcctttgacggcatcatttacctggatatcaaggaacacgaactgaaaaacatcatcaatgtggtggaatgtgtccgttatcaggtgccggaaaaccgcagggctgcctatctgacccccatttattaaagttgcggccatagatcatttgaagcaaaggaggcgaggatcatggccattgaaaaaatgaaactggtcaatattgtgggccccttgggactatttgaccaggtggtgcggggaagcctggtggacagcggctttgccccagaaagcgtgctggattttgtgggcagcggcggcgggcttttgcctttcaccttgcgcaatcccaacggggcccttctttcccggagcgaaaatcttctggataaactgaacatcgagccggaataccggcccttcccggaggaagggttcggagaaacggaaatgaccggttatttcgacgatctgacccggcgctatcaggtcattgtggatcagaaagagggatgccgcaggccattggaggaagatgagcagatcctgggccagctggatcacatcatggatgtgaaggccaatctggacgatctgtttgatctccactatgccaaactgcgggtgggacggattcctcgggatatttatgtgaactatgtgcggtatgtggagcaaaacccggatatctttttcttcaccaccggtgagagcggggattatgtctacgggatgtacatcacccctgccgcagcagagggaaaaagcgacgctctgttttcctctctccattttgaacgcattcacatctccgaccgggttcacggcagcccggatgaggccaaaaaaaggctggaagaggagatggaggaatacaaaaagaagatggaagaggccgaccggcagatgcaggccttgcgggacagcgagcaggaccggctgctgacctattattccatgctgaaatatgacaaggatacctatgacctgcgccggtatgctgcacacaccaacgacaccttttatctgtgcggctggattccccagcgggatctgcccgcctttgagaagcggttttctcccttccgggattcggtgtatgtgctggaagagccgcccactgcggcagtggcccctcccaccaagctgaaaaaccgggggcccatccgctttttcgagcagtttgtggagatgtacggtttgccggcttacaacgaagccgaccccacctcgctcctggccctgagctacaccctgttcttcggagtgatgttcggtgatgtggggcaaggtgcggtgctcattctggccggactgctggcctggcggtttttgaagctctccctgggtaagatcatcgccgtggtgggatgttcctcggtggtatttggttttgtctatggcagtgtgttcggcaacgaagatctgcttcccggtttcaaagtctttgaaagcgtggacaacaccaacaagatcctgctttgttcggtggccatgggtcttttgttcatctccattgccatgatctacaatatctataacggcatccgtcagaaagatctgggcaaagccctgttttcccagaacggcgtggccggtttcatcttttattgggcagtgattgtgggggttctgtgcaccctgctcaccaacatcaaactgctcagcccggtgtatatcgccttgctcatcctgctgcccctgcttctgatctttgcccaaaagcccttgggagatctggtggcccggcggaaagactggatgcccaaggaaaagggcggctttattgtagagaatttcttcgaactgtttgaaattctgctgtcctttgtgtccaacaccgtgtcctttgtgcgtatcggtgcttttgccctgaaccatgtgggcatgatgatggtggtctttgccttgatggacagcgtgggaaccatcggcagtcccattgtgtttatcatcggcaatgtgttcgtcatgtgcctggaaggtctgatcgtgggcattcaggtgctgcggctggagttctatgagctcttcggccggttctattcgggcactggtgtgccttatcagccctttacggtgcatttccggcgggagaagaaaagctgatcccctggaagaacatacagacaaaaaatacaatcagccccgcccggcggcggggaggcccttatcataaaaatttcgcaccgccggagacaaggagaaacttatggaaatcatgatcgtcaccattctggccgctctggccttttccccgctgctggtcgcttaccgccgtcatcagaaagggaaaaaccccaagggtgctatggccctcaacattgtttcggtatttgctctgtgcctgctgaccaccggtatgggcatcggcggccatgtgctggctgctggtgagcaggccgcttcggctgcttcctcttccgccggctggggctacctggctatggctctttccaccggtctggcctgcatcggcggcggcgtagctgtggcctcttccgccagcgcagccatcggcgccatttcggaaaatgacaaggtgttcggtaaggccctgatcttcgtggccctggccgaaggcatcgccatctacggtatgctggtttccatcctcatcatgctgcgcctgtaatccggcgaagaaaagggtgagaccatgcgctattttctcatagcagacaatgtggatacccagacaggcttccgcctggcggggatcgagggcgtggtggtacacaaagcccaggaggtggaagaagctctttccaccgccatgaacacaccggatatcggcgtgatccttttgtccgaagggctggtgcctttgtgccagagccgggtggatgacatcaaactgcggatgcatacgccccttttggtggagattcccgaccggcacggtacccatcgggcccccgactccatcacccaatatgtgcgccaggccattggcgtgaagatctgaagggaggagactggatggaaaacgatacaaacaagctggaacattttacagaaaccattctgcgggatgcggatgagcgaagtcagaagatcctggagagtgtggaaaaagcccgcaaggctcggcttaattcggcagaaaaagagctgaaagcccgcatggagcggcaggtggaagcgggcattgcccaggtgaagagcaaaaccggccaggctgtctcccagaagatgatggaagacaagcggaggctgtttgaaaaaagagcccaggtggcccggaagatctatgatgacctggcagaaaaagtggagagctggacggaaagcggcgattataccgcctggctcagccgtcagctggaaaaggccctgaaggcgctgccgggggaacaggagaaggtctatcttttctgccgcacccaggatgcagaatatctgaaaggctgcatggagcagtgccagcgtccctgggagctggcggtttctgagagcatccacatgggcggtctgcgtctggagtgcccggaaagccatatggcggtggactgcactttggacagcgcggcccaggagacccaggagcacatcgccgaatatctgggcctgcgtctggaataggcccgggaggtgaagcatatgaacgaggaaaattatcatgtatattcggtgaatggcccggtggtcaccgtcaaaggcggccggggccttgccatgcaggacatggtctatgtgggcaagagccgcctcatcggcgaagtggtgggcattgagcgggaccatgccaccgtgcaggtttatgaatccaccaccggccttgctcccggagaaccggtggaacagaccggcgcaccgctgacgctggaattgggccccggtctgctgggtggtatttttgacggcattgcccgtcccctcaaggccatccaggaaaagggtggcgcctttatccccgccggtctggacatccccagcctggacgaaaaggccaaatgggatgtgcaggtgctggtgaaaaaaggggagcaggtgcagccgggacagatcatcgcccagtgcgatgaaaaaggcagcatcatgcacaagatcatggtgcctcccaccctttcgggagagattgtagaagtcagccccgatggggcctataccgtgcgggatcagattgcgcttctcaaaacgcccgacggcaaggaacacagcctgaccctttcccagaagtggcccatccgccagagccgcccggtgaaactgcgccgtccggtggatcagctgatggtcaccggtcagcgggtcattgacaccatgttccccatcggcaaagggggctgcgcctgcgtgcctggtcccttcggtgcaggcaagaccatcatccagcaccagctggccaagtggtgcgatgccgacatcattatctatctgggctgcggcgaacggggcaacgaaatgacccaggtgctggaggagttcggcgagctgcaggacccccgcaccggaaagcctttgctcaaccggacggtgctcatcgccaacacctccaatatgccggtggccgcccgcgaggcatctatttacaccggcatgaccatggcggaatactaccgggatatgggttaccatgtggcactgatggccgattccacctcccgctgggccgaagcccttcgtgagatctccggccgtctggaagagatgcctgcggaagagggcttccccgcctatctgccctcccgtctggcagagttttacgagcgggccgggtataccgacaacctcaacggcaccgaaggcagcgtcacggccatcggcgctgtatccccccagggcggcgacttttccgagccggtgacccagaccaccaagcggtttatccgctgtttctgggccctggaccgggagctggcttatgcccgccatttcccctccatgaactggaatacatcctattcggaatatctggccgacctggcttcctggtttgaagagcgcttcgggcccaagtttgcccagtgccgggagcggatggcccggctgcttctggaggagaacaagctgatggagatcgtcaagctcatcggctccgatgtgctccccgaggaccagaagctggtgatcgagtgcgccaaggtggtgcgtctgggcttcttgcagcaggacgcctaccagcccatcgacacctatgtgcccattgaaaagcagtaccgcatgatggatctggtgctctatctctatgacagcgccaagaaggtggcccagcagggcatccccatttcccagctggtgagcacggggatctttgaactggtcacccgtatgaaatacaacatccccaacgatgacttctccctgtttgacgattacaaaaagaagatcgatcaggcggtggagcaggccatcagcaagaatacccgccagacagaaggggaggtgaagcgggcatgagaatcgaatataccggggtctgcgatctgaacggccctcttctcacggtggaaggcgtccggggcgtggcctatgatgaaatggccgagatcgtcaccaaagacggccaggtccgttcgggccgggtcattatgatcgatggtgaccgggcggtgcttcaggtgttcgaaggcaccaagggcatctctctggagaaaaacagtgtccacttccagggcaagcccatggagctctctctcagccgggagatgctgggccgggtcttttccggcgcaggccgtcccattgatggcctgggagaaatctttcccgaggaaaagcgggatatcaacggtctggccatgaatccggtggcccgccagtatcccagaaactgtatctataccggcatttcggccatcgactgcatggctaccctgatccgggggcagaaactgcccattttctccggcgccggcatgagccacaaccagctggccgcccagatcgtccgccaggccaaggtgggcagccaggatgaaaagttcggcattgtctttgcaggcatgggcctgaaaaaggacgccgccgacttcttcaaaaaggacttcgaggactccagcgctttgcagcgggtggtgatgttcctcaacgaggccagcgatcccatcatcgagcgtattctgacgccccgctgcgccctcactgcggcggaatacctggcctttacccatgggatgcacatcctggtcatcatgaccgatatgaccgcttattgcgaagcgctgcgggaattctcctcttccaaaaacgagatccccagccgaaagggctatccttcctacctctattccgacctggcctctctctatgagcgggccggtatgctggaaggccagccgggcagcgtcacccaggtgcccatcctcaccatgcccaacgacgacatcactcaccccatccccgacctgaccggttacatcaccgaaggccagatcgtgctggatcgggatatggaccagaaggggatgtatccccccatcggcgtgctgccctccctgtcccgtctgatgaaggacggcatcggcaaaggctacacccgggaggatcatccgccggtgtccacccagctgtttgccgcctattccaaggtgcaggacgcccggagcctggccagcgtcatcggcgaagaagagctgagtccggtggacaaaatgtatatgcgcttcggccagcggtttgaacaggagtttgtgcagcagggtgtttcggaaaaccgcaccctggaccagaccctggaactgggctgggatctgctgtgcgacctgccccgttcggagctgagccgcatcgatcagaagctgctggatcagcattatgtagaccactcggctgcaggagggagtgaggactgatgccggtcatcgcgcccaccaaaggaaatctgtccaagatcaagcggtccctggccctggcgaaaatgggctatgagctgatggatcggaaacggaacattctcatccgggaaatgatgctgctcatcgacagcgccaagcagatccaggcggagatcgatatcacctttacccgggcctattccgctttgcaggaggccaatatcaagctgggcgcctgccaggatatcgccctggccaccccggtggacaatagtttgcagctgggctaccggtcggtgatgggggtggagatccccatcgtcaccgcttccgatttcgaagcccggctgagctatgggtttttcggcaccgattcctctttggacaaaaccctttatgagttttatcgggtcaagaagctgtgcgccactctggccgaggtggagaccagtgtctaccgcctggccaacgccatcaaaaaggcccagaagcgggccaatgcccttcaaaatatcatcattccccagtataccgcctccatcgcctatatcaccggcgtgctggaagagcgggaacgggaggaattcagccgcttgaaggtcatcaaggctcagaaagccaaaaagacataaaaacaaaatccccggcaaagaacgaaaagttctctgccggggattttttaaattttgacaaagagggaaactttttgcctctttttttcgtctcaaggattagaagaacttggcgatcacttcggccacgccgtcgccataggatttggttgccacatagtcggcgatctctttgacggcgggggaggcgttctccacggctacgcccagaccggcccatttgatcatggcggcgtcgtttaaattgtcgccgcagcacaccacttcatccggcgccacaccatagcggcggcagatcagctccagagcgctggccttggacacatccttggccatgatctccaccaggtagtccttggaggccgccagagtcaggctgtcgccgaattcctcccgcagctgacggtggatggtttcccgctcttccggagataccaccagaatcatcttgggagagggagacagaggataggaagaaaaatcccccacttccaccaccgggttgtgaatcaggtccgggtcgatatcggtttctttggtgcgcttttccaccagaatccggtcttcgttgtaaagctgtacataatagccgtgtttgcggcaaaaggcggcgatgcccttcatggtttccagagacagaggacggagcagttcatagccccctggctgggtggagcggatgagggcgccgttgtaggtggccaggggacaggtgatacccacttgccgggcatagaatgcggcagaggggaacatccggccggtggccagagtgaccagaacccctcgatccagcagccggcgcagtccggcccgggccgcaggagccatggtcaggtctttatagagcagggtgttgtccagatccaaagccagcaatttataggacatggaaaagctcctttcctcatagaaatcaaggtgaatggacagcagttgccataccgattccattatagcttcttttcaagtaaaaaccaagggaacatttgtccggtttatgggacaggcaaagagatatgataggagcaaaggaggtcatagcatgatgcaaagtggattgatgacgggattcagtttgattttagggatggtgtgtatggcctgtgctctgcgggatatgctgcggcagaggaaggaagttttgcaggaagagtgggaagagagcaatgtgatctatgtccccaggcagtattttttgtctgaggattctagcgctctgtgccgtttttgagaaaggaaaaggccgggcatttgcccggccttggaaatttaatagtgttccagcaggtcccagatggccccaatgtatttgtcaatgtagccgctggtgtagaaatccaggtaggaactcacatcccggggaaactcgaacaggcaggagtcatatcccagactgcgggtgtaggcagtaaaatagccgtccccgcccagatagttcagggaattgcgggggaaataccggtggaaggtctgggaaaggacgccggaggggttggaagtgagaatctgctgggtccagccgtgggtgtcgatgtgtatatttttcccggagccttcatgctggatgacaaattctttcagacgcagagcctccagggcctgcaagggagcggtgccgttgtagttgcggtttgatgtgtgacgccggtaaccggtttcaaagcagcggtttaggtcgatgcccatgccgtagatcaggttgcctgccgtgtccagcatggtggtggtgcaccggccggggccgttgttggtccagccggcggcgactccatcgggattggcacagggaatgacatacactgtccatcccagccggtccacccgttccgcttcattttccagggaggcgcggaccttttgtcccagatagaccagctcggccccatcggcggcccagtggtcttcaaagccgtgaatggcaaagttcaggatcatcacattttcaccggtgccgatgcggtaggccgtcatatcccggccctcgccgctttggccaaagacgatggtctccagaagctctggttcttcctccagcgtgaaggtcagccgcgtttccggctcggccatacgggtcagaagggcggccgcttcgctgcggcttactgtgctgtccggaagaaaggtgccgtatttgtcggtgccgttgaggataccggcctggtacagggtgtagatctgctggctgtattcgtctcccggttccacatcgggaagggaagtgacctggttcagctgagggaaattgtcccccagggcgttggcgaaaagataggccatctcatcccggtgaatggcggtgttcatctcaccggcgaaatcttccggggaccataagccataggcctgcgctttttccagcgtttcggcataccaggggtcttctgatgcggtagcgtctgtttcctcctgtttctcttccggctccatttcttccagttctgtctcctcgggatcttcttcctctggggattcctcttcttccgcctcttccggcagagtttcggcatcatcttctgtttcttccggggaaagggagccgtctgcatcggagtccgtttcttccggcggcggggcctccagggccggaggcaggggatgcagtgtttcgtagcatcggacggccacggcaatgccttcggccaccgtcagggagttgtccggatagaaccggtcattcagcatcccctgcatcagtcccatttgggtgcattccgatacatagatggcataccaactgctttcctgcacatcggcataggcccggaccggcagccgggcgcaaaaaagcaaggcacaaacggcgaccaaagcgccgaagtgccggagcaacttattcactttgcaacacctcttggaataattcctctattttcaagtatagcactaaaaaataaggagtaaaagggctttttccgcaaaaaagcccttgttttttgtgtttggccgggaagcggcgcttttcacttcctggcaaatctgctataataaccgcaaaacggtgattgagacctgaaaaggaggggccatgatgggatgcgaactttgtccccgccggtgcggcgcgcggcggaaggagggacaggccggggcgtgcggcgccaaggggctgcgtgcggcccgggcggggctgcatcaatgggaagagccctgtatcagcggcaaaagaggaagcggcgctgtttttttcagcggctgtcccttgggctgcgtgttctgccagaactaccagatttcccacgaaaaggaagggaaggacctgacggcttcccagctggcccgggtgtttacccggctggaagagcagggagcccacaacatcaacctggtcagtcccaccccctatgtggaagagatcatagaggccctggagctgtaccgccctcatgtgccggtggtttataacaccagcggctacgaacgggtggagacccttcggcgcatcgatccctatgtggatatctatctgcccgatgtgaaatatgtcagcccggagatcagcaaaaaatacagcggggtctctgattattttgaaatggcatcccaggccctgctgttcatgctggaacaaaagccccaggcggtttttgatgaagatgggatgatgcgccgtggagtgattctccgccatctggtgctgccgggaaatctgcgccagacctatctgctgctggattggatggaggaaaacatccccaaagagacctatatcagcctgatgggtcagtatttccctgccgggcgggcggccgatttcccggagatcaaccggaggctgaagccgggagaataccagcgggcttgcagccggctgctgggcaaggggtttgaccatggcttttttcaggatctggaatcggccagcggggaatatgtgccggactttgacctgagcggactggaggcggaggaatgagcagcagcgcccccattcggtgggagagtttgccgcttccggtgcgcttggtgatggaacggctggaaagcaaggggttccaggtctttttggtaggaggctgtctgcgggatctgctgcggggggaaaatccccaggattatgacctggccagtaccgttccgccggaagagatggaacagctgctttctccctatccggtgatcgccaccggtctgcgttatggcacagtgacggcggtggtggaagggcaggccctggagatcacccggctgcgccgggaagggggctacaaagacgggcggcggcccgattgggtacttcccacagaggatatccgggaggacctggcccggcgggatttcaccatcaatgccatggcgttttctccatcccatgggctgatcgatccctttggtggagcgcaagacctggaaaagcggctgattcgggccgtgggagagccgggccggcggtttcaggaggatggcctgcggattttgcgggggcttcggtttgcctcgcgcctggattttgatttggagcaggagaccgcccgggctttggtggaaaagcggcatctgctggggcaagtggctcaggagcgcatcaccggggaatttatccgcctggtggaaggcatggcagctccacgggtgctggaggaatttttccctgtggctgtgcaggtggtgccggaattgcaggccctgcaggggtttgaacagcacaccccttatcatatctacgatgtgtggcagcacacccttcgggtgctggacggagtgggagaaggaagggaggtccggctggccgcccttttccacgacatcgccaagccccagtgctttttccaaggccgccggggcataggccatttcaaaggccatgctgtggcgggcggagcggtcactgggcaaattctcaagcggatgcgttttcccacccaactgcgggaggaagtgtgccagctggtgcgctggcacgacgaggacattccccaaaccgatgaagcggtgcgccgg

SEQ ID NO: 3536 - DNA, 8903 bp, Unknown
  16S sequences of unknown bacteria
taaacggatttttaaaagaaggctcaaagcgtcagataatcgactcggcaaactgccgatttgtcatcggagagcaagacggcggaacgggtgcgaaatttataccgatccgtcttgcaaaaccgcaaaaatccgacggtgtctctcccctttcggagaaagacaccgccgtaattcttttcacctccggctcgacggccgctccaaagggcgtctgcctttcccaaaaagccatgctttcaaacgcaaaggctctcaccgagaccttcggggaatttcacggcgaggggctgtgccttgccctgccgctttttcattccttcgggcttcaggtggctttgagctatctttacatgggcgagacggtctgtattcccgagacatcggactttgagggaataaacgccctttgccgcctgcaccgtataaccgacattaccaccgtccccgccgttttcggccgtctgctttcgggggactgccgaggtttttcaaaggaaatcggcttttgcattgtcggcggcgcgcgggtcgaggcaacgctcacagacgagctgtcgaaaaaatttaaaaacgctcaaatcctcgtgggctatggccttaccgaaaattcccccgttgtcagctgtctgacggtgggaaaaggcccaaagggttcggtcggaaagcccattaacggtgttttggccgagatttcccaaagcggcgaaatcgaggtgggcggcagctgcgtcatgaacggatatttaaacgaaaagggcgaggaaattcctctcaaagacgcaaaggtcgagacgggagatctcgggcattttgaaaatggatttttatttgtcgacgggcgcataaaggacattatcatcaagggcggcgaaagcatttcggccgagaaaatttccgccgccgcgctgctttgcggagcaagcgaggccgccgccgtttcggttcccgacagcgaatacggagaaaacatcgccctttttgcggttccgaaaagcctctcggatttcgacatcgagagctttaaagcaaggctttcctcccgtctcaccggccttgaaatgcctaaaatcataattccccttgccgcccttccgaaaacggatttgggcaaggttgacaaagcggcgctcaaagctgttctttaagcaccgagggttcccctttcaaatttaattttccgcaaaaaaagacaggtcggtaatttccaacctgtctttcggtttttaaggcttattcctcgggcttttccttttcttccgcctgctcgtcgccgctgcagaacatatcgtcgtcgagacgggcgccgcaaaaattgcagaaggaggcgtcgatgcggtttctgcttccgcatttggcgcagcgcttaaggcgtcttgcgtcggcaagcttttcctcaagctcggcaagctcggcgaccttaacgtcgatgtcctcgaccacgctgtcgcaaaggcttgcggccgagcagtcgttcttgcagctgtcataatatgcctttccgagatttctcagggcggcgtttatggaagattttttacgggcgatggccacgcggattttctgaatttcaatggtttcggtggccttttgagctcctgccgagagaatttctcttgcggtggaaaccgattcgtcgaaaaatgtcataaaaatcatctccgaaaaaatttgggatttttctttacaataattatagcacccatacccgcaaaagtcaaataattatttttcaaaaacctttaaaaagggcttgacaagtcgggaaagataatatataatagtcaagctttcagttgagagcgacattgcggaattgtgtaagggtagcacgacagactctgactctgtttgtctgggttcaaatcctagttccgcagccataaaacctcaccttttcggtgaggtttttgttttgccgattttgtcggcggattttattttaattttgttgaaatgacaatttatatatagtataatgaaaaaaacgacctcggaggggaaagcatgaccgtcgacggcaaaagaaaattcatcgtcaacacaatttatgtggcgcttatttgcgccatcgtctttttcatctttaaatatctgaccatttggctgctgccctttttcatcggctttatctgcgccctcattttacagcggccggtgagctggctttcaaagcacacccatacgccgagggtgctttggtcctccctcttcgtgctgtttattcttgttttcgtctttgggcttatcgcctttgcaggcacgaaaatatataacgaggtctatgggcttgtgggctggatgaaggacaacattcccgtctttgagcagacctttcagaacataagcgacaatctgtccgactggcttgacaccctccccgaggggcttgccgacgccctgcgaaacacgccgatttccatggccgaaaacggggttgccgccgcctcaaacgccgtgacctcctttgccacaaccgtcatttccaacattcccggcctcatgctgaccacaattatttccattgtggcctcctgctttatcaccaacgattataacaaaattaccgcctttatactccgtcagttttccccgaaatatcagcacgtcatccgccattcaaagcagcttttcatggaaaacgtgcttaaaatgctcaggggatacatcataatattttgcataatttttgccgagctgctcgcggggcttgcgattttcggcgtgccctatgcggggacgctggcctttttcatcgcaattctcgacattgttcccgtgctcggaacaggcacggcgcttatcccttggggaattgtcgagcttgtcagcggcaactccaccctcggtattgagctgattttgctttacgtctttataatcgtcgtgagaaacataatcgagcccaaaatcatcggcaagcaggtggggcttccccctatcgtcacccttatggccatgtatctcggcctcaacaccatcggccttctcggcatgatttgcttccccattatgattatcatcgtagcgaagcttcaggaggcggggcttatacacatttggaaatcggccgaaagcgacgacgcaccgtctgacgggcaagacggtctgcaggagagcgcggaaaacgaaccctctgccgagcaaccgtcccgcgagtgagcgtctcacaagcaattgtcaacagtttaattgcaaaccaaaggacctgttcttttttgagcaggtcctttaaatattatatcggctttttgcagcaaaaagcctcattgcgtaaagagagccgataccgaatcttagctctttacgcattgcaaaagctgcgcgttattagcctcccttgtgtaaagggagccgaacataccgagcctttactgtttatgcaatggagccgaagatgccgaaccgcagctgattatacaaaggaaacggagttctcggaaagctctggggtgtgctttattttccgctgtcgccgtagtttgaaagcactcttgccgacgggtcgtttacgtcgcagccctcccaagacttgttgggcatccagaaatcgaccaccatgtcgctctgtccgggataatatttttcgaaaagctcgcggtaaagcagcgattccttggtaaaggggcgggcatgggtatatgccttgcatttttcctcaaattcgccctcggtgtagtagctttcggcatattccttgagataatccaccatggaatggccgacggcgtcggaaaatgccgccttttcgcggaaaagaatgtcgtggggaagatagtcgccctcaaaagcgtggcgcagaagatatttgcccttgccgtatttgttcattttcttttcggggtcgaccgacatgacgtatttgacaaaatcaaggtcgccgaaaggcacgcgggcctcaagggagtttaccgaaatgcagcggtcggcgcggagcacgtcatacatatgaagctcgcgcacacgcttttccgattccttttggaactcctcggccgagggggcaaaatcggtgtatttatatccgaaaagctcgtcggaaatttcaccggtgagcagcacgcggatgtcggtgttctcgtgaatccatttgcacagcagatacatacccatgctggcgcgaatggtggtaatatcgtatgttccgagcagatgaaccacctgctccagggcgcaaagcacgtcctcctttgtgattatgacttcggtgtggtcgctgccgatatagtcggccacctgttttgcgtatttaaggtcgattgcgtcctcgctcatgccgatggcaaaggtttttatgggcgttttcgactgtcttgcggcaatggcgcacacaagagaggagtcaagaccgcccgaaagcaaaaatcccaccttggcgtcggcaacaaggcgtttttccacgccgcacacaagcttgtcgtggattttcttgcaaaccgtttcaatgtcgtcaaaacagacctcgtcaaccgccgctatgtcgcaatagcttataaattctccgtcctcaaaatagtgtccgggcgggaaaggcatgattttatcgcaaagtcccacaaggtttttggcctcgcttgcaaagacaaaggcgcccttttcgtcgcggccgtaataaagggggcggataccgatggggtcccttgcggcgatatattttttggccttgccgtcgtaaattataagggcgaattcggcgtcgagcattttaaacatggccgtgccgaattccttataaagcggcagcagaatttcacagtcggaatcgcttttaaaggtatatccctttttggcgagcatttcccgaagccttgcaaatccgtagatttcaccgttgcagaccacaaaggagccgtcgagctcgaagggctgcataccctcctcggtaagtcccataatggcgaggcggtgaaagcccaaaagacccttgccggtgtcgataattcgactgtcgtcggggcctctcgatattgtttcgtaaaatccttttttaaacttttccaaaacggcgccgccgtcacaatagcccataattgaacacataataattcctccgaaaaaaagttatggccgaaagccccaaaagggccttcggaaagcaattaaaagggcgagaagtttttcccgcggtgccacctttttttgttcttcattgtcggcttctcaaaaagacaaagccctgccgcgtgacgggcggctcccgtctcccctacttaccccgaaatgacccgctccggtcggagaaggtcaatttcggggctttgggttcgaggctcgccgggggttcttcgcaaaggctttgccgagcggctcacaccctcccgctctcgcttcggggaaaatccccggtaagttcctttgctacttttcccggctcaaacgcctttatatgtttttaattattccacatcctgaagagcgtcatagccttcttcgccggtgcggacctttacgacgttttcaacatcgtatacgaaaatctttccgtcgccgatgtgaccggtgtaaagaacctttttggcggtgtcgataacgcttctgacgggaaccttgctgaccacgatgtcgacctgtaccttaggcagcaggttggtttccaccggaacaccgcggtaatactcgggcttgccgccctgtacgccgtagccgagaacatgggacacggtcatgccggtgatacccagatccttcattgcggccttgagggcgtcgaaacggttttctttgcagattatctctatcttggtaaacttgggtccctcgccctcgctgaaggagggaaccttcttcacggggattgcttcggcaacgggaacatcggaggcggtcgccacgatgccctcggcgggagcataggaagaatactgatcgacggcgggaacgaaatcgggatatgcgctgggaagtccgtgctcggaaatgtcgagaccggcaagctcatcctcggcagacgcgcggattccgccgcacttcttcatgataccgaaggtgattaccatcataaccgtcgcataagcggcaaccgacgcaaagccgagcagctggagtcccgtttgctcgaaggagccggtgtagaaaagaccggaaaggcctgcgggggcgtcggggtttgcaagaagtcccacggcgattgttccccagataccgtttgccatatgtacgcccacggcgccgacgggatcgtcgatgtggagcttaaggtcgagcagctcgaccacgagaacaactaagaagccggaaacgatacccacaacggcagcgcctaccgcgtcatatgcgtcgcagcccgcggtaacgccgacaagacctgcaagagaggcgttgaggcacatggaaacatcgggtttgccgtttcttatccatgtaaagagcatggtggtcacggttgcaaccgagggagcaatcgtggtggtgaggaatatggaggcaagctcggagggggtggtggcggcggctccgttgaagccgtaccagccgagccacagaatgaacactccgagagctccgagggttatggagtggccgggaatggcgttgacctttgttaccttgccgctcttgtccttaacatacttgccgatacggggtccgaggaaggcagcgcccacaagtgcagcgataccgccgaccatgtgaatggcgcaggagcctgcataatcgtggaagccgagctgagaaagccagccgccgccccagatccaatgggcctcgatgggatagatgaaaagggaaataaccgcggaataaatgcagtaggaagaaaacttggtgcgttcggccatggcgcccgaaacgatggttgcggtggtggcgcagaacacaaggttgaatacgaaggtggaggcgtcggtaaagccttcggagggacttgcgatgaagttcttgaagttctcgaacatgttcatgttgggaataccgatgagtccgaaaagggtatcctcacccatcataagggtgtagcccaggagcgaaaaaacaactgtgccgatacaaaagtccatcaggtttttcattatgatgttgccggcgttttttgctcttgtaaatccggtctcgaccattgcgaaaccggcctgcatccaaaagacgagggcagcaccgatcaggtaccaaaattcaactgtcataagacatacatctccttaaatcttcattatctcaaatttatctcactccgaagagcagcttatcatatgtcgggaagggccaatattcctctgccgtgagggtttcggcctcgtcgcaggccacacgcagcagcgacattttgggaagaattacgtccctgatgttgtttgccgcctcggtgacgtcggaaattgccttaagttttacgagagcctgatcaagctcgtcggcagcctcgtccatctggtcggtgagagccgaaagcttgcttatcagcttgctttcataagcgcatttgaccgacggaacagccgctttctttgccgaaagaccctcggcaaggtcggtgacatattcgcaaacggcgggaatgatttccttctttgccatgtccaccattgtcagtccctcgatgttgaccgtcttgcaatagttgtccatctgaatttcgtaacgggatttaagctcggcctccgagaaaaccttgtgagaggtgagcatatccacgtttttcttggcaagcagcatgggcatacaatcgggggtggtgcggagattgagaagtcctctttccttggtggcctcctcgatccacttatcgtcatatccgttgccgttgaagatgattctcttgtggtccttaatggtctttttgatcatgtcgtggagggcggtttcgaaatcctcggcgccctcgagacggtcggcatagattttaagcgactcggccacggcggagttgagcattatgtttgtgcaggcaatggagtttgacgaaccgagcattctgaactcgaacttgttgccggtgaaggcaaagggcgaggttctgttgcggtcggtggtgtctctcgtaaatttgggaagaacgtgaacgcccagcttcatctgagtcttttcggcgcccgcatagggagcgtcctcctcaatggctttaagcaccgccgtcagctcatcgcccaggaacatggaaacgactgcgggaggagcctcgtttgcgccgagcctgtggtcgtttcctgcggtggcggccgaaagacggagcagatcctgataatcgtcaaccgcctttataacggcgcacaggaaaagcaggaactgtgcgttttcgtagggagtctcacccggagtgaggaggtttacgccgccgtcggtggctatcgaccagttgttgtgcttgccgctgccgtttactcccgcaaagggcttttcgtgaagcaggcagacaagtccgtgctttgcggcgaccttctgcatgatctccatggtcagctggttgtggtcggtggcgatgttggtggtggaataaatgggagcaagctcatgctgtgcgggggcgacctcgttgtgctcggtttttgcgagaattcccagtttccacagctcctcgttaaggtcggccatatattcggcgaccctcggctttataacgccgaaatagtggtcgtccatttcctgacctttcgggggcatggctccgaaaagggtgcggccggtgaaaatgaggtctttacgctgatcgaacagctctttatccacaaggaagtattcctgctcgggacccaccgaggtgcgaacgcatttgaccttgtcgttgccgaacagtcttaaaattcttaccgcctgcttgctcagcgcctccatggagcggagcagcggagtttttttgtcaagcgcctcgccgccgtaggaacaaaaggcggtgggtatgcaaagggtttttccttttataaaggcgtaggaggtggggtcccatgcggtgtagcctctggcctcga

SEQ ID NO: 3537 - DNA, 20332 bp, Unknown
  16S sequences of unknown bacteria
catcgtttttctcttttttgtgcttaatattggcaaattttgaatgtcctgacatactctgtcactgctccttttcttcttgttgtaatttagtaattttaacaaggtgaatcattttattcttcacctcaataatctgaaacagataaccgttctccgtaatctcggccttctctccgtcctccggaatccggtcaagtctggatatcagcagtccgttcagagtatcatacgtctcatcgaaggaaacacccagtgtctcctccacgtcggcaagcggtgtcattccatccatgagcagatctccgttgccgtctctgtggataaattccacatccttgtcgtattcatcctgaatatttccgacaatctcctccagaatatcttccattgtcacgagcccggccgtctgaccatactcatccgctacgataaccatctggattttctcagactgcatgccacggaacaaaagattgatccctctcgtctccggaataaattttgcttcccggatcagttccgggatatccttaatcagccagttatcgtactttcccatcgtgtgaaatttcatcgcatccttgaaatgcaggattccgatgatattatcaatgttctccagataaaccggaaaacgcgacagcggctgttcgaccataaaagcaagcgctgcattcagatcctgggctccgtcgatgccgataatattcttccggtggatcatgatatccccggccttcttatcgtccatttcaaagatgttctggatcatctcagcctctctggcatcaagcacaccctgctcatggccttcatttaccatcgagatgatctcatcctccgtcacttcactctcgaaggacttcggatcaattccaagaatccgcacacatacatgcgatacaaaagtcataatatatgtaagtgggctgactgccagcatcacgacccgcacaacgccagatcggtgcaacagccaccgggaggcatttttatgtccgagcatctccggtatagaatttccgaacagatagaacaaaatcgccagcaacggcaatgtcacatagatcgggtaccggcgcgtcagtccggtcagaaaataaccggtcgctgtgtaagtgaccgcagtcagaagccagatcgtatgtatgagacgatccgagtgatccttcagctcacaaatctcatccggcggcttgccttctgactcaaaggcctcctgaatctcagtgtcagaaacagaccggatcgcggcagaaaatgccgtcataataaaattcagtatcaacaggaacgctaataaacatgcacccaacaaggtactggcgtctccatccattttccgtgtatctcccctttatttctttttctgctgtacgcagtatcatgccttaaaacaggcaaagtattttaagtataacagtttctcttttattcgtcaagctttgcccggtccgtttacagattatgtaagcagctcaagactgacctgaagcgctttgtttacccgtttgagcatctctccgtccagatggcagacacgatccttcagcctgcgtttgtcgatcgtgcgcagctgttccagcaatattactgaatcgcgaccgacctgatatcgcccggcctcgatcgctacatgagttggcagcttcgccttgttcatctttgaagtaatggctgcgcagatcactgtcgggctgtgaagattacccacgtcattctgaatgatcagcaccggacggataccgccctgctccgaaccgaccaccggccgtaaatctgcataaaaaatgtcgcctctcctgattaccacatgcctcacactccgatacaaggaattttctgtacttcattaccttcagtatttccctgtttcttctgtgtattcatgtacatagaacatctttttggatatttatgcccggttcaagtatactcgcggtacccgtttcccgatgtcacagacaaattcatacggaaagcggttggacagcgcaccgagctcatcgaccgtaatctcggcatctccgtccctgccaagcagtgtcacctcgtcgagcagctccgcctcaatatccgtcacgtcgaccatgaactggtccatacagaccctccccaggatcggcgctttcttcccacggatcaggacatatccgcaattgctcaggcttctcggatagccgtctccgtagccgaccggaattgtcgcgatccgcatcggatgctcagctacaaacgttccgccgtagctgatggccgtcccgggttcaatcatttttatgtacacaacatgtgacttcagctccatgaccggagcaagcggaatctctctcgacacctcatcagacggatagatcccgtaaatcgtaatcccggcccgcaccatatccatattcgccattggcagctccagaatcccggcgctgttcgaacaatgacgcaaaaatccgtgaacgcctgatgcctccatcgcatcacagaaatcagtaaaccgatgcatctgccgcatcgcttcctgcttatctgtctcgtctgcccttgcaaaatgtgtgaatacaccttcgattgacagatgtcccatcccgctgatcttcttcaccgtcagaatgctctctgccgtatcggcaaagccgatgcgggacatccctgtgtccactgcaatgtggatcggcgccctcttgccgatgcgggccgccgctgcgtcaaacgcctttgccatacgctccgtaaagactgccgggcggataccgttttggatcatagtctcatagtcttcctcaaatgtataaccaaggatcagaatcggcttcgtaatcccggcggcacgcagctccagtccctcgctcacagccgctactgcaaacccccagatatagggatacggttccaccagctttgcaatcctgactgctccatgcccgtaagcatctgtcttgatgaccgccaccatctgcacgccttcttttagattagccttcatacgccggaaattttcctctaccgcctccagatgaatgtaggctgtgattctcccattgctgtgctccatatctatccttcccttcctctgtagtctgttccagtccattcaggcgctttctgtctttttgcaggcagctattcctgtacaccatctctgcgatcctgcaggcagacagccaaaagtctggaccggtgctttaaaatcgccgcaaaactgtcccgatctgccggatcaggtctcccgccagcatcgcatatccgccaagctttctcctcgcttcatccccggcaagcccgtgcagatacgcgccaaagaccgccgcatcaagtaattccatcccctgcgccaaaagtccgcagatcataccggtcagcacatccccgcttccgccggtcgccataccgtcattgccgcttgtattgatgtagaccgcttctccgtcggaaataaccgtgcgcgcgtctttttctacacagatcagatgctgtgatttcgcataattccggcagcagtcaatccgttcattcagcacctgctgactggtcttttgcagcagccgcgccatctcaccgatgtgtggtgtcacaactgcaggctctacccgttttgccagcagcacctgccattctgcatgtgctgcaagcagattcagcccgtccgcgtcgattacgagcggtccaaaccaggcttccaaaacggttccaagcagcactccggcatgctcctccacacctagtcccggaccgattccaatgacatccgcccactccatggcacaggtcagtttttcttttgcatcttctgcgcttcggtacgcagtaacgattgcctccggaagtctcgtctggagcaccacgcggttgcactccggtgtcagcacgcggaccagcccgctgcccatccggtatgccgcctccgcgcaaagacaggcagctccgctcatcccttccgccccggcaatcagcagcaccttcccgcacgtccccttattcgaccatggcagccgtccgggaagccggcataaatcctccggaccaggaagaaatgcagccgcatcttccttccgaaccggtatcccgacagagcggcagacgacttttccgcaaaaatccgccgccggatacagcacctggccaagcttccgtgcagcaaatgtcaccgtcatatctgcccgcaccgccacagaagaaacattgccggtgtcggagcggatgccggacggaatatcgactgctactttatacgctgcagaagcattgagcttcccgatcagctctgcatacgctcccttcacatcccgggacaggccgatcccaagcaatgcatctacaatagtagtatattccttttccggaaaatttctgacaatttttatattgcaattctcgcagattgtcttctgacgacgacattcttcggtcattgacgcatcttttcctgcaaaaagtacctcaacggtaatcttctgttctgccagcagtcttgcgattgcaaaaccgtcaccgccattattgcctgaaccgcatacgacaagcaccggtgccggttgtggtctcgccttcagaatttcctctgtcactgcgagcgctgcacgctccatcagcaccatggacggaattccaagttcttctatcgccgcctgatcacactgcttcatttttttcgcatctaccagatactccatagctccatccctccgagataaaacggaaaaggctgcgtgctccaactgccgtgtcgcacctcagcctctgactgtctcatagttcgcgttctttttccagctccatgtgatttaaattgtaggaaagctgcatcaggctctccgaaagatgaacgctctccacgatcacgtccttcggcagctgctgcagatcggtatgtgcaaagttccagatcgcctttacaccattttccacgagaatcggcgcaagctcttctgccccggacttcggaagcgtcagggctgctatctggatctggttatctcggataaactgcggcaattcgtcggtcatacgaatctcaataccacgcactgtcatgcccttcaggcgtgggttcacatcaaagatgcccttgatccagaacccgcgtttctcaaattttacatagttggccagtgcctgtcccagatttccggctccgacgatgatcatgttatacacacggtccaggccgagaattctaccaatctcgttgtaaagatacttgacattgtagccgtatccctgttgtccgaatccaccgaaattgttcagatcctgccgaatctgagatgcagtgacgttcatcatttcgcttaactcgtttgatgaaattcgctcaactttttcctccagcaaatttccgagataacgataatatcgcggcagtctttttataactgcttttgaaatttcacgttcttccaaaattccgccctcttttccctttccttttcttcggcatccaccgttcaagaatgtcttttatcattatatcggggtgttttttttttgtcaataaaactgcatggtaaaagcttctctgatcgcaaaaaaatacaaacagatattgagttttcccgtgttttcgttataatggtgatgttggggtcaaaagccccggctatagtacaggatgaagataaaggagtacccatgatactttcatgtcagaatatcagcaaggcattcggaaccgaatgcatcgtaacacaggcatctttccatatcgaagaccacgaaaaggccgctatcgtcggtatcaacggcgccggtaagacgacacttctgcgtatgatcgtcggcgagcttgagccggactccggcgtcgtggcactcgcaaagggcaagacattcggctatcttgagcagcatcaggacatccacggtgatcagacgatctatgaggagctgctcagcgtcaaggaggatgtactccgcatggagcagcgcatgcgcgaaatggagcatgagatgaagcacctttccggtgatgcattgcagaatcttatggaacagtacaaccgcatttccacagaatttgagcatcagaacggctatgccctgcaaagtgaactcgtcggtgtgctcaagggccttggatttacagaagatgaatttcagaaaaaaatcgcgaccttatccggcggtcagaagacacgcgtcgcgctcggacgtctgctgctctcctccccggatcttttgctgctcgacgagccgatcaaccatctggacttaaattccatcgcatggctggaaaactacctgatcaactacaaaggcgccgttctgatcgtcgcccacgaccggtattttctgaatcgcgtcgtcacaaaaatcatcgagctggacaacggaagggtcatgactttctccggcaattactccgcctatgcggaaaagaaagcacagttgcgggaagccgcctggcgcgcttatgtcaatcagcagcaggagatccgccatcaggaggccgtcatcgccaagctgaaatcctttaaccgtgaaaagtcaatccgccgcgcagagagccgtgaaaaaatgctcgataaaatcgatgtgctggaaaaaccgactgagacgcgcgcagatatgcatctgcatctggagccgcagattttaagcggaaacgatgtgctcaccgttgagcatctctccaaatcattccccggcaatccgcttttttccgatctgaatttccatatccagcgcggcgagaaggtcgcagtgatcggagataacggtaccggaaagacaactatactgaaaatcatcaacgggctggagcaggctgaccacggttctgtgacactcggcagcaaggtgcacatcagctactacgatcaggagcaccagcagctgcatatggaaaagacactgatggaggaaatttcggacgtctatccggagatgaccggcaccgagattcgcaatgtgctcgcagcctttctctttaccggagatgatgtatacaagcgcattcaggatttaagcggcggcgagcgtggacgtctttctcttgcgcgccttatgctctccaagtccaattttctgatccttgacgagccgacaaaccacctggatatcgtttccaaagagattctggaaaaagcgatccaaaactacaccggcacggtgctctatgtctcgcacgaccgttattttatcaaccagactgcaacccgcattctggagctgaaaaaccagacgctcgtcaactacatcggcaactatgactactatctggaaaagtctgaggagctgacaaaaatttacgcgccggaacaggaaaaagaacacacagaagcacctgcggctgcttcttcccgtgatgactgggcacgtcagaaggaactgcaggcaaaggaacgcaagcgccagaatgatctgaaaaagacggaggataagatcacaaagcttgaggaacgcagcagtgaaattgatatgctgatgacaaaagaagaagtgttcaccgatgtcgcaaaatgcaccgagctcagcaaagaaaaagctgctctggtggaagaaatcgatcagctctatgagctctgggaacagcttcaggaaacataagaagcataagaaagcacgctttagaaaaagcgtgctcccatatatccgaccattccgtcgatccggaccttataccatcctccgacatcctcaaggaattctacggtcgtaccatacatatactctccgataatctccgcatccatgcttggaccgcttcggatgtagcaggatcccttcaatgtcttatataccggtgtgtactcggtctctgtggccggctgcgtctcggtcgccttttcagcaggcgactggggctcggtcggcttttctgtcgctgcggcagctgtctctgtctgagcggctgctgcatctgtctgtgcagaggactgcgcctgtactgcagtctcctcttttgtcccggcagtgtcggctgccgtttccgtttcctgttctgtctctgactctgcctcagactctgattctgtctctgatgtcatctccgtctctgattctgtctctgatgtcatcttcgtctctgtctgcttcttttctgtggtctcagtctccgtttccgtgatgatctggatcgcattggcagcgtccggcttttttgaattctgatagatcctcacgcccgccagaatcagaaaaaaagcaagaatcgctgccagcagcagcaggaaatagcgcagataatctgaaagccattccttaaactgtttcacttttactcctttacttactaattcctaaaaatgattttacggcatccggcatttctccggtttcgatcactttatcatgaagcaccggtgcattgcgaatctcctctaccgccttcggaaccggaacgtttgcaatacggctcagctcgtcgatcagcgcaaaatcttccatcccggcatattttgcatcaatcgcactcatgacactgcgcgcaaacttaaacggactcgccgtcgatgcgattacaaccggagccgtcggatggttctgctccttccatttgcgatacacgtaagaagcgactgccgtatgggtatccagtacatatccggtcttctcatataaggtgcgtatttcttctgcggtctctgcctcagtcgcatagccaccggcaaaatcctgaagctttgcacgcatctcatctgtgatctcatagcgcccggtgccggtcagctgctgcatcagctctgcattcttctttgcatcctctcctgccagacgatagatcaggcgctccaggttactggagatcaggatatccatagacggagaggtcgtcagatggaatgcacggttccggtcatagacgccggtctggaagaaatcatagagaaccttattctcattggatgcacagatcagtttgcctaccgggatacccatctgctttgcataaaaagcagccagaatatttccaaagttgccggtcggtacgacaacgttcatctcttcaccggcctgcagctcaccctttgccagcagtcttccataagcatagacgtagtatacgatctgcggaacaagccgcccgatattgatcgaatttgcagaagaaaagcaaaaacctgcctctgagagctctttacgaagtgcctcgtctccgaaaatacgcttcacaccggactgagcatcatcaaaattcccacggataccgatgacacaggtattcttacccttttgtgtcaccatctgcttttcctgtactgcgctgacaccatccttcggataaaagacaatgatcctggtacccggtacgtctgcaaagcctgcaagcgctgcctttccggtatcgccggaagtcgctgtcagaatcacaatttccttgtcctcgtgattcttcttcgctgcggttgtcatgagatatggcaaaatggaaagagccatatccttaaatgcgatcgtcgccccatggaacagctccagataaaagctgccgtctgcttttcggatcggtacgatctcttcggtatcaaacttccggtcataagcgctgcggatgcagtacttcagctcctcttccgtataatctgtcagaaaacggctcagaaccgcatatgccacctcatggtagttcatctctcccaatgtcgcaagcggaagatccagtgccggaatctgctccggtacatacagaccgccgtcctcagccagtccctgtagaattgcctgtgaagctgtcactcggtttgctgcatttcttgtgcttctgtacatccattccataatcgctacccattccttttccttagacttcagatgactctcatcttcccgtgagtataccacacgcaaaaggccattgcaaccttctgattgcaacagcctcctgttctattcctgtgcagcagttgcttctgcttcatcccgataggtatagtattcatgtccgccgtattcaaacagctttgtaagattggcgtcaaaccagtccgtatttttctgctctgcggaacctcttgccagaaaaaacagtgcaccctctgtgtaatcctctccctgcagtacccgctcgactgcaagaatagtcgaatcagtcacggagcagctataaatccgtccgtcggacgtcggctgaaactggtcatcctgccatacgacctcctggatcgtatccgggaagtgagaatccttcacgcggttcaaaacgactccggctaccatcatcttgctcatcacatcgccaccggtcgcctctgcctccacaatctgtagcaacgtataatattcttcgccggacatctggttttcctgaatggtctgctgtgcataatagccaagctctttcgcttttgtcgttccgcttgcgatctgtcgtttccggattgcccggcggtccaacccgcaagcccctgcaagggttgcacccttggctccatccatccggatcagccgtgtcgcctcggaatatttttccatatctgcgaccccggtcacgactccggtcaggcccatctgtgactgccagcttccctcgtttgaagaagaatcgaccgcatagactgtaccatgccctccggtctcaaactccgagatcacaaccgcgatgctcacaagcatcaggatcgcaaacaaaatcagcgcagcatccttcaggatcctttttcttccttctgcgttggtcaacagcatttctgatttctcccatactccgggatctccccatcccgtttttgccccttatcgtcatctatactgtttttgtaacgtagctgcattatacctgatccgaaaacattctgtcaatatctgattcatatttttgtaataatttatttcgtcgacatttttctttgttacatttttatttctttctcacaaagtttttcttcattatacgttgatttttatcgcatctgccacttgattttcttgctggatagcatatttcacattgcttaaattcgctgtttttcctgcttttcttacatatttgcaaaaaatatgtcgtattctttgattccgtacaggtttttgaattattttgtaataattatgtaatatttacaagctttgttttttcgcaaagacatacttgcttcatggtttgtttcgtattaaaatgctgatgacagggtcaaaaggtcaaaaagccgttcatgcttgcatgataaagcttttgaacttgggggccaaacccaacatcatcagttgtaaagaaggagatcccatgttaaaccgcgacacaatcaaatatctggccattctggctatgctgctcaaccacattgccaacctgtttctcacacccggaacactgctctgcgagatctttctcgacatcggctattttaccgcaatcacgatgtgctattttcttgtagaaggcttccactttacacactccaaacgcaaatacggacagcggctgctgctctttgccattctctcacaggtgccatttatgctcgcttttcacacaccgaccggaaacatgctgctgactttgtttctctgctttctgattcttatctgtatggaacgcctgccctttgcttccgtcagatgccggattgagatcgcaggtcttgtcctgttgtcctgcttctgtgactgggccggatttgcagctctgttcactgttctgtttgcgcaggcaggccaggaccggaaacggattggaaaagtctatcttcttggctatgttctctttgcctttgcaaatacgctcgagtatctcgagcagtattccctatttccggctctgctgcacggtcttatctccggctttgggatcctgtgctccggcatattgattctcttcttttacaaccataaaagatctgagcacctacgggaattttcccggtggttcttctacctgttttatccgctgcacctgcttgtgctgtgcgtgatccggtatgcaataaaatgaataaggcgtgcccaatggattctcaccattggacacgccctatctttttcttacgcgtgtttatgcttatttattatgcactgccagatgattgatcgcggtcaataatgcgtcgatggatgcacggatgatatctacatccagtcctgcaccccagtgcaggttgccctgtttgtcgcggatgccgacgtatgcgatcgcgcgggagctggagctctgctcaagcgcatgctcttcataggtcacaaggtcgtactccaggcggaaatgcttcttcattgcgttgctgactgcgttcagacgtccgttaccggatgccacgatcacgcttgtcttgccgccgcaggttgccgttacctctgcaatgataccattatgctgcttgaagtgtacttcctcgatcttgtacggctcggtgatgttctcgaaggtattcttgaaaatctggaagatttcttccggctgcagttccttgtgcagctcgtcggatacgccttttgccgcatagcccatcgcctcgcgcatcttcttcggaagattcagtccatagtgctgctccagaatatagccgacgccgccctttccggactggctgttgatccggatgacatccgcatcgtaggagcgaccgatatcggtcgggtcgatcggcagatacggaaccgtccaggtatcgcacttgtgctcctctcggtacttcattccctttgcaatcgcatcctgatgagaaccggagaatgccgcaaatacgagtccaccgccatatgggctgcgctcgtcgaccttcatgccggtatactcctcataatgctcggtgatatatggcatatcagagaagtcaagctccggatctacgccctgtgcgtacatgttcagcgccagagtaatgatgtccacattaccggtacgctcaccatttccgaacaacgttccctcaatacggtctgcgcccgccagaatacccatctctgcgtcggagatgccgcagcctctatcgttgtgcggatgcagagaaagaacaacattttcacggtacttcaaatgatcattcatgtactcaatctggctcgcatatacatgcggcatggacatctgtaccgtactcggaaggttaatgatcgccttgttgtctgcagtcggctgccatacatccagaacagcgttgcacacttctgccgcatagtcaatctctgtgccggtgaagctctccggactgtactcgaaccggtaatttgcatgagcctcttccgccagctccttcagaagctttgcgccctctacggcaatctgcagaatctcttcttttgacttgtggaatacctgctctcgctgcgcaagagaggtggaattgtatacatgcacgatcgcatgctttgctccttcaagtgcttcaaaggtcttgcggatgatgtgttctctcgcctgtgtcagcacctgaatcgtcacatcgtccggaatcagatcctgctcaatcagagtgcggagaaactggtactcggtatcggaagctgccgggaagccgacctcgatctccttgaaaccgatctttacgaggagctggaaaaactgtaccttttgctccagagacatcggaacgacgagtgcctgattgccatccctcagatccacactgcaccataccggtgcatgatctacatattccttctcggcccatttcatactgcgaaccggtggcataaaatactggcgaatatacttgttgtggttcatcataatcattttctccttttctcatacatactgaaagcgagcagtcggatttgcttacacacgtaaaaaaaccgcctcctgaaatcctctcggatctcaagagacggaagatgacaaatctttcgcggtaccactcttattcatgatcgctcatgcactctgcagatacggacacgccggaaacggctctgtcttatatcctgcccgcgtaacggtcgggtgatccgtctgcgcctactctgttgccggataatcatcatcggatccatttggggcagccgctcaggggcgagttccactcagtgcttctgacgcctcacaccatccggcatctctctgaaaaaaacaactgcgcttactattccccgtcatcgcattttccttttcgctttgagttttactctaccattgctttccgattttgtcaacatctttttatgccccctgcacccggaatgccggaatgtcttttgtctcggcaccatttgtccgggacatccagtaaacgatcacatattttccttcatacagaccgtctgccatctcgaattcactctcagaaaggtcgaattcacgacaaatgccatttgtatcgagtatctgcatcgtgtccggtgtcagacttgtgatgacgccttccgcgctcacactctgtggttcggccgcattcacatggcgggtgtagtcatttactgtggatgcggtatacggtgcgcctgctccggaatacgatacctctacccagtctccggtctcgatcgtatccttcagattcagctgcgcataggtcgtattgaatgtaatctctccgccgccgtcgtctctgcggatcacgagcacaccaaacgatgcgtctacgaccgtaccgctctggtatccattcttcacataggtatccaccatcggtgctttccaggaaaggtaatcggcatacacatacgctgtcgtgccattatactttacgcgcacccagccattgtcggtcgtgccggtgatctctactgccattccctttgagagagtaccataaatcgttccatccgaagaatatgtgctgcgcacattgacttctgctgttgcatacatggttccgcttccgtcctttgtgattaccggacgggtcgttgtcacatagtcgccccagacgtagcctgccgcgccgttatactgtacctgtacccagccgtcactcgtatatccggtctccattacagaagtcccggctgaaagcccgcctaaaattgccgctccgagatctccggccgcccggacattgacatcgctgctcacatagaccgtacgggccagcggcgtcagtgtctctgccggcttgtctgcagactgtgctttatatccggacagatcaggaagggcaacctccacaatctccccgagctgatgaaacttcacatcagacgtcatcagaaacgtctctgactgttcctgctgcgtcactgtataaacaagctgaatgctgcgggatgtcacatgcccgtctgtatcgacctgcatggttccctgcagcgaatcgatcgcaaacccctgctcattgcccgcaccctgcagcagcttttttgcatagtcgctgagcgtctccggtgtcgctgcaaagcgataggtcacgcttccatccgcatttttctctgaacagagcattttcagatagttactggtcagatccaggtacgtatttgcattaatcatctgccagatggaagcccggtccatctcccgcttcgtctttccgtcggatgtctccgcatagtaatggccgtctgtataatagctctcagaggccgtctcttctgacttcacctggatatccgcctttaatgtatctgtctgaatgccggatacctttaactccatcgtcttttccgccgccagattcgtcgcagaggaaaccgtccgctcggtcacagacacattcagtccttccagagtgtcctggccctgtaccgccgtattataggccgcctccagctccggctcaaaggccgcgtctgccggaatcccatatactccggcaaatagtgccatagcacacacacccagtaaaatttttcttctcatattccctccacctgattgtcctgcctatcttctcgccagctccttcgtgatatccgcccaactgacgccgcgttctgccatcagtaccatgacatgatacagaaaatctgaaatctcatacttgatttcttccggatccggattctttgctgcgataacgatctccgtcgcctcctcgccaacctttttcaggatcttatcaatgcctttatcaaacagatagtttgtataagacccctcctttggatgcacttttcggtcctgaataaccgcatagacatcttcaaatactttcagcggattggtatcgtcgtactcttttttcagaatcggtcggtaaaagcagctgcggttgcccgtatggcaggccgcaccgatctggtgtaccttcgccaggagcgtatcattgtcgcagtcgatcctcagctctttgacatactgaaaatgtccggacgtcagccccttgatccacaactcctgtctgcttcggctgaaataggtcatgcgtccggtgcggaccgtcgtctcaaaggcctcacggttcatgtatgcgaccattagaacctcctgtgtcttgtagtcctgcacaacaaccggaagcaatccgtcactgttttgtttcagctcatcaaaggagaccgacgcctcatacgtgttcaccgcaatgcctttctccttcagttcatgcttcagtgccatgaaatcaaagcccttcttctgaaaaacatcctcgcaaattccgacgcaggcttccgctgcaagtgctttttccggtgctacagcatctccactccagccatccggaatgctttctgtaaaaatcagtcccggacaatcctctttcggaagctccttggtcttctgatatgccgcatctgccagggcatacggcaaaagaattcctccaagcagctgcgcatgactgaatgcctcaatgagtgcctccttgcagcgaacacttgccattattttttcttttccgaattttcctgagacctcatgcgtcagctcaatattggactccttcgcgtaattcagaaataccttctgacagcccgcatagatcagctttttcacatcctccatccgcttgatatttccgcctccgaataccggaatatcaacggcctgtgccatctctttgatccggtggagtgccatgtcatgctcagcgtctccatttgaaaaatcatacaggataatcgcatcagccccatagttgctgtaatccactgcaagtgctgctacatcctcgccacctgcgagcatcccgccttccgggcgctgcagtgcctttccatctttcagataaaccggcactgccagttctttaaagctcatatcgtcccctgcctttctcttacaggcttccctttgtggaaagcacatctgtaatgcgcggatcatatccggtcgccatatccagtgccttggcaaatgctttgaacatcccctctgccatatggtgattgttcccttcagagagcattttaaaatgcagattcatcgctgcagagtaggaaacggcatagaaaaattcccgcaccgtctccgtatccagatcgccgatccgctccactgtaaataccgcatctgaacggtaatacggtctgccgctcaaatcgattgcgcaaagcaccagaacctcatccatcggaaggatctgactgccataacggcggattcccttcttgtctttgactgcctcgcggattgcctgcccaagtacaattccggtatcctcaatcgtgtgatggcagtccacctccagatcgcccgtcacctccacatccagatcaaacaatccgtggcgcgcaaatccattcaacatatggtcaaaaaatccgatcccggtatgtatatttgcctgtccggatccatccagatccagtcggatgcgaatctgtgtctcctttgtcactcgctctatctgtgaaatccgatgttccatctcatttctcctcttcctttgccgacattcctgtatcgtcccatccccctcacccgccgcttagtactccgtgcgcttgaagcagggggatgcctatctgcgttcaaaccgtactcggattgaattcgcatgtgccgtcagcttctctgcctctgcaaatgcaatgatatcctcatgaatcggttcaagtgcttctcttgaataatatacgatgcttgattttttaataaaatcatcgacggaaagtgcagagaaaaatttcgccgtgccattcgtcggcagcacatggttcggtcctgcaaaatagtcaccgagcggctcgctgctgtactcaccgatgaagattgcacctgcgttgcgcacctttgtcatgacctcaaacggattcgctgtcacgatctccagatgctcggatgcaatcgcatttactgcatcaatcgcattggccatattgtcagccagcaggataaaaccgtactgatccagagacttctgaatgatctccgctctggaaagctcctttaaaaatccgtcgatctcctttaatacctcttctgccagcgttttacttgtcgtgacaaggatcgcggaggccatctcatcgtgctcagcctgtgagagaaggtctgccgccacatagcgcggagtcgccgtctcatcggccagtacaaggatttcgctcggccctgctacagaatcaatgctcacatggccatagaccgcacgctttgccagcgcaacgtaaatattgcccggtcctgtgatcttgtctgccttcggaatactctccgtgccataggctaaggctgcgatcgcctgagcaccgccgaccttataaatctcatctgttccggcctcatgcgccgctacgagtgtggatgccggaatctttccgtctctcccgggcggcgtcgtcataacgatccgtccgacgcctgcgaccttggccgggacgacattcatcagaaccgaagacgggtaaacggcctttccccccggtacatagaccccgacagttccaagcggtgtcaccttctgtccaaggatcgtaccattctccgtcgtatcaaaccagctgtattttttctgcttctcatgatagctgcgaatgttgacaagtgatttgcggatgacatctaaaagagacggctccacctcgcggtatgcctcctcgatttcctccggcgtcacacggatcgtctctgccgtgagctccactttgtcaaactgcttcgtgtatgcaaaaagcgcctcatcacctttcgcacgcacttcctgaatgatcgcctgcacccgctcctcaaatgcgccataattgttcgggctgcgttttaaaagatggttcagcagatccttttttgtctcctgtgtcagtgttacaagcttcatgacgattcctccctgcctcaattcttctccggccccgaaacgatccgattcagctcgttcagaagccgggtaatccgttcattttccatccgcatgctgaccgggttcaccacgacccgtgccgacagcggacatacctcctcgagtacctccagtccgttctcccgaagggttgaaccggtctcgacgatatccacaatcacctcagagagcccgacgatcggtgcaagctcgattgagccgttcagcttgatgatctcgaccgtctggttacgctggttataaaaataatcttttgcgatattcgggtacttggttgccacacggatcagctcctgaccgccaagcagtgcctttgcctccttcggcccgcaaacacacattcggcatttaccaaagccaagatccagcacttcataaattttacggccttcttcgactatcgtatcctttccgacaacaccgatatccgcagccccgtactccacatacgttggaacgtccggtcccttcgcgagaaaaaaacgaatctttaggtcttcatttacaaaaatcagctttctggaatccggatccttcatctcctcgcaggtgatcccgatctgttccagaagctccagtgttttctttgcaagccgcccttttgtgagggcaaacgtcagatagcgtgtctctttttccattctgtcactctccatgctcctctgctccacaggcaacaggcagtccatgccgacagcggctttcccgccggagtccggaaatacccggtgtctgcagcagaaatcccctacagttccaccaccagcacgcagtcctttgcttttgcataggctctgcacgcctcgcgggatcttccggcggtaatgcgcaccagctccacatcaatacctctcccccgaagctccgatgccttctcaatcgcctcaggcagcttttctgcttcataaaggatcatacagtgattcgccggtatctgctgccggatcttctgacggcttaaggcgttcaacagctgatcgatgactgctacaaagccaaccgcaggtgcattcatcccaaaatgctgcagcagatcgtcatagcgaccacccttgatgatcgcatctccggtcccgaatgtgtagccccggaacatgattccggtatagtacatatagccgctgaccataccgaggtcgaaggaaacatactgttccactttatatagcttcagaatccgccatatctcgcgcagtcgctccagcgccgattgcgcatccggattcgtcgtcatagcggcagccttatccagtacttcctctgtaccaaacagactg

SEQ ID NO: 3538 - DNA, 32759 bp, Unknown
  16S sequences of unknown bacteria
aattagcccaaacttatacgcctgtggacattgtgtaagacattgagttgcgtaacaccgcagccaatgcagtagtggttgaagcaggaagctccgacttatataagtcggagtagttcacaggtaataggatgttctgagaagttatgggaaacggatttaagcagcataccgtttcccttgagagagaaaaacgaataatgttaagcaggcaattcactgaattaaggtggattgtctgtttgcgtataggagaaaaaacgggatttcgacagatatgtatattgattcaatagttagaattgtgagttggcactgtgtaaaaaagtgcgtgaaaaaggtggtttttttaaatgaattatgtcgaaagtgtgtcaccttttggcgaaaaggtgtatcatataagcagaaacttttttatgaggagaaattatggttttcagcagctttgaatttatactttggtttttgccgttttttttacttacatattacagcattccggacagatacagaaatctgtgcatttttatatttagcatgattttctatgcttacggagcgcttgcgcagccggtatatatactgattctgcttgcttcgataggtgtaaactatctggcaggtctgtgcattgccgggattcacaaatacagaaaactattccttatagcagggattgtaattgatttaagtgtgctgtttgtattcaagtatgcagacttctttatcgaaaacatcaacagattcgggctggatctgcctatgcaggagctggtgctcccgataggtatcagtttttatacattccaggagatatcatatctcatagatgtataccgcagagatattcatacggagacaagcattctcaacctcggcacatatatcgttatgtttccgcagcttgtggcagggcctatagtgcgctatgaaacaattcgtgacaggcttgagcacagagtatgcaccagagaggatttcatatacggcgtcaagctttttgtagccggacttggctcaaaggtgctgcttgccaacagactttcagggctgtggcaggcggccggaggcataggctatgaatcaatatccacacctcttgcgtggatggcagctgcagccttcagctttcagatatattttgacttttacggatactcccttatggccataggcctcggcaaaatgttcggctttgagcttccggacaatttcagacatccgtacatttcaaagtcgatgacggagttctggcgcagatggcatatcacgctgggcgcgtggttcagagattatgtgtatattcctcttggcggtaatcgcaagggcataggcaggacctatctcaatctgtttatagtgtggacacttacaggcttctggcatggagcgagctggaactttattctttggggaatgttcctgtttgcagtcattgcagttgagaaatcaggacttttgaagattcttgaaacccacagggtgataggacatatatacatgataatacttattcctgtttcgtggatgttctttgcaattgaagacgtttcggatatcggcgtgttctttcagagaatgatcggtgcaggcggagtcaatgtattcgcaggagatttcattaaatacggcatgcagtatggaatatttctgctggcgggaattatattctgcacacctctgccgagaatgattttcaggaagcttcagaacaaatatatcagagctgcaattctggcagctgtagcggcaggctctttttactgcatttacaagggaatgaatgatccgttcctgtacttcagattttaggtgggtagggtattatgagaagaaacaaatcagtcaaactatatataataattgttcttgtccttattataggattcatggctgcaggagttaaaatttttgcagacagaatctctgaaaacagcgaagcgggcgaggctgcagtaaacataaaggaaatacagaaaatagacagattgctttcagagcagagcttcaggcccgatacggtcaaagcggctctcggcaaatatgacggcaatgcaagtcttacaactccggaatttcagaaggctcctgacggatattttgaagacgcattgtttataggcgattcccgtaccgtaggacttaaagaatacggcaatatatcaggcgcagacttctttgccacggagggaatgagtgtctacggcatatacaaagaaaacgttaatatagagaattttggtgcaatttcatttaaaacattaatacagagcaaaaaatatggtaaaatatatattatgcttggcataaacgagcttggatacaggctcagtgatactgcagccagatttgaaaaactggtgaacacaataaaaaaatatcagcctgacgcgataatatatatagaagccaatctgcatgtgtcatctaaactttcaaagagtgacaagatattcaataacagccggattgacaggtacaacaatatgcttgcacagattgcagataatcgaactgtcttttatattgatgcaaatgaaatgttcgatgacagagaaggcggccttggagaagaatacacatctgatagtattcatattatgggtaaatactacagcgactggggctcatggattgcagaaagggtgattgtcaagtaattacaggcagggaaagaggagtcggatgccgtatattaaaagcagcagctggttttgcagcagagtcgaaagccttgaaaaaagcatgtaccttctggcagtaagcacactcaaaaatgattatgatgcagaggatgccatgcagagcgccattcttaaagcctacgagaatttagatcagctcagagctgcggataaattcaaaccatggcttttcagaatcctcataaacgagtgctacaggctgctgaatgacaaaacatacaatgtggatatagatgaatttacggacataggggaaacacaggaaaacctcgatgacaggattacattgtgggagactgtaaatcgtctggatgacgaatatcggatggttataattcttttttactatgaaggcatgaaaataaaggatattgcaaagactcttgaaatttcagaggcgaacgtcaaaaaaaggcttcagagagcaagggggcatttaagtcagatgctcgacagggaggattttcaatgaaaaaaacagacagaaaaatcaggaaaaatctcagaactgatgcaccttgtgttcctgaaggtttcacagaaaccttcaggagaactcttgatgagataaagacaacaaacagacgcagccgcaggagactgtggcagacggcagcagttgcggccgcagtagttgcagtcacctttgttattataccgaatgcaagtcagagcgctgcatatgcgatgcaggacataccggttataggcagaatagtagaggttgtaacaataaacaaaaaacacataaatgaagctgactggcacgagaatgtggaggttgcgcagattgagggagacaaggctctgagcagccagattgactatatcaacgcggatatcagagaattgaccgatatagctgtcagtcagtttgaggaggagcgaaaagaacttgaacgtaggaatcttacggcgcataccggacttgatataagctatgatgttctgatgaatactgacaagtggttcaccatcaggataaatgttttctattccgcaggcagcggtatagcagagcagcatttttatcacatagacaagacaaaaggaatagtcgccggactttcagatctatttgatgataattttgattatgtcagtgtattcagcagggaagtcaaaaatcagatgaaggctcagatgaaatccgacagttccagaacatactggctcggcacaggcagagagctgggctatgaatttgacaaaatagacagggaacagaatttctattttgacgatgacggcaatatagtgctggtattcagtaaatatcaggcaggtccgggttatatgggctgccctgagtttacaatagccgcaaagaaattcaataagcatttgaaatagacgatatgaaaccgcaggaggctgtaacaggcttaatgcggttttgttattgtgttttagtttattttcagtttattttctgctatacttaaatcataaacagagtttacaaggagcagcaggatatgtttaagataatggtaacagaagatgacagaaacacctccaagcttatgaaagcgattataacaagaggcggctatgaggtggtgtgcgctgctgacggcatagaggcgctggagcttatggacaggcagcatatagatttaatagttttagatgttatgatgccaaatatggacgggtacgagtttacggacaccctgcgaagctgcggagataacacgcccatacttatggttacagccaaggagcttcccgaggacaaatgcagaggctttatcgcaggaactgacgactatatgattaagcctgtaaatgaagaggagctgctgcttcgtataaaggcgctgctcagacgcgcgcaaatagcaaacgaaagaaagctttacataggagatgttgttctcgactatgactctctgaccgttacaaagggaggagtgtcccagagcctgccgcaaaaggagttttatcttctttacaagcttttgtcatatccgggtaagatatttacgagaatacagcttatggacgaaatctggggtatggactcccagtcggcggatactaccgtaaacgtgcatataaacaggctgcgcaagcgttttgagggctttgatgagtttaagatcgtagccatcagaggtataggttataaggcggtgaaaacctgtgaatagactaaaggaaatatttcagaagcaccagcttcctctggcatatacgggcgtaaccataggggttatgattatatcctttgcaattatgtttgtgggaagatttctgttgagaagcataggatttatagaggatattccaaggctctggcagcttatatcccttgcgtttctcgcagttgtaataggggctgcggtagcggcggcattcagcagaattccgttaaagcctcttcgcaaaatagcggaagctgccgacagacttgcggcgggagatttttcggccagaataaatctcaaaatgggcggagaacttcaggagcttaacaccagctttaacaatatggcaaacgaactggagcagagccagatgcttcgctccgatttcataaacaacttttcccacgagttcaagactcccattacatctatacgaggatttgccaaaatgataagggagcacaacctcagcagagaggaaacagatgagtatcttgacataattattgcggagtcggacagacttgttgacctttcggccaatgtgcttaatctgtcaaaggttgagaaccagactatccttaccaatactgccgagtttaatctcagcgagcagatgcggagagtcatagtgcttctcgaaaacagatgggaagaaaaaaatctgtttataaatcttaactgcagcgaggtgtacataaacggcaatgaggaaatgctcaagcaggtatggataaaccttatagacaacgcgattaaatttgcagataaagacagtgagataaatattactatacttcagggggcaaaattcgtgtcggttacggtttcagacagaggtgaagtaattgcgccggaggttttaggcaggattttcgataaattctatcagggagatacctcacacggcgttaaaggcaacggactgggacttgcggtagctaccaaaatagttgatcttcacaagggcagcataagcgttataaggtctgatgaggagcagacggcctttgaagtcagactgcgcagatagacactataaacggataaagtactaaattatatacagaaaaatctgaaaaaacattgtgcgggcgcagggaaaatgatataatagaggaaatatatcagaaaggggcgggtttatgctttttaaaaaggaaataagaacaactcgaaatctggaagaacttaataaaatcagggatactctttcacaaaacggtatcgaaacctctgtggttacaaatgcacccacaaatccgggccgccatcacggagttccctgtattgatgcctctgcggcatatcagtaccagatttatgtagcaaacaaagatgagaaaaaagctttagaaattctctacagctcacagaactaaaaccggcagtgggtgctgccggaatttttttagaatatatcttctattacctcttcaggcggtgtatccagtctttcggggtgtcttagacagcctctcagtattttgagggtagatgcgaaatagtagccgtcgcatatacgctcatctgtaaccaccgtataatccacatactttctttttaccacctgaccgttgtcatctatttcatttacgctttttttggcgccgaatgaaatgaatacaggcacgtttccgaagttgtacagatgatgataaatcggcgggatcccgagagaacccatagatgttatgaacatactgccatgaaaaggactgacgttaagcagaaatttcggcagcagtccgaagtagtcaatggttttgagaaaccatattgcaaacttcttgattagcctcggtatgtaatttataattctggcagtgttgtcgaaatcactgtcaagctcaccgcctttgctttcatctatcacggttttcatcttgtaatatacatcgtctgccgtatctgtaggctcaaacacgattttgactaccgtatcaggtgactccagcgtcatctctttcttgacatttatatttatttcgatacggtttctggaatagactctctgacccgaaacaaatctgtttacagcaggtctctgagatatacatctgatatatgcagccactataatgtgcattataccaaaacctttcagtcctgatttgcgcttgcggcgtatgtactcatctatctttgaaacctcaatactgtctctgataaaattactggcgtcgtttcgctccaccattataaacggggtgattttgtgcataggtgtaagatttctgacgagtctgccgtcgcctctgtcaccgagccgcctcttgtacttcttttctgacataataattcctttccggatacgcattaaacctctgcctatgagatgcttatcaggtcaagatggaaaatacctgcagaaataactgcggcgtgtgaaagcccataacttccgataaacacataagcaaacagaccggcagcatatccgataaatccggcctgaggcaaaattaaatctatataaataatacagtatttgggcaaactgtcaactgaaaatgcggcgataaaaaatgcggccaattaaaaaagacaggcaaaaacagctattgacagcagctttaagcagccatataatagatatatgaataatctgtttcagggcgaggtgcaattcctcactggcggtaaagtccgcgagccttcgggttgaaccggtgaaactccggtaccaacggtcatagtccggatggaagaaactagagttgttttagttttttgtgtgccccgaaatccggggctcttttaatgacctgacagattcctaaaaaccaaaagaaaagaggaatcaaaaatgaacaacaaaaaaacagtaagacttgcaaaaatgggtatgcttgttgccatatccgtagtactggcgtactttgtacacttccctattattccgggacttaacttcctggaatacgatccagcggacatctctatattcatagggacctttgctttcggaccgctgggcggtatagcgctcacagtagtgacatctttaattcagggacttacagtcagcgcaggcagtggagcctatggtataataatgcatataatcgctacaggaacctttgtactggttgcaggcaacatctacaggaagcacaagaccagaaaatatgccatgatagctctcggagcgggaattgtttcatgggttgtagtgatgttctttgcaaaccttttcattaccccgctgtttatgggagttacaagagatgttgtaatgcagatgatgccgcttatcctgctgtttaaccttatcaaagcgggagtaaacagcgttattacattcttcctgtacaagagaatttcaggatttttacacaaatgatgatcaaaagagaacttataattaaaaacgaaaacgaaacaagagaatttgctcttaaacttgcagacgagcttaaggccggcgatgtgctggcccttataggcgatttaggtacaggcaagacagccctcactaaatatattgcgcagggccttggcatcaaagacagcatagtatcgccgacctttacaattgtccgcgagtataccgatggcagactgcctctatatcactttgacgtttaccgccttgcagactcggaggagatgtttaatataggagccgaggagtacttttacgaaaagggcggagtctgcgttatagagtgggccgatatcgtagaggatatacttcctgccgataccaaatatatatatatcgagtacggagcttcagaaggagagagaatatacaaatgtacattttagctttagaaagcacagggcctcacgcttctgtggctttgacagacgaaaacggcaatatagaggagatagtaaatccgggcagactcaatcaccttgaaactatgatacctatggttgatcagcttattaaaaaatgcggattgcagttaagcgatgtaaccgcagtggctgcttccaggggacccggctcatttacaggcatcagaataggcgttaccacagcaaggacgctggcgcaggctctgggcatagagaccataggtgtgcctactcttaatgctttctgctacaatcagagggactttgacggtctgatatgccctgtgtttgatgccagaagaaatcaggtgtatgcgggagctttcaggtggacagacggacagattgaaaccgtcacagagcccggagcatatatgatagatgaatttttagaaagccttaaagggatcggcgggcagcatatgttctttggcgacggcattaaagtgtacggcgagagaatattcgaagcggagccctccgcagtgcttgcgccggagcctgtaagacttcagagagcctcatctgttgcggctatggcccttgatatatataacagagagggaacgcaaagctacggcagcctgctccctttatatatgcgcaaggcggaggccgagagaaagctggaggaaaaactcaaaaatgaacagtccggtaattagacaggcagtgctgcaggatgcgcagcagatggctgagcttgacagaatatgcttcagcgtgccatggagccttgagtcgtttgtgcaggagctttcggtaaacgagagagccatgtattttgtagccgaaattgacgggcagattgcaggatatgcgggactttggcagattgtagatgagggtcatatcaccaatgtggccgtagcgccgcagtttcgcaggcagaagcttgcaacggcaatccttgaggcttttcttgcagagggcagagctcgcggcatcagagcctttacccttgaggtcagagcctccaacatagcggctcaggaactttacaggaaattcgggtttcagagcgcaggctacagacccggatattatgaggataacaaagaagctgcaatgataatgtggcttgctgaataaaccccgcaaagaactgcaatactagcagtatggaggttcttatgcgacagggagattatgattatgagtttggcagtgatatgagcgtggcttcatatcactgcagcagattttcacgcagacacgattttgacacatttaatatgggtacctatcagtcgtgtgaaaactgcaggcatatgggctctgacggcgaatgcatagccaaaatgagcggtatgcctatgaggcaggagtaatcctgtctttacatagaggtagacaatgaaagataacaaaacaataattcttgcaatagaatcaagctgtgatgaaacttcagttgccgttatggcagacggcagagagatactttcaaatataatttcgtcccagattgaaatacataagctctacggtggagtggtgccggagatagcctcaaggcatcatcttgagaacatcaattttgtaatagagcaggcaatgacagaggcggatatcaccaaagacgatatagacgccataggagtaacctacggtcccggacttgtgggagccctgcttatagggatagcggcggcaaaggcgctggcgctggcgtgggacaaacccctcataggcgttcatcatatacaaggtcatatttcggctgcatatatagagcacaaagaacttgagccgccgtttacggcgctggtggtttcgggaggacataccaatatcgttgaggttacagactacaacagatgcgagatactgggaagcacaagagatgatgcggcaggcgaggcctttgacaaggtggcaagagttataggtctgggctatccgggaggccctaagattgataggctttcggaagagggcaatcccaatgccatagagtttaaaagagtttatctcgaaaggggcagccttgatttcagcttcagcggtatcaagactgcggtgcttaattatgcaaactctgagaagcaggcaggcagagagattaacagagccgatgttgcggcaagttttcagcaggccgttttagaggttattgtaaataaagcagttgaagctgccgtaagcatgcacaaggacagactggtaatggcaggcggagttgccgcaaacagacacctaagagccatgcttgaggaggcatgcggcaggagaggcatcagactctactgtccgtcacctgtgctttgcacagacaatgcggctatgataggtacggcagcctactacaaatacaaggcaggagaaacagacggacttgacctggatgcatttcctaatcttcccctgtagctaaaggacatacagatgataatattatcggcaaacggcattacaaaagcatacggaacagatgtgatattaaaggacatatcatttcacataaacgcaggtgacagagtgggacttatcggacttaacggtgcgggcaagaccactctgcttaacatactttcgggcgaccttgatgcagacagcggcaacgtgtttgtttcaaacgatacggtaatcggctatctgaggcagaatgacgatttcacatcggaaaacacagtcatagaggaaatagacggcatatttacggagcttcacagaatggagagggaaatgccggcgctttcacagcagattgcagaagccacggcatcgggaagcaaatcgcctcaggaaatcgaagtcctgcttcacagatacgatcagatgcaggaggattacgacagagccggcggatatacatacaaaggcgagattcggggcgtgctttcaagcatggcgtttgcagaggatacatacaacaaaaaaataagcatgctttcgggcggtgagaggacaagacttgcgctgtgctgtctgctccttaaaaaaccggacatacttatacttgacgagcctaccaatcatctggacataggcacgctcaaatggctggagcagtacctgagaggctacagaggcaccattataattgtatctcacgacagatattttcttgatcagagtgtaaacagaatatttgagatttcaaatcataagctgagagtatatgaggggaattattccgaatatgcagttaagcgaaaggaaatacgtgaaaacgaaataagaacctaccagaagcagcagactgaaatagcccgtcaggaagaaatgataaggcgcatgaaagaaagaggcacagagaaactggcaaagcgcgcagcctccagagaaaaacgccttgagcatatcgaaagacttgaaatgcccgagtccgaaaaaggccggatgaagcttcattttaaagagaacttcaaaagcggcaatgacgttattcttgcggagggactgtcaaaaagcttcggatacggtcctgagcgcaaagaactgtttcgcaatgtggatcttgatatcaagagaggagagaggatctgtatagtgggacctaacggagtgggcaaaacaacacttctcaaaatcctgcttgatcagcttgagcctgacagcggcagaatcaaaatcggatataatgtggcgtttgcatattacgatcaggggcagagacttctcaattctgcaaacacagtgcttgaagagctcaaggagtcctacagactctacaccgatacagagatgcggtctctcctgggcagatttcttttcagaaatgaagacgtttttctgaatgtaggttcgctgtcgggtggcgaaaaagccagactttcccttattaagataatgcttagcggcgccaatgtgctggtgcttgacgagcctaccaaccatcttgatattgactcaaaggaagtctttgaggaggcgctgcttgattttccgggtacagttatagttgtgtcccatgacagatattttcttaacaggattccgaccagaatactggagcttgaaaacgatggaatacacgaattcctcggcacatatgactattatgtggagaaaaaacagcagattgaatcaggcaaaaaatatcttaatgaaatggcaggggcatccaaggcgcaggaagcggcagaaaacacaggctcagcagaggagcgccgccgcaaaaaagagcaggaggccgcagaccgccgcaaaaagagagaaattgaaaatctcgaaaacagaattgcagagcttgaggctgccatagaggattttgaagcgcagatgtgtcttgaagaaaacctttcagatcacgtcaaactggcaaagattaacgaggaatgtcagaacgcaagagatgagcttgcagaggtttatgacaaatgggttgaaattcaggaataattaaaaaaatcattgcaatatataacggtatattctataatgattttgttatattcacaaaatgaaatttaagaagccgcagagcgtttatcatagctgtgcggtattaaataagatttataaatgaaatggaggcctttacaaatggtttttgaaaaagtaagagaaataatagtagaacagcttggcgtagatgaaaacgatgttacaatggatactcatcttatgaaggatcttgaagccgattcccttgacgccgtagagataattatggctatagaggatgaatacggcatagagattcctgatgaggacgctgagaaattccagagcgtaagcgatctggtgaagtttgttgaagcaaatctgtaacttagttgagctatatccccgctgcagcagcgggattttttcacaatgaaagaaaaggaggcaggcgatgaaagacgatactaagatttcacaggcggtaatcaaaagactgcctagatacagaagatatctgggagagctgcagcgcaagggtgttgacaaaatatcctcaaatgaattcagcaagcttatcggctacactgcatcgcagataagacaggaccttaataatttcggtggcttcggacagcagggctacggctacaatgtaaatgcgctgtacaatgagatcagcgccatactgggacttgacaagcagtacaaaatggtcattatgggtgcaggcaatctgggtcaggccatagtaaactatacatattactacaagaccggatttatggtttgcggagtttttgaagtaaatccaagacttataggcatcaagattaatgacatagatgtaatggactatgagaacacagtagagtatgttgaggagaacaatatagatataggtataatatgcactactaaagagaacgcgcaggaggttgcggaccgtctgtgctttgcgggcatcaagggcatatggaattttgctcctgttgacctcgaggtgccaagccatgtcgccctcgaaaacgtgcagctttcagagagccttcattcactggcatatcatatcaacagagagtgcgcagcacaaaaggaaatcaaagaaatcaaagaaaaatgcaacaagtgctccgaacggggcgaggaatgcaaaaaaagaggggaaatctgcccttacgaggtacagaattcctcaggaaaataaaaggcaggaatggtttgcatatatatgaacagtaaaataaccgtttcgaaagaaacggttattgatatttaatctgctcttatctactattcttctacaggagcatcaactggacatgcgttagcgcaagcaccacaatcgatacatttgtcagcgtctattgtgaaaacagcgccttctgcgatagcatcagtcggacattcagctgtgcaagctccgcaagcgatacaagcatctgtaattttgtaagccattatgtaacctcctttagatttatcattaagatatattacacattatagcagaacgatatggagaagtaaagatgaaagtttacgcattggtcggaaaaagtgggacaggcaaaagttatcaggctgtaaacctgtgcaaagaacttaatatagaggcaattatcgatgacggactgttcatagagggtaatgatgttgtggcaggtatatcggccaaaagacaggcaactatgataggcgcaatcaaaacagccctgtttacaacagatgagcacaaggaagcagttgcagccaaaataaaagaaataaaccccagaagcatactgatactgggtacttcagatgaaatggtaaacagaatagctgcaagactggaactgcccgaaattcaaaaaagaatacgcatagaacagataaccaccgaaaaagagcgtgaagaggcaagacatcagcgtcaagatttcggcaagcacgtaatacctgtgcctacatttcagctgaagcgtgattttgcgggatactttgtggatcccctcaaaatattcagaacatggggcaaaaacaaaggcagcatattctctgagaaatccgttgtaagacctacctacagctatctgggggattacatgatatcggacaaagtcattgaagatataattttcaatgtggtgcagaggtcaggctgtgttcgaagtgtagtcagagcagatatacttcagcacgaagaaaaccttgaaataaaaattctggtatttatgcgaaaaggctgtaatattattaatgaggcaaaacagcttcagaaatccataaacgaaaagatagactatatgacggcatttaatgtagaacgtgttgacgttgagatacggggactgagataatgattgaaattaacggagtaaaagattttaatacagaccatatatttgactgcgggcagtgcttcaggtggaacagggaggctgacggcagctatacgggcattgcagggaaaagacctgcgaacatagcctacagggacagcaccgttgttatagacaatgccggtgatgatgaacttgatttttggagaaactatcttgatcttgacagagattacgggcagattaaaaagacactggcggcagaggacgaggttatacgaaatgccatagactacgggcagggcatcagaatacttaatcaggacagatgggagacaataatctcctttataatatcgcagaacaacaacataccgagaattaaaggctgcatcgaaagcctgtgcaggaatttcggagaatatgcaggctcctacagaggtgaagaatactattcaatgcctgcgccgcaggtgctggctgcacttgacatagaggaccttgcgccggtaaggctgggctacagagcaaaatatataatagaaacctcaaaaaaaatagcggcggacggtggtacagagtttcttgacagcgcctttgacgaaagcagttcaggtaatgtcgtgtatgaatatcttaccggtctttgcggagtgggacctaaggttgcaaactgcataatgcttttctgcatgcagcagtatgacagctttccggtggacgtatgggtcaaaagagttatgaacagactgtacggatttgacgagtcggatataaaggggatgaagaactttgccgccgataaatatatgaatttaggaggatttgcacagcagtacctgttctattacataagaagtttagaaaaatagtataaaacttgggaaatagtattgacaacgggaaaaaacaaggtaaaatatagttagcactcgaaagtagtgagtgctaacaaacaagtcgataatataaattatatagagaggagaagtcagaatgagttttggaattaaacctctgggtgacaaggtagtaattaagagagaagaggcagaggaaaagactgccagcgggcttatcatagcaagccaggcaaaggagcagcctcaggttgccgaagttatggcggtaggtccgggaacagacgaatgcaagatggaagtaaaggttggagataaagtaatctttgcaaaatatggcggtatggaagttaaatacgagggcgaagtttacacaatcctgagccagagagatattatggctgttatagaataatagaaaagaggtattgaaatggcaaaagaactatattacggcgaggaagccagaagaaaattacaggcaggcgttgacaagcttgcggatacagttaaaatcacacttggaccaaagggcagaaacgttcttttagacaagaaattcggttcaccgcttatcacaaacgacggtgttacaatcgcaagagaaatcgaacttgaagatgcggtagagaatatgggtgcgcaggttgttaaggaagttgcaagcaagacaaacgacgttgcaggcgacggtactacaacagctacacttcttgcacagtcaattatcagagagggcttcaagaacgtggccgcaggcgcaaaccctatgattatcaaaaagggtatacagggagcaacagaggttgcagtagagaacatcaaaaaaatcgcaactcctgtagaaacaaaagaagctatagcgcaggttgcagcagtttcagcagcagatgcaactatcggtgaacttatatcagacgctatggagcaggtaggcaaggacggagttatcactgttgaggaatcaaaatcaatgggtacaactcttgaggttgttgagggtatgcagtttgacagaggatacctgtcagcatatatggtaactgacacagagaagatggaagcagttctcgaaaatccgtacattctgcttacaagcaagaagatttcaagcatacaggatctgctgcctctgcttgaacaggttgtaaacacaggcagaaagctgtttatcgtttgcgaggaccttgagggtgaagcacttgcaactctggtattaaacaaactaagaggcacatttgaatgtgttgcagtaaaggctccgggctttggcgaaagaagaaaagcaatgatggaagaccttgcaattctgacaggcggtacagttatcacagaagaactgggatacgacatcaaagaaacaacgcttgatatgctgggaacagcagcaacagttaaggttgacaaggaaaacacagttatcgtaggcggcggcggagatgccaaggagattcaggacagaattgcttctctgagaactatggcagctcagaccaactcagaattcgacagagaaaaaacactcgaaagacttgctaagcttgcaggcggtgttgcagttgtcaaggttggcgcagctacagaaactgaattaaaagaaagaaagctgagaatagaagatgctttaaacgctacaaaggcagcagttgaagaaggcatcgttgcaggcggcggtgttgctcttgcaaacacaattccagcaatcgcagcttatgttgatacactttccggcgatgagaaaacaggcgctcagattataatgagagcattagaagagcctgtaagacagattgccgaaaacgcaggctttgagggcagcgttgtaatcgcagaggttaagaacagagatgcaggcgtaggcttcaatgcggcaacagaagaatacgttgacatgattgaagcaggtatcgtagaccctgcaaaggttactaaatcagcgcttatgaatgcagcatcagcatcagcattactgcttacaacagaagcaggtatcgtagacatcaaggaagacaatcctcctatgccgccaatgggcggaggcggaatgccgggaatgatgtaaacgccttaacagtaagacatttgaacacaagaccgctcgggaaaccgggcggttttactcatattccttgcactaaacatcataattccgttactatggtgattaattatatttgttacctgatgaaaagagcgtatcagccatatgctgagtgatttatagcagataactaaaatgcctaaatattttatatttgatttagtaaatactatatattagaatataataaaatatggtgttaaagaaaaggagatgagcttatgacaaatcaggtttattctgtttcggaaatcagaaacatattattacctgtctttgtcagatatgagataaacagagcaatattatttggctcgtacagcaaagctgcggcaacggaaaccagtgatgtggatttgttggtagacagcgggctgagaggtctgaaattcataggcttatcagaagatgtgcgtaaggcattagacaaggatatagatatctttgatgtaacacacatagaaccgaattctaaaattgatgatgagaacaaaagtacaggggtgctgctttatgaaaaatgagattattgtaaagaaagctatagggtatgaagaagtattgaggatatagtattgaagtcggaaaagactttcaaaagcatactggtgacaggtgcaaggcagacgggaaaatcaaccgttcttcaaaaactttttcccgaaaagaaatatgtgcctgtagatgacccctttattgaagaacaggctgtagagcagccggaaatgtttatgatgcttaatccgccgcctgttatctatgatgaagtacagagagcgccgaaccttttcagatatataaagataaagtgtgatgagagtgacgagcgcggattgttctgcctgtccggatcgcagccgcttgagcttatggagggcgtgtcagagtccctttcagggcgcattggcattattgagctttcagggctttctatgcgtgaaatcaaaggcgacagctttaatcgctcttttgttccgacaatggagtacgttcaggagcgcagtaaaagtgtcaaaccctttgataatatatgggaagttatacacagagggggatacccggagcttcagaacccggaagttgactggtccgtattttattccagctatataaaaacatatctcgaaagagatgtgcgcagtctgtccgcagttcagaacctcgatgatttcaggaaatttatgattgcagtcgcagcaagaaccggacagatgattaattatgccaatatagcagatgaagtaggcaaagatcagagcactataaaaagatggctgtctgttcttgaagcttcaggtataatatatcttttggagccgttttcctcgtctgtactcaaaagagcaataaaaacaccaaaggtatatttcagggatacagggcttgccgcatatctgacaagatggcttacccctgaaacccttgcaaacggtgcaatgagcggtgcgttctttgaaacctttgtgatttcggaaatactgaaatcatattcaaacagaggcatagactacaggtattgcgtgtcctattacagaggtagagataagaaaaaaacatcagaaaatgaaatagaccttattattgaagaaaacggaacgctttaccctgttgaaatcaaaagaagcagcaaagtgaccgcagatcagacttctgcattttctgtgcttgacgggataccggacaaaaaacgcggcatgggagccgttatatgtatgtgtccacagccgggagtgcttagggaaaatatactccagctgcccgtatggtatatataaatttgctgctgttttgggatgtaccgtcagcccctgcaatccacagagcctgacacagctttaggcgttttgcggcggctaacggcacaggcgacatataatttatttgctttaattgcaaaagccccttgccagcatatattttttgtgtaataattaagacatcagttgaatagattttgtttactaatatatgttctgtatgatggcctgaacgtttctaccgcgcgccgaaaaaaagcgactattagttgataataatgcatatcatttcctcgcagcagaggtctgatttgcattgtatttcgtattagtaaacaggttgttttaacctgtttttcttttactgtacctgtcataaccgacgataagcggagtaccgcaggggagtgacaggcgaagctttagccgattgtccgggcagacaactatctcatatattagggatacgtgtctgcctttttgtttttgatagtttatgactatggaggatttatgaaaaaaataggaattgtaatgggaagcgactcggatatgcctgttgtgtcaaaagcaatagataccctcaaagagtttgaagtgccgtatgaggttcatatatattcggcacacagaacgccgcaggaggctaaagcctttgcgcagggcgcaagagcaaatggctttggagcaatcatagcagcggcaggaaaagccgcgcatcttgcaggagccatagcggcaaacaccacacttcctgtaatagggataccggttaaatcatcaacccttgacggacttgacgcattgctatctaccgtacagatgccatcaggaatacctgttgcaaccgttgcaatagacggagcggccaatgcggcgcttctggcggttcagatgcttgcaattgaggatgaagctcttgcgttaaagctttcggaacagagaaaagcaaacgcacagaaagtacttgaaaaagatgctgcaattgcagcgcagttaaataaataacattattatggaggaacaaacaatggaaaagaaactcgtttacacaggaaaaaccaagaatgtatttgcacttgataacggaaactatctgttaaaattcaaggacgactgcacaggaaaagacggagtgtttgaccccggtcagaacgccgtaggccttacaattgagggtgtaggcgacgtaaaccttcgtatgtcgatttacttctttgaaaaaatcaacgcagccggcataagaacccactatgtaaatgcagaccttgacgaaaccacaatggaggtactgcctgcaaaggtgttcggaaacggacttgaagtaatctgcagacacaaggctgtaggctcatttttcagaagatacggcgaatatatcgaagaaggcgcagacctgcctgaatacgttgaaatgaccttcaaaaacgacgaaaaggaagacccgctggtaactaaagacggccttgttgttctcggagttatgacagaaaaacagtatgacgatatcaaggctatgacacagcagataacaagaatagttgcagatgatatgaaagaaaaaggccttgtgctttacgatataaaatttgaattcggatacgacagggacggcaacgtaatgcttatagatgaaatcgcatcgggaaacatgagagtatacaaggacggagaatatatagatcctatgactttatcagagcttttcttcagtaaatgctagggaggaataaatgggaggatattttggtgcagtgtcgggacgcgatgttgtattagatgtgttttatggtacggactaccattcacatcttggtacagccagaggcggaatggctgcatacgatgaggaatacggtttccagagggaaattcacaatatagagaattcacctttcagaacaaaatttgagggtgtatgcgacaccatgagaggcaggtcctgcatcggctgcataagcgacggcgacccgcagcccatactgatacgctcaaatctggggacctatgcgatagttacggtaggagccgtaagaaactcgcaggagctgattgatcagtttctggctttcagcggaggacattttgaagccatgacaggcgggaaaatcaactccacagagctggtcgcctcgatgataaaccagaaaagcgattttcttgagggaattaaattcgcacagagcattatcgagggctcggcttcaattgtaatactaaaagaagacggccgcattatagcggcaagagataaaatgggcagaaccccgctgcttataggaaaagacgctgacggacactgtgtgtcatttgagtcctttgcctacgaaaaactggggtatgaaacagttaaagagctcggaccgggagagattgcggagatatccaaagacagcatagatattctgcaaaagcccggcagagatatgaaaatatgcgcgtttctctggacctactacggataccccaactcaacctatgagggagtaaatgtagaggtgatgagaaaccgaaacggcagactacttgctcaatatgatgatataaacggcaagagctttgatctggactacgtcggaggtgtgcctgattcaggagttcctcacgcaataggatatgccaacgagtgtgacattgattatgcaagaccttttataaaatacacaccgacgtggcccagaagctttatgccaaccaatcagtcggagagaagtcatgttgccaaaatgaagctggttcctgtcacagagcttatcagggacaaaaagctgctgtttgtagacgacagcatagtaaggggtacccagctcaagggaacagttgattttctttacgaaaacggagcaaaggaagtacatatgcgttcagcgtgtccccctataatgtacgggtgcaaataccttaacttctcaagacagaactccgacatggagcttatagccagaagaattgttatggagcttgagggagaggagggcgcagagcaccttgaagaatacagcgacggcaccacagaaagaggacgcgcgctgagaaatgcgctttgcgaaaagctgcattttgactcgctggagtatcagagcatagataacatcataaaagcaatcgggttggatccgtgcagagtctgcacctattgctggaatggaaaggaataaataaaaatgaagaactcaaaagcagatgcgtatgcggctgcaggtgttgatataactgcgggctatgaggctgtcaggcttatgaaagagcatgttgcaagaaccgtaacagacggagtgatatcagaggtgggaggcttcggcggtcttttcagaccggagctttacggcatcaaagaccctgtgctggtaagcggcacagacggagtaggtacaaagcttaagctggctttccttgcagacagacacgacacagtgggaatagactgcgttgcaatgtgcgtcaacgacatagtatgctgcggcgctgcgcctatgttttttcttgactacatagcctgcggcaaaaacgtgcctgaaaaaatagctcagcttgtcaaaggcgtggcagagggctgcgtgcaggcgggatgcgcgctgattggcggtgaaacagcagagatgccgggtttttaccccgaagacgaatatgaccttgcaggctttgcggtaggacttgcagacggcagcaggctgccggacaaaaacagcattaaacccggagatactgtgatagctcttgcttcaagcggcgttcattccaacggattttcacttgtaagaaaggtgctggaggtcgaaacagcagaccttaatgcgcctgtggcggagctttcaggtaaatctttaggagaggtcctgcttacacctacaaaaatatatgtaaaaccgatgcttgcgctttttaaagaggtaaacgtcaaggcggtatctcacattacaggcggcggcttctttgaaaacattccgagaagtcttcccgagggcataggcgtcaaaatcagaacagaagatgtaagagttcttcctgtatttgaatatatagctgcaaggggcggtatttcacagagagaaatgttcaacactttcaatatgggagtgggaatgactgtcatagtttcacctgaggaagcaggcagagcccttgagattttaagggcaaacggagaagaggcatatattctcggagaaactgtcagctcagacgaggggattatattatggtaaaaacaaagatagccgtattcatatcgggaggcggcacaaacctgcaggcacttatagatgcgcagcgcgacggtatactccgaaacggccgcattacgctggtaatatcctcaaactccattgcatacggcttaaaaagagccaaggaggccggcatagacgcagttgcggtaacccgcagagaatgcggctcgcaggaagcctttgaagctgaaattctggagaagctggaggaatacggcatagaacttatagtccttgcaggctttttaaacatactgtcagaggattttgtaaagcgctattcagacaggataatcaatattcacccgtcactcataccatctttttgcggcaaaggctattacggtatcagagttcacgaggcagctcttgactatggcgttaaagttacaggagcgacagtccattttgtaaacgagataccagacggcggcaggataatcaggcaaaaggcagtaaacgtcaaaaaagacgatacgcctaaaactctgcagaagcgtgtaatgactcaggcggagtgggtgatacttccggaggccgcggaggaggtctcaaaagcaattgcagaaaggaaagaaagcaatggatacatataaggatataggcaagctgctgtcctcaaacgaatatcccggaagaggcatcatactcgggacaagccccgacggaaccaaagcggttgcagcatatttcataatgggcagaagcgaaaacagcagaaaccgtatatttgaaaaaagaaatgatgaaatatatacaaaggcttttgatgaaagcaaaatggaggatccctccctcataatatatgcggcggtaagaaaatcgggaaacaatctgattgttacaaacggcgaccagacggatacgatatatgactttcttgagagcgggaaaagctttgaagaggctcttgaaacaagagaatttgagcctgatgctcctaacttcacatcaagaataagcggcgtggcggtgcttgataaagacagttacagatataagctgagcatactaaaggcgcttgacaaagacggaagctcctgcggcagatttgtctacggctatgaaaaagctgcaggcatcggccatttcatacatacctacagagaaaacggcagtcccctgcctgcctttgagggagagcctgtggcaatagcaacaggtgacagtgccagagaatttgcggaatatatatggggcagtctgaataatgagaataagatatcgctgtatgtaagatatacggatattgaaacaggagagtatactgaaaccctcataaacaaaaacggacaggaggcagcaagtgaaagaatttgaacttaaatacggatgcaatcccaatcagaagccggcgaagatatatatggaaagcggcgcagagcttccaattgaaatcttaaacggcagacccggatatatcaactttctcgatgcgtttaacgcatggcagcttgtagctgagctcaaagaagccacaggaatggctgctgcggcatcgtttaagcatgtaagtccgacttcggcggccctcggcagagcgcttcccgaaagactaaagaaagcctgttttgtagatgacatagaggggcttgacgactcgcctcttgcctgcgcctatgccagagcaagagggacagacaggctctgctcctttggggacttcatagccctttcggatatctgcgatgaaaccaccgcaaatataattaagagagaggtatcagacggagtaatagcgccgggatatactgacaaggctcttgagcttttaaagtcaaagagaaagggcaactacaatatcataaaaatagatcctgaatacaggcctgcggaagctgaaaaaaagcaggtgttcggaattacctttgaacagaaacgaaacgatgtcagaatagatgacagcgctcttgagaatatagttacggagagtaaggaactgggagatgaagcaagactaaatctcataacagctctcataacactcaaatacacccagtcaaattcggtgtgctttgcatatgacggacaggccataggcgtcggagcggggcagcaatcgagaattcactgcacccgccttgcaggcgacaaggctgacacgtggtttttaagacagagcgacagagtgctggagctgccgttcagagcagagcttggcagagcagagagagataatgtaatcgacggatacatcaataaatatgaagaagatgtatgcgccgaaggcatatggcaaaaatactttaccaaaaggccggagccttttacagagcagcagcagagagccttcctcgatacgattaaaggcgcagctcttgcttcggatgcttttttcccgtttgcagacagcattgagagagccgcaaagagcggtgtttcctgtattgcagagccgggcggctcaatcagagatgatcaggttatacagtgtgcagacagatacgatatgacaatgatatttaacggaataagactgttccatcattaacaggtgataaaaatgaaaatactcgtagttggcggcggcggtcgtgaacacgcaataattaaaaaacttaaagaaaacagagaaatcgacactatatatgcgctgcccggaaacggcggcattgcaaaagatgcgaagtgcatagacataggcgcaaaggacatagaaaaaatcacagaatttgctgaggagaatgatatagggtttgcagtggttgcgcctgatgatccgctggccctcggtgcggttgatgcgcttgaggccataggaattaaatgctttgggccaaacaaagctgcagcggttatagagagcagcaaggtgttctcaaagaatcttatgaaaaaatacggaatacctacggcagagtacgaggtgtttgatgatatggacaaggctcttgcctatcttgagactgcggctgttcctgcagtaatcaaggctgacggacttgcgctgggcaaaggagttgtaattgcagaaacaagagatgatgcaaaagcagctgtaagatcaatgatggaggagcgtgttttcggcgagagcggaagccgtatagtcatagaggaatttcttacaggtcctgaggtttccgtactgtcatttaccgatggcaaaaccatagtgcctatgatctcctcacaggaccacaaaagagctcttgacggcgacagaggactgaatacgggaggtatgggctgcgttgcacctaacccgtactatacagaggaaatcgcacagcgctgtatgaatgagatttttattcctacaataaaagcgatgaacaaagaaggcaggacattcaaaggctgtctgtatttcggacttatgcttacagcaggaggacctaaggtcatagaatacaactgcaggttcggagatcccgaaactcaggttgtactgccgctgcttgaaagcaatctgcttgatattatgcaggctgtggcagatgaaaggctggcagatacaaaggttgttttcagtaagaacagcgcctgctgcgttgtaatggcatcggcaggatatcctgcggcctacgaaaagggatttgaaataacggcggataagctgcctgataatgcagatatattcatagccggagcaaagcttgaaaacggcagacttctgacatcgggcggcagagtgctgggcgttaccgcggtatcggaaaatcttgcaaaggcaattgacgatgcatatgaggcagttaagaaagtaagctttaaaaacgcctattaccgaaaagatataggaagcagagctcttgaggcagaaaggaaatagcgatggtttacagaatttatgttgaaaagaaaaaggctgcggcaagcgaggccgcagggctgctttcggatataagggcgtttctgggcatcgaaagccttgaggagcttagaattctcaacagatatgatgttgagggcatagacagggaactgtttgaatactgcataggaactgtgttttcggagcctcagctggacgacacatataacgagcctgacagcagcggatattatgtatttgcagtagagccgcttccgggacagtttgaccagagagcagattcggcagcccagtgcatacagataatatcacaacaggaaagaccggctgtagcttccgcaaaggtatatatgctcaaaggagacagtcttacagcaaaggatattgagcagatcaaagcctacgttataaatcctgttgaagcaagggaggcatctcttgctatgccggacacactcaaaacagaatatgaaattcctacagaggttgaaaccgtaaaaggctttaacgctcttacggaggatggcctcagacagttcatagcagacagaggtcttgccatggaccttgacgatattaccgtatgtcaggaatatttcagaaaagagaacagagagccgactgtgacggaaataaagatgatagacacatactggtcggatcactgcagacatactacatttcagacaactatagacagtgtcacatttgaagatgagcttattgaaaaaacctacaacgagtatctggaggcaaggacagcaataggcagaagcaagcctgtaaatatgatggatattgcgaccattgcggcaaaatgcctcaaaactgcaggaaagcttcccggccttgacgagtcggaggaggttaatgcctgcactgtaaaaattaaagtcaatatagacggaaaagacgaggactggctgctgcttttcaaaaatgaaacccataatcaccctacggaaatagaaccttttggcggggctgcaacatgcatcggaggcgcaatccgagatccgctttcaggcagagcgtatgtgtatgcggcaatgagagttacgggagccgcagacccgctcaagcctgtcagtgaaacccttgagggcaagctgccgcagagaaaaatagttacaacagcggcagacggatatgcttcctatggcaatcagattggccttgccacagggcaggtggatgaaatatatcacgagggttatgttgcaaagcgtatggaaatcggcgctgtgatgggagcggcgcctgccgaaaatgtcagacgtgaagtgccgcaggcgggggatgtggtaattcttctgggcggcaaaaccggcagggatggctgtggcggagcgacaggctcgtcaaaatctcataatctgggttcacttgtaagctgcggggcagaggtgcagaaggggaatgcgcctgaagagagaaagcttcagaggcttttcagaaacccgcaggctgcaaaaatgataaaaagatgcaatgactttggcgcaggaggggtatctgtagcgataggagaacttgcagacggactttttataaatcttgataaagtgcctaaaaaatatgagggtcttgacgggacagagcttgccataagtgagtcgcaggaaagaatggcagttgttgtggcaaacgcagatgctgctgaatttatggagctggcggactccgaaaacttagagtcaacagtagtggccgatgtaacagaggagccaaggcttgttatgacgtggaacggtaaaacaattgttgacatttcaagagaatttcttgattccaacggagccgaaaagcatataaccgtaaaaacagtaaaagcggcagagcctcagaaagaaatacccgacagcttcggcaggggtatgagagagcttgcggctgaccttaatgtgtgctccaaaagaggactttcggagaggtttgactcgactataggtgcgggaactgtgcttatgccttttgggggcaaatatcagagaactccgtcgcaggccatggcatacaaaatttcagttgaaaaaaaggatacaagaacgtgctcgctgatgtcgtggggctataatccgtatatttcatcggcaagtccgtatcacggggcgtacaccgcggttatagagtctgtttcaaaactcatagcctcaggagccgagtttaaagacgtatatctgactttccaggaatactttgaaaagctgggaagagacagcgagaaatggggcaagcctctgtcggcgctgctgggagcgttcaaagcgcagatgggacttggcatagcggcaataggaggaaaggactccatgagcggtacctttgaggatataaatgtgccgcctacactggtgtcctttgcggttacaaccgaggatatagataatatcataagtaatgatttcaaggcggcaggtcacagggtgcttctgattaagcccgatacagacagcgatggtcttgcagatctcaaaagccttaaaaaagtatttgctgaagtcacaggacttatgagagagggcagagtatatgccgcatatacgccgggatttggaggtatagcagaggctgtaatgaagatgtgctttggaaacggcatcggctttgagtttgaggcagggcttgctctggaggaaatcttcggatatgcctacggcgcgtttctgcttgaggttgatgcagaaaccaaggtttctgcaggaaatgcaactgtactcaatataggtaagacaactgatgcaggctgcatatcatgcggcagtgagtgtgtagcgcttgaggaacttgccgatatttatgagggcaggctcgaaactgtatatacatgtaatattgaaacagagaaaacagatatacctgcggcagagtacaggtttgaaggaacacgaaaggctcctgcgattaagacggcagagccaaaggtgcttattcctgtatttccaggaacgaactgcgaatacgattcggcaaaggcgatggcggcggcaggcgcggctccggaaatcttcctcataaaaaacaggagtgcagatgacattgcagactcagttaaagagtttgcgcataaggtcagagagtcgcagatgattttcataccgggaggtttttccggcggagatgaaccggatggttcaggtaaattcataacagcatttttcagaaatgaggccgttaaagatgcggttactgagcttatggataaaagagacggtcttatgtgcggtatctgtaacggatttcaggcgcttatcaagctgggacttgtgccttacggcaggataattgaaaccgatgaaaactgcccgacacttgcactcaacacaattggcagacatcagtcgaagattgtaaggacaaggattgcatcgaatatgtcaccatggcttgcagatactgaggttggagaagtattcactatgcctgtatcacatggagaaggcagatttactgctgatgaaaaactgataaagcagcttctccaaaacggtcagattgcgactcagtatgttgattttgacggaaacccgaccaacgatgtacagtttaatccaaacggatcattctatgctgttgagggcatcacttcacctgacggcagaatattcggcaagatgggacatacggaacgcgcaggctacggcctttacaagaatgtgccgggaaaatatgagcttgatatgttcagatcggcggttaaatatttcagataacacaaaagcgaccttgaggggtcgcttttaagtctccggtgttatttgcccggaccgcttaatccgctgtcatctatgtcatcgttatctgacggcttaggcggttcaggttccggctttacggttgtatttgacggtttgtcagtcttgtttgaattgcttgaatccgaagagccggtcttgtcatttgacttgcctgcattgctgctgtcagtcgttttgctgtgagtggtagcgcttgcaggagcctgtgatgtagtggtttctgaaaccttttcgctgtcagatgcggtagtttcagggtcttttttgtagttgtctatagtttcggctatctgtttaaccgacttgtcaacaaaatccctgacgtctttttcggttagtttatcctctttggataccacatctaaaatcagcgccagtttgccggctgtagtgtttaaatcagatgcttctgctctgtccttttcggtaacctctataacatctgatgtgagtgtgtaatcagatgttattgccgaaagactgttttcaagggctgctgccttattgctgttcttgtcacagcataccgacagtaccatatagtcgtgttcatcgcctgtaagatatcccagtctgtataactcatcgaccgtcattttgaaaacatcttcaaacgatgcgaatttggatacgtcatctgaaatattatccacgatttcctgtccctctttgttcatacaatcgattgatacaacctgatcgaaacggtttagcgtatattcgatagacgggttgacatccagcgttacgtgagagtaaggtgaaaccgctgtagcatatcctgctccgcctgttgcaagaagcataaaacaggccgcagcggcgatgagtccgcttctgcgaggcttctttgaaacagcgatgctgacttcctgcccgacaacatagtcgcgcttcggaacttttatgatgctgccgtcacttaacagtgccgctgcatgttttt

SEQ ID NO: 3539 - DNA, 3615 bp, Unknown
  16S sequences of unknown bacteria
ctgcgggatgaggcggtgtacgccccagccaatgtaaaaaagcgcgtatacattgtggacgaagtgcatatgctctctacttctgcgttcaatgcgctgctgaaaattctggaagagccgccggagcatttgatgtttattctggccacgacggagctgcacaaagtgccggctacaatcctctcccgctgccagcgcttttcttttaagcgcatcacgccggaagatgtgcagcgccgcctgcgctatgtggcacaacaggaacaaattgatttaacggaagacggcgcagagcttctttcccgtctggccgacggcgcgctgcgcgacggactgagtctgctggatcaatgtgcggcctccggcggcacagtggatgcccgggcggtgctggacgctttggggctggcgggcaatctgcagacggcgcagctgatgcgctgtattttgaacgaggatgcgcagggcgccctgacgctgcttcatcagctctacgctggcggaaaagacatgggggcggtgctcagcgcgctctccacgctggggcgggatctgctgatccgcaaaaccgcgcccaaaggcggtgcggcgctgctctccggcggttatgacagcgccacgctggaagagctggggactgccgccgatgcgtcccggctcattgcgatcctgaccacgctgcagaataccagtgccggccttctgcgcagcacgaacctgcgcaccgacgcggagctttgtattttgaaattgtgcgatcagagcctgtccggcgattggacggcgctggtgtcccgtgtgaaaaaactggaatctgcggtgaaagcgctgcaggagcgcccgattgctgccgctccggcggcgcaggagaaacggagaagcgcggcaactcctgttccggtttccccggtggatgatgctccctgggaagatgcgccaccgctgcccacggatgcagacgatcctggcgccagcagtttgacacaggattacgatatgccggctcctgcgcagccggcagagccggcagccccgcgccgaactgtgagcgccgtgccacgggataatacgccgcctcctccgcctgtgcgggaaacggacgagtgctggccggcgctgctggagcagtttaaggcccggcttcctatggcaaagcgggcttttctcaatatggccggcggtgttctggagggcgatcagctgattgtccagtgcgataacgatctggtgaagaatacgctttccaaagatgatgtggtggaggtgctccgccagacagcttcagagttcctgggacggagcatcgcggtgcgggtggttacaaaatcggcctccgcgcagcgtcccgctgcaggcggaggggaagctgcagcgccgcgggttggcagtgcaccggcgccgcagccgaaacagcaggcagatgcagatcctctggaacatttactgaacaagatgcagggctttgacaatttcaagattcagtaaccatgatgatacaataacaggataaagtgagggaaatgcgaaatggcaaagggatttaaaggcggattcggcggcggcaacatgatgcgccagcaacagcagatgcagcagaaaattatgaaaatgcagcaggatgtgaaggaagcccaggaggctgtggaggcccaggtatttactgcttccgttggcggcggcgcggtcagcgccacggtgaacgggaaaaaagaaatgacgggcattgccatcaagcccgaagcagtggatcccgaggatgtggagatgcttcaggatctggtaatttcggctgtcaatgaggcattgcgtcaggcggatgaggccatggaaaatgcagtcaataaggcggccggcggcttgaatctgggcggctttggcctgtaaaagggcgatggagacgaagcgggggcctatttgcagtttttttgcggaaaaggctcccgctgccttgacaaccatcccgtcgcgtgatatactatcaaacgcttgatatgaataagggcccgtagctcagctgggagagcgcacggttcgcatccgtgaggttcgagggttcgatccccttcgggtccaccagacgaaagccagacgaacaccaattgttcgtctggctttcgttatatattttgtggatggtgcgggcaacggcgttttgcatcgtgatgagaaactgagacaggaaaacgagggacggcccactggttgcagggatgtttaaggtactttttcaaacgcgtttttcgggcagaaccgaatgcattttccgcagacaatacattttgcgtcgtcaatcgtggggagggagcggatgtcccgctgagtaatggcgtttttaggacaaaccgcgatggacgggcacgagtgattttgcggacatttctgcggatttacgataattttcatattgttgcaccactttctgatttgcagtattgctctttgatagacgccatcagagcgatgacccgttcgtctcggatccagtatattacgttcattccctgtttttcagaggaaaggattccggcggttctcagttgattcaggtgctgagacaaggcagaggcggtaatattgggggcgtgcttatgaatttcccccacagtgagtttcccctggatcagcgcgcataaaatcaatagccggtgttcattggccagcagtttcagaagctccgcaatttttttggcctgttcttccatagagatttgccttctttctgtttctttgtgcgcagattccctgcgtcatggttcccatcgggcagtaaacgcaccaggatctgggacggaacaacaccattgtggcgatccccagcacggtggaagtgagcatgacactgaaaaaaccaaatgcaaactgcgcagcccagggagctgccaaactgacatctgcccactgccagggcagtttgaatgtccacaggagcgttaccgtctgtgaaagaggcgcgcctgtaaacacttgatatgtggcgaacagcatccggccgaacatcaccatgaaaaaggccaggaagccgtagcggaaccaccggctccgcaaaaatttaggcggcggtgtgtttcgtgacaatttcagcttttcgcccagtatgcccagcagctggccgcgtccgcagtatcgattgcagtaggctttactgccgccgaatacggcgaccagcagcggaatggtaaaaaacagcatccccagccatgcaaataaaatgttaaacagtcccagacaaaggtaaagcagctcaaccacccaaagataattggaccatttccgttttttcactgtgcagtcccccgttcaatcatttcaatcacagcagccgggcatgttcttgcacatttcccgcagccaatacatttttccgggtcggcttgagcgcgtataccccaacggacctggactgcgccccggggacacacgcggacgcagcatccgcaggcaacgcattcggatccaatttcagcaagtttgaatcggtttggcataagacctccaagacaagtaattaagatatttctaatatacttaacatatgagagaatgtcaagtaccgggaaataaattttttcaaatgcagatgtatttcatatacagaggctctgcttcgtgttatat

SEQ ID NO: 3540 - DNA, 32759 bp, Unknown
  16S sequences of unknown bacteria
cgcactcttttaatgagtggctgcttctaagccaacatcctggttgttttcgcaactccacatcgttttccacttagcatacatttgggaccttagctgtaggtctgggctgtttcccttttgacaatgaaacttatctcacactgtctgactgctatgcatcaattagccggcattcttagtttgataggcgttggtaaccttatcggccccgctaccattcagtgctttacctccggtaatctaacataacgctagccctaaagctatttcggggagaaccagctatctccgagttcgattggaatttctccgctatccacacctcatcgccacctttttcaacagatgtgcgttcggtcctccattaccttttacggtaacttcaacctggacatggataggtcacccggtttcgggtctactaatactaacttctcgcccttttcagactcggtttcccttcggctccataccttgttagtatttaacctcgctaatattagtaactcgccggaccgttctacaaaaagtacgcagtcagagcttttgctcctcctactgtttgtaagcacaaggtttcaggttctctttcactcccctcccggggtccttttcacctttccttcacagtacttctccactatcggtcaccggttagtatttaggcttggggggtggtccccccggcttcccacagggtttctcgtgtcccgtggtactctggatcctgctcgctgtcgtccgatttcgcttacgggactttcaccctctgcggtctgctttcccaaaacagttcagctatcttcttacaatacggttcgcagtcctcaaccccgatggactaggtccttcggtttggcctctttccttttcgctcgccgctactaaggaaatcgatttttctttctcttcctgccgctacttagatgtttcagttcgcggcgtttcccttccgcaacctatgtattcagttacggatgactgagcttttctcagccgggtttccccattcggatatctgcggatcaatacctatttgcgattccccgcagcttttcgcagcttgtcacgtccttcttcggcttccggtgccaaggcattccccttgtgctctttcttgcttgaccgtttgatatatctctatatctcggaatgtagtagcgatactacatttcttttctattgctcgatgtgtttctatctttgtttgactcttttctttgtccatgttcagttttcaaggtgctttgaacagcttcgctgttcagtggagattgcgagattcgaactcgcgaccccctgcttgcaaggcaggtgctctcccaactgagctaaacccccataggcaactttatttaatttttatttcttattcagtcgcctagatatattaccatagttatttatgatttgtcaacaacttttttacaatttattatatttttttaattaactcattttttatgctattatgttaagtacaacatacaacaaaatgttgtttttgtaaagccatcctgccgcaaaggaactttccaaaacggatataaactccgcagcccacggtttatagcaaaagaatgtaattataattcccgctatccatataacgcatacgcctttaagcaaccctattataaaacctccgcttttgctgaaaaatccgattacaggtagatcgttagccgtatctaaaattttcagcactgtctttcctataatgagtcctaaaaaatataagattacaacaaccgctatgcttataagtatattcgtcaaaaatccggctatatattgctgaagagtctcggcattaaaaatattatataccacagaattattattgcttacaatagcgttttttataaaatctggaataggcatacccgatattatttcattctgtgcgctcgccgccatgtctggcagtatattttccaaattcagtccattttcgatttttcccattacaaaagaaaatacagccgtatctctgacatattttattacacttccgcttaatttccaagacattagtatcgctaaaagtgtaggcataaatttaagcaacgctcccgcaatcccttttcttgcattaataaccgcaaatattgccaatgtcaataaaactattacatcaagatatgtaaatttaacagccatttcgactcccatcaacgccaccttcgatcaaaaactcagttctgagtttcatttttgttattctcagtctgctcctgaggtttttcattgttttctttctctgtctcttctttcttttcatcagagatatttttatccgatgtactattctcgttttccgtttcattttcttccccggaaatattttctgttttattttcagtctcttgtccgtcatctgtaattatatttgtcgccacataggggtcataagagtcgggatcaaaattattcatatttgccatagccgaccatgtccttgttgtatatatacatttgtttatgcttgaagtcggataaatacctgtaatatttccggttgtcgtaacagaccacataagctgtccgccgctgctgaatccatagtatgcagttccgcttccggcaacaatgcctccgtcggaacaaacgaaatagtccgtttcaacctctgccgaatcgcctgttgaaagttttcctccgcttgaaacgaatactatagttcccggaagttccccctctttatcggaaagttcttcaccgtaaatcatagctattttgtttccgcacaatccgacgcccattatctcattagttacttctactgaaccttcttcaactccggcagccgatatacttgtaatatttctgtctcctatggcaatcaaattgtttccgcccataaaatacattttgaaaattatctcatcatttttttcaacagcgccgtacatactgtctgtatagtctgctccgacgtcggaatttatataaaacattcctattttagatttgatttccacacctgtagtatcaatatagcttatggctattatttcaccgtccggcgaaacatcacagcaaagcggatatattcccgattctgcctctactcgctgaaacagcatattacctgacggactgtagaccgttacagtatacgacgtaccgtttgttataacgcctatgcttccgttttcggcaaccgatacgcttaatattgtatcctgcgtctgcacatcgtaaacaaagccttcttcgttatacattttaacggttcgtcctcccgtttcaaagattgccgtataatcgttcctttcaacagctataggcgatgtcattgtatatgagtcattccatatagccgtgcctgcctcattataatatgtaacaccgtccttagtgtactgcaacgagtcggttccgtatgtacgatatgccactttgctgtcggcgctgtatgttacggtaaatccgtttccaaagccaaactttgatataatcaaaacagcaatcacagcaaccgcaattatgacagacgctataataatgctttttgtctttacatgtcttttaatgttattttttacagaaaacatagaaactctcccaaaaattctttagtaatgattatatacccatttcatctaaagtacatcataaaaaatcttaatttttcttaaagaagcatactgccgtattcaacatttgcaaaacccctgccaaaccgaacaacggatagattttagaaacgaaatccgaaaaacttatggcagaaaacattgccgccaaggcaatgagcaaaaccaccgcctttcgcctgtttatatgtattttttccacggcaaaagctaccgccgctactccgttgcatacagccgttgtaaaaaccgccgctatgaataccagcgtgtacacagcattgtatatcccgcccaaagatgaggcaacagccgaaaacggaagctgtgaatttatcgcctcgtccgaagccgaaagtattgcatttcctataacaatccccataaagcccattgccgccccacaaataacacccgttatcaatgagtccgattttccgcctgcgtcttctgactgcactattaccgaagccgtgcttattgtgttataggatacatatattatcgacgataatactattgagcctccgcagtcggctaaaattttcggattaccgacagattttcccccgatagcggctatgcctataataagcgcaggtactaaaactacgctcagtatttccaaagctcccatgccgttgctcattacaaatgcgcatataataagcgataccgctacgccaacccgataatttacgccgaacatctcttcagcagcagatcctgcggcagctgtcatggcaaaaaacatcgtaaaaaagaaaagacccgatatccattctgtaaaaaccgccgtctttccgccgattacaaccgacaaatattccgtataactttttatctttttcctgtttataatatccgttacggcgaaagaaatgagaaaaaacataagactgctcaataatatgcctattttccacttttctccgtatattaaaaaataatccgttatttctcgaccggatgcaaaaccggccccaacaaccattcctataaaaacacatgcttttttaattgttttcaaaataaaacccccacattccgtcagaaaaatatatgggggtaatatattaattattcagcatttctttataaagttccatgtacttctccgctgaatcactccacgaaagtttagtgttcatgcagtttttcacaagagtattccatttatccgtatcggtatatatcttaagcgcttctcctactgcccacagtatgccttcggcgtcataagtttcaaataaaaatccgtttcccgtgccggtttctctgttaaactgttcaacggaatcagccagccctcccgtctttctcacaacgggaacagtgccgtatctcaagctgaacatttgtccgagaccgcatggttcaaaccttgaaggcataaggaacatatctcctgaagcatatattttttgcgctaacgtatcgtcaaacattatgcaggagcaaaatcttcccttccaacggttttcataatatctgaacatgtcttcgtatcttttttcgcccgttcccaaaattacgaattgaatatcattctgcattaacctttccatggcgtttgccagtatatccaatcccttctgatccgcaagccttgatatcatgcatatcataggcacgtctctctgctcaagtcccagacgttcctgaagaagtcttttgttttctttcttggcttcggcattatctgcggaataattaacgtctatccgtttatcggtttcgggattattcgtctcgtaatcgataccgtttattattcctcttaacctgtcttttcccgcgcgtattataccgtcaaatccatatccgtattcttctgtctgtatttcatcggcatacgtctcgcttacggtgcttattatatcggcatatacaagtccggctttcatatagctcattcttccgtaaaactcaactgtaccgttgtcatacagataccacggcaaatccagcatttccatagatgaaggatcgaaattgccctggtactgaaggttgtgtattgtatagattgttttaatgtcttttaaatatgttatttttttataagtctctctcaaaagcatcggtacgggaccggtctgccagtcgttacagtgtataatgtccgggacaaagtccgcaaacggaagcatatctaaaactgcctttgaaaaaaatgcgaatctttcgttatcgtcatcgtatccgtacaattcgtctcttccgaaatagaaatcgttttctataaaatatgtcggcacttccccgtttttaaacaaaactcctgctttttgagttctccaaccgagttttacatcaaaaccgccaaggtactccacgtctatataattctcattttttatctttctgaatttaggaataacaactcttacatccgccccaagttttctaagcgctttaggaagcgacccaaccacatctcctaatccgccgcttttgacaaacggcgcagcttcagatgaaactattaaaatctttagcttttctgcctgtttcatattcgcggcctccctacaaattaatatttatgtatattcccactatttatataatacactcaaataattatcgtggcaacatttttatatgacagacttcgtgttttatttgtaattatgcgcttttcacggcatttcaataccttcattcttgtgaaggtcatttttaatttgacgtaatgtatacactgtttgccatatgtggtatacttctgaagaggtgattaacatggcagaaaataaacttcctttaagaagtgaagcagataaaaactatacatggcatacggaggatttgttcgcctccgacgatatatggacggaaaaatacaaagaatcggaagaaaaagcttcttctatagaaaattataaaaacacaatgacgtctgacggaaaaagtctttatgacgctcttaagttttataataccctttcggaagagctcgacagaatatatgtatacgcatatatgaaattccacgaggacagtacaaatccaaaatatcaggaattatcggggaaagcagacgcactagccgtaaaggtaatgtcgctctgctcgtttatcggtccgaaaatcgcagaactttcggaaagcgatatcaaaaatttctgcgaacagtatgaaccgcttaaaatttacaaccattttctcgacggtataatccgtcaaaaaaagcatactttatccgagtccgaagaaaggatactggcaaaaacagacgaaatatcctcttctgcgcagacaatatttacaatgcttaacgaagcagatatggtattcccggacgtaaccgaccgtaacggcagcaagcataccctcagccacggtaagtatatctcgtacctggaaagcgaggacagagttctccgtaaatcggctttcgacactctctatgaaacatatcttaaacaaaaaaacaccattgccgcagcatacaacgcttcggttaagaatgatattttttattcaacggttcgtaattatgcttcgccccttgagatggctttggaggacgacaatataccgacatccgtttatgacaatcttatagaggctgtgcatgacgctctgcctctcatgtaccgttatgtcgcattgagaaaaaagcttcttggcgtagacgaactgcatatgtacgacctttatgcgcctcttgtaaaagacgtaaactggtcagtaccgtacgatgaggcaaaagtaaccgtaaaaaaagctttatccgtaatgggcaaggagtacaccgacgcattgcagaaaggcttcgacggcggttggatagacgtatacgaaaacaaaggaaaacgcagcggagcatattcatggggagctttcggaggtcatccgtacgttctcctcaatcataacgataccgtaaacagcatgtttacagtagcgcacgaaatgggacatgcgctccacagctattttacatgggaaaaacagccgtttgtatattcggggcataaaatatttgtagccgaggtagcctctacctgtaacgaggctcttctcatggagtaccttcttaataccgaaaccgataaaacaagacagctttatctgattaactatttcatggaacagttcagaggaacccttttccgtcagacaatgtttgccgaatttgagaaaaaggctcacgagatgtctgcttcgggcacaccgctcacatgcgataacctgtcggctgtttaccatgaccttaaccgattatatttcggaaacgatataactatcgacaaatatatagatattgaatgggcgagaattcctcatttttataatgcctattatgtatatcagtatgcaacgggatacagcgctgcaatagcattgtccaaaggtattctgaacgaaggtcagccggctgttgacaaatatatggattttctcagaaaaggctgctcggaatattctatcgacctgcttaaaggcgcgggcgtagacatgacctcaaagaagccgattgaagcagctatggaagtattcaaaggcttgcttgataaaatggaaaatcttacaaaataattcatatcctttcggtatttccgaaaggattttttataatgctgtaacgaaatatcctttcatccgtttcataggtacaggaggtgaaaaacagttgaccgatatagaaaaaatatacaccgactatgcggttccgttaaaaaaatatgtattaagcctgtgcggaaatccaaccgttgccgatgatataacggcagagacttttttcaaagccataaagaacatagacagcttcaaaggcggaaaaatattcacatggctttgtgccatagccaaaaatacatattttgattacataggcaaaaaaaattttaagaatatttctctggacagcgaaattcccgtttcggataatttgccgtcgcccgaagacaaaataataaaaaaagatgaaaatttattactgtacagacagctgatgaaactggacgaagccgcaaaagacattgtatatttaagaatttttgccggactgtcgtttaaagaaataggaaacgtactcggtaaaagcgaaaactgggcaagagtaactttttaccgttgtaaaagcaaattgaaaggattgatggaaaatgaaatataatctaccttgtgaaattttaagggatcttctcccgagttatattgataatctgtctaacgaagttacggcagaagccgtaaaagaacatcttgatcactgcaaggaatgccgaaatatttatgagacaatgaaaagcgactgccgcaattcctcaagcgaaaaacaattagcgtcaaaaagcggagacgataaagaacttttcaaaaagataaacaaaaagcttaacaaaagggctaaaaccgcggtaatcgcaggtatagcggcagtaatcgttgttttgggaggggcacagctgctatttaacacgcctttaaaaaatatccccgttgaaaaagtttccgcaacggcttctgtctatcctacagaagaaatatcaagcaaatcgaaagctgacgaagaattttcggtaaatatatcaaaagaccctataaatgacaattctcagcctgagttcgttatcgaaattccgggaacaggttatgacggtataggcgtttctcaaagtttgcttgacagctgtgaatatgtatccctcatttcctttaattctccgtatgtgcttgactatatcgacagcgaatacaaaacggaaaacggcgaaaccacactgtatatttacgcttttaaaacaactatacttaacaataaaacttcttccatgaatacatcgtcttctacgcttcaatttgaaaaggtggataaaatcgtttatgtcgacaaaaacggaagcaatacaataatgtgggaaagcaaataatttttagggcaaaaaaattttagggcgaggaatatccccgcccttaacattttcttatttatcggtgttattggcattaagctgtatgtattaacttagtttaattacggaagtactatttctgctccgcaataaataatattggggtttgggatgttattaagtgatattatttcctcaagtttactgtcgtctccgtaaaacagtctgcatatccctacaagcgtatctccctcctttacagtgtatgtttttttatcctctccttcctccttatttttaacgggattttccgccgccattacggttataacagggctgtagttggatacgtcctgtgcaagcgcttctgtttcctgctgctgtttagcaacggtctgttttacgttaaccacatcgctttcaagcctgttaagtcttgacacactgtttgccaagcctaaactcataaatacgcatatcatacacagtaccgcgctgatacatgtaaacgccgcatatttatgcttgaccttctttattttttctacctgtttgttcataaggactgcccttatttttcccgcggcgtccaaatgctcgttcttacattcttcctcttcgttatcctctcctctgtcctttggatgcacaaggctgtttgccagcatatactcctgcatctgtacatttttgtcataatatacaaaatatccttttaccggtctcagtgccgatccgttctcgttcagcacataaaacctgtccagcctgtctgtcggatcaacgacaaaaaacactttgctgtccccgttgaaaacttttttatgataagcctcgtcccttgaggctacaaacgccccaaaggacggtcgggaatgcatccatccgacaattgccaaatcgccgaaatatttttctatctcctcgccgatatacttccagctttggcttgttatcgtctccattcccttaagtttttcggtaaacttagcctgtacgactccgcttataaatatggttttctgtccgtctataacctccgttctgcccatcagcaccgccagtttttctcccgtggcgctgcttcttgcatattgataaaggtatgtatgtacataatcctccatatatattctcaatccgtcgtcggcagaccccatttgtctgacgttggtcggaaaggctgtagcgttggtttcaatatcagtctgcatattttttcctccctttgcatacactgttacgttggttaaaatataccacccttccgccgaaaaatttgtcatatacagtcgcaataatatttttataaatcgcaaataccgccgttttctcttatttttctcgctttgcgtatgccgttatttttttattttgaacagcataaaacggcgcgcctcgaaaaacccgagactcgccgtcttttatctgatttttatataatatatttttcgcttttttccggttttgcatcaagttcggcttttttggcctcatatccgggtctgccgaacatagcgtatgtggcgtttttgccttcttcaacaccgggctggtcaaatgcatttatccccagcagttctcctgcgaatccggttgcaacctcaaacatataaagaagctgtccaagtgtaaattcgtttacttcgggaagcgttatcgtcatgtttgcctttccggccttttgaagcgcatattcagtcgctacctgttccgtggcaataagcctgttctgcgttactcctccgaggaagccgagactcggtatatcaccgtaaatcttaggtatagtcatttcttttctgaacttatccacacctataagtacaaccatcttatcaaaaggtccctcagtgtaaagctgaacctgtgaatgctgatccgtaacgccgagcgcctttacgggagtttgtcctgcgtttatcacattttctccgttatcgtactttttgccgagagactctgcccaaagctgtgcaaaccaatccgaaacatatttaagactgtccgcatacggcatcattacggaaatatttttgccttgctccatagcgatatagcttaaaagagcaaacatatacgacggatttttataaaaatcctcattttttgaaagctcgtccatataggctgctccgtccagcaacatgtcgatatctattccgcacatagccgccggaagaagtcctacgggagtaagctccgaaaatcttccgcctacgcccgacggtataataaacgtcttatatccttcttctttagctatctttatcaaatttcctttttcgcagtccgtagtgcatacaatatgttttgccgcttcttccctgccgagtttttcctccagcatttcctttattatcataaactggctcatcgtttccgatgtgcttccgctttttgaaacgcagttaaatatacactttgtaacgtctattatatcaaataaataagcaagtctttcagggtctacattatcggcaacatataatctcggataaccgcctctcttctccttgggaagttcgttataatacggatgattaatagcctgctgaacgcatatgggacccaatgccgatccgcctataccgaggactataaaagcatcggtttcgtccttaacctcatttacataattttttatgtcttccgtaacttctttctgattatacggaagatctctccagtccattcgtccgtccctgcgcttctcttccatggccttatgcgcctttgcggcttttcctgccagagccgaaagttctgcgtcggctataccgtactcgccgatatattttttcatcatgttattgtagtctattttaattctgagattgtttttctgttcatttgaataaatcattgtataatcctcctcggttaatattattgccgcagtaataaaaatgcatagcaaaaaatatattattttcctctgcggtaatccgactttacggaattattataccacatataatctaaaacccaacacaaaatttcttagattatatgacaaaaaacagacctcggaatatataaattctaatccgaagtctggcataaattattttcctttatcctacggctatttcggggtctaccgacatatcgtcaagcgtaaccgcaaattccacatgcgttcccatggctgaagaataaatcgacggttccgcaactgttcctaaaacttctccgcttgatacggcgtctccggcggccacattaatatccgccagctggccgtatgtagttgcccagccgttgtcatgttcaattaccacatagtttcctctcgtttcatcttcgtttacctcggctacaattccgtccgcagcggcggcaacattacttcccgtttcagccgctatatacacactgtcgtttgttctgtactgatccaaagtcgggtcatacacaagcgtatcggggctatatcccataagtatatctccctgtatcggccatgttaaagctatttcaaaatcgtcagcgccgtcttctgaatccagcacagccgtattttctttaggttttgtttccgtaatctcattttctttaggttttacgggttcctcctgcttttgttccgttttttcggctccggcatttttgtttgtcagcaccggctcgctgaccgtattatttttttccgcagagtcatttttaactcccttgttatatgccgccgtacctgcgcatataccggcaactactataaaagcaaacactgccgcatatttgcccttatcatttaaaaattccataaacttattccttttcattttggcacctccgtaaaaagtgaaatctttgatttccctgaatgtattattgccctatgaaaagacgtttatgcaaattttaaaaaaatacgccggactttcgtccgacgtattcgagggtgtatatataatcgcgattaccttattttaagatgtcggctacaaccttttcgggaattacaaactcgggtgaaccctgagctccggctgcaacctcatatttatcaaagcatattacgatatttccgtcatcatttatatagaagttctggtcttcggctatcttgtcaaatccgtcgaagtcttcttcctctccggcaatccagaacattccgccttcttcggcattaagtctcttcatttcgcctttaatataatcgctgataggcgttacataatccgctccttctttaaacataccttcaagtgtataaatttctccagtatgtttatctattgtatagtaattgtgaactgtcatcgatgatcccgacgcatagtatacgtatgtgtctattgcgagaatatcatcgttatcacacttaacatcataattatactctacgcccatatgaactgtctcatcgccgaattcttccttaagctccttaacgctcttctcaaagcttgctataacgctctctgcctgatcctcaaattcgtcattcaatttcttttgtgtttcttcatcaagaagcccttctattttcggagtttcaacctttatttcatagccgttatctttattttcatattttcccatagttacaacttttactattccgctcagtaccggaacatcgctcatggcatacgcaaatgtaggacttacgttagctgcaactccgaatgctatcacaaatgccgctgccgagccggctacagccgcaaaacctcttttagcttttgatttctttatctctttattcgctttcataatcaattcctccgttgctttaatgttttcgtactgttttttaaaatcatcaatttttttactcatagtcttccaccatatcctcctttaatattttgagggccttatataatcttgtcttggctgtactttcatttatgttcagcacttctgccaaatccttaatcttcatgtcctcaaagtacctgagtactatgacttccatatactctttgggaagcctttctatcatctcattcagatttgatatgttgtaactgtcttcgtaagtatcctcattgtccatagtttcaaaaggtatgaccctctgtttcttctttatatgcgttattgccgtattggaaactattttgaaaaaccatgtttttattctatcaggctctttaagattatcagccgctttcagcgctctgattatactgtcggaaacaacatcctccgcatcctgctgatttttcatataggtaaaggcaaatctatacgcactgtctatattttcatttataaatctttctacgagctttcttatgcccatattttatttcaccctcttgattgacgcgtcgttcttaatttgttttacacctataagacatatactctggcaaaaaagttcttgattatctgcaaaaatttctttcttcatattttcttaagatttagaaatccgcattatgtttatttattgctgattttataaggtttttccttactcttttcatgcaaaaaaggatactttccatatcggaaaatatcccttttaactcaaagtttaaaatattttagtacagtttagctcctgcgggaatacggtcgtcaaccataagcaggttaagtccttcatgtccgtcttcctcgtgtactgcggaaataagcataccctcggaatctatacccatcatctttctaggcggaaggtttacgattgcaatacaagtcttgccaaccagttcttccggctcatagtattcatggataccgcttaaaatcacgcgatccttgcgttctccgtcatccatagtaaacttaagaagcttcttggacttcggaacagcttcacaagctaagatcttaaccgctctgaaatcagactttgcaaaagtatcaaagtctaccatttcctcaaaaatcggctctatttttacatttgagaaatcaatcttttcaggtgtcgaagctgtgacaggcttattttcaatctttttaggagcgtcaagcggcttcattgtcgggaaaagaataacgtctcttatgcttacagactctgtcataagcattacaagtctgtcaacgccgattccgattcctcctgtaggaggcataccgtattcaagcgctgtgaggaaatcctcgtcaatcatattagcctcgtcgtctccggctgcacgcattgcttcctggtgttcaaaacgttttctctggtcgatagggtcgttcaactccgaataagcgttggcatattcgcgtccgacaatgaaaagctcaaatctttccgtatattccggcttgctcggctttctctttgtaagaggagaaatctcaacggggtagtctgtaataaacgtaggctgtataagatttttctcaacatattcttcaaagaaaaggttaagaatatcgcccttcgcatgtctttcttcaaaagcgattcctctttcagaagcgatttttctcgcttcctccgtgttctctattttatcaaagtcaacatctgcatacttcttaaccgcgtcaaccattgtaagtctttcaaaaggttttccgaggtcaagctcatatcctccgtagttaagcactgtagagcctactaccttctccgcaaccgttctgaaaagaccttccgcaaggtccatcattccgtggtagtctgtaaacgcctgatatatttcaataagtgtaaactcgggattatgtcttatatcgataccctcgtttctgaacactcgtcctatctcatatactctctcaagaccgccgacaataagtctcttaagaggaagctcaagagcaatacggcagtacatatctatatcgagagcgttatgatgtgtgatgaaaggtcttgcggcagcccctccggggattgtctggagaacaggagtttcaacctcaaggaagttcttcgagtcaaggtaattcctaatctctctaagcactgcggaacgcttaataaacgtatccttaacatcgggattcataatgaggtcaaggtatctctgtctgtatctgagttcctgatcgttaagtccgtggaatttctcgggaagaaccttaaggctctttgaaagaagagtgatttcattggctcttatggatatttcacctttctgagttctgaaaacaataccctttattccgataatatcgcctatgtcaaactttttaaaagcaagatagctttcttctccgacatcgtttttgcttatatatccctgaactcttccgtctctgtcctgtatattgataaaagaagcttttcccattacacgcttgttcataagtcttcccgcaacggaaacttctttttcttcgagttcgtcaaaattattgtgaatatcgctgctgtgatgtgtaacatcatatttaactatttcaaacgggtcttttccttcagcctgaagagccgcaagtttatcccttctgaaaccctcctgctccgaaagctggctggctgttaattcttttgtattttcttccgacactttatgttcctcctaccaaaattacctggaaattgcaagcactttaaattcaaccgttcctcccggtgtttctatagcgacgatatcgcctgttttatgtccgagaagtcccattcctacaggggattcgtttgaaattcttccgttttcggaattcatgggatcggcttccgcagaacctacgatagaatattctatttcttcctcaaattccatatcccatatttttactcggcttcctactgttataacgtccgaacctacttcgtcgtcatcaataacttctgcattacgcaacattttttctataacaactattctggactctatttcgccctgttcttcttttgcggcgtcatactcggcattttcagacaagtctccctgtcctctggcttcttttattttttcggctacttcttttcttttgacagtctttaaatcctcaagctcgtcctcaagctttttaagaccttcgtatgtcaaaacaacttttttactatcagccataaacccactcctcatttatgttaattaaaagtatcctgtcttcactatgtgaatatcatatctaaaaaattataaactacctttaactgcttgtcaacgccgacacccctatattttctcatatattcggctgttaaggacagcataaaaatttttatatcaaacgccgtcaaaaaatccgtaaaatttatctatagagcctaacatccttatattttctataatttttattttttctttcatatcggctttgccttccgccatacgtctgaagttctcgtcagtggcatatacagcgcattctgcctgctccgaagtcaattttattcctccgaaaattacgtttacggcatttatgattctgacgtcaggccttattttccttatatgtcgtattctctttttatcgttagctatatcgaaataaatacacccgtttttcagcagataatcataattatctgtcagttcggcacaatttatgacaatatctgcgtttttcagattttcatgacgaagactgttcatcatctgtacggttattccgtattccgtaaacaaataacggcatacatcattatacacataattctctcccgtaaaaatcgatacatattttacatgcggacaaacagaacaaagtattatttctaccagttctctgtttcctcctattataacggcttctttagccgtacccgccatgtctgctgaggctgccgccttgattacgtttccctccgacgtatatacgccgtcaaaccgttcgcctgtaaccgaaataatgtcgtttgtaagaagaaatctttttattttagccaatactctttctttgctttttttgtcagatgtctcaggtatgttcaagcatattttatacccctcggcgccgatcataagcttctctttcacactgtaaggataataaatcgaattaaaccacgttgtaatcattcctatgttatcatcaaaatattctatttcggcaaacttcataaaatcaccccatatactgtgatatatgaggtctgcaactaaaaaatgcctgtacatatacaggcatttttttatcaaaattccattttctcctcaaggtaagcaacaagttcgtcaacgctgagtcttatctgttccatagaatctctgtctcgtactgttacagtattgtcctcaagtgtgtcaaagtctaccgttatgcagaaaggcgtaccgatttcatcctgtcttctgtatctctttccgatacttcccgactcgtcatattcgcaattaaacttcttggaaagcttatggaatatttcaagagcaggctctgaaagcttcttggaaagaggaagaatagctgccttaacaggagcgattgcagggtggaagtgaagcactgttcttacatcgttttcgccgacttcttcctcatcgtaagcgtcgcaaaggaatgcaagcgttacacggtcagcgcccagtgaaggctctataacataaggtatatacttctcgttcttgttctggtcaaaatatgtcatatcttcacctgaaacattctgatgctgagtgaggtcgtagtcggttctgtccgcaactccccaaagctcgccccagccaaacgggaaaagatactcgatatcagacgtagccttgctgtagaaacaaagctcctccggactatgatcacgaactcttgtgttttcaactgtaagtccgaggtctttaagccaatctatacagtactgtttccagtaagcaaaccactccaggtctgttcccggttcgcagaagaattcaagttccatctgttcaaattctcttgtacggaatgtaaagttacccggtgtaatttcgtttctgaatgattttccgatctgtcctataccgaatggaagtttctttcttgatgtacgctgtacgtttttaaagtttacgaatataccctgggctgtttccggacgaagatatacagtgttttttgcgtcttccgttacgccctggaaagtcttgaacataaggttaaactgacgtatatcggtaaagttatggcttccgcatgtaggacatgctatattgttttccttaatatattcaagcattttttcgtttgaccaaccgtctacggttatgtcctcgcctctttcatggcagaaatcctctataagtttgtctgcacggaaacgttctttacagtctttgcagtccataagagggtcggaaaatccgccaagatgtccgctggcaacccatgtctgagggttcataagtatagcgcagtcaagacctacgttatactggttatcctgaacaaattttttccaccatgcttttttaagattatttttaagttcaacgcctatagggccgtaatcccatgtgttggcgagtccgccgtaaatttcacttccgggatatacaaaacctcttgattttgccaatgcgactattttttccattgtcttttccattttaattcctcccaaataataattactccgcttcaataataaaaaaagacctttgtccccgtaagggacgaaggtctgtattctccgcggttccacccttgttggcaaaagcccactttataagatgccgttcaaaagcgcctttcgcataagccgtgtaacggtttccacctgccaccgcctctcttaaacacagtacttaaactactttttctttatcattacggattattcaattcaagtcttagactagcaaatatattctccgttgtcaatattaaaatttaagattattaatataatccaacgttttatatttatctcccaaataaattcttctgtttatatccgcaaaagtccacagttcgtccagaacttcctccgatacacgaaagttaaacagcttatttaacgaactgccgtttatgtatctcacagccttcaaagcgcccgaacccagtttccacgccataccgtcggagcagttatgacaaaacagtccgtcgcttctgtctccgaagaaagcgtttttatccagtatatccccacagtttacacaataatctgtttcccacataaatccgcactcttttaaaagccttattatgtatatgacagccgtaagtttcgggtcctgcttttccgaagataataccgacagcgtttttaaaagcaggtcaaaagcggcgttgtcttccatttcttcaaaagaagttctttccgtcagctccaatatatacgccccgtatgcaagacgctcaaaatcgttccttatgccgtaaaagctttcaataacgtcagcctgcgttacggaataaaaacctttcccctcgaaaaccgtaaattcacagtatgaaaaaagctgagttgccgccattattccgctctttgcattttttgacccacgcgccgaaaggagcattttcccatgctcccttgttataaccagtattctttttccggtttctccggctgtcatttcttttattactatgccgtttacattaaagaccatttcgcacttcccgtttatttttcaagtctgcgttctcggctgctcttctatatcgcagatatgcctcgacgcttccggtatttatgaaatctttccaaaggctgtccatatatcacatctccttcggtaatagctttcccacgaataagagcgatatgctgtgtaaaaacttcctatatagccaaaaacatatatttatgttattttttaagtcattgtttcatcgttcaaactcgtatccgaagtttttcaacagaaagtcattgtctctccagtcttttttaacctttacccaaaggtcaagatatattggcgaaccgagaagcttctgtatatcttcccttgcatttgtgccgatttttttcagcatagccccgtgtttgcctattataattcccttatgagaatccttttcgcaatatatggttgctcttacatcaaccatgtttccttcgggtcgcttcttcatttccataatttcaaccgcaatcccatgaggtatttcttcctgtaaaagtctcagcgctttctcccttattatttccgccgctatctgcctttcaggctggtcggttatcatatccgaagggaaatactgcggtccttcgggaagatatttctttattacctccaaaagctcgtctgtatttgttccctcaagtgcgcttatgggcactatttcggcaaaatcataaagttttctgtagttgtctataaccttaaatacgcgctccttatccgttgaatctaccttgtttataacaagtattacaggtgattttatctttgaaaatttttctataataagcctgtccgcctcaagaactctgtcagcaggttctatgagcataagcactgcgtcgacctcattcaaagttgtctcggcgctttttaccataaactcacccagcttatgcctcggcttatgtattccgggagtatctataaatactatctgaaaatcgtcttttgtcagtatgctctgtaccctgtttcttgttgtctgcggtttatttgatattatagctattttttctcctatcagtctgttcataagcgtagactttcctacattcggtctgcctaccaatgacacaaatccactgtaaaatttctttgccaaattctatacctctttcgtttatatgtttatagttcgtcaagtttagcccttattgccttaaggtcttcccacgcaggtcttttctttgtctcatccctcaacagcgccgacggatgatatgtagccgttatccaatagccttttctttcaacccactcgccatgttctttcgttattttaaaatttttatcgattatagccgtcgccgcaactcgtcccaggcacactattattttcggctttacaagcgtcagctgatagcgcagataattcatacacgcttcctgttcatcctcatgcggatctctgtttcccggaggtctgcattttactatgttggctatatacacgtcttttctgtcaagatttacggacgccagcattttgtcaagcaactttccagccggtcctacaaaagggactccactcaaatcctcctgttgtcccggtccctcgcctataagcataatgtccgcctgtctgtttccgtctcctataaccacatttgttcttgtttcccacagtctgcactttttacaggaaagacaagctccctccagtgtctcccagctcttcataatatccctactctctgggtattcctgcgttcagcagtatttccttctgtctgcggaacatttcttcctcttcatctttttccatatggtcatatcccataaggtgcagcatgctgtgtacggcaagaaacgccatttctcttttcatactgtgtccgaactcctccgcctgctcctttgctttgtctacggaaattataatatctcccaatactatttctccgttttcatttacgtcggcttcttctccttcctcaaaagtaagctggggaaaactgagtacgtccgtaggtctgtctatgtttctgaactgcttgtttatttcatgtatctcctcgtcatttacaagcgacaggcttatttcgcagtccgtatcaaattcttcatacacaagactttccatgcagaccttttcaaaaaccgatttcatttcatccgaaagttcataatttgatctgttatctattaacagcgtcatttttatcacctctgtctttgtcttcccatattttctttctttttattttcagccttttcataggcggttattattttctgtacaagagggtgtcgcacaacgtccttgtttgtcaatgttattatgcctatgtcttctacatctttcagtattttaaccgcttccgtcaagcccgagttttttccgtctcctaagtctatctgggtcaaatcgcctgttattacggcttttgaaccatagcctatacgcgtcaaaaacattttcatctgctccggagtcgtattctgcgcctcgtcaaggacaataaaagcattatccaaagtacgccctctcatatatgccaatggcgcaacttccagcagtcccctttccatatttctcgcaaaggcgtcggcgcccattatttcaaaaagagcgtcgtacagcggtctgagataggggtctactttctgctgaaggtctcccggaaggaaaccgagcttctcacctgcttctattgccggtcttgtcattattatacggtttacttcgttgtttttaaatgcggtaatagccattgccattgcaagatatgtttttcccgttcctgccggacctataccgaatgttatagtattatttctaatcaagtccacatattttttctgtcccagagttttaggctttacgggtctgccgtttatggtcaggcatatgcagtcgtcataaatagttcctactttttccaattcacttttatcggaatttaccatatattcaatattctgcgacgatattgtttctcctttagccgctgcctccaccaacgctctgacaacctgttccgcctttcggcagtcgttttcctcgcctacgattttaatgccctcgcttctgttcacaatcctgactgacaattccttctctattttagaaatgttggaatcaaactgtccgaaaatatttgaaattaccttgttgtcagcctctattatacattctgtctgcggcatttactctgttacctcctcatattgtgatgtttccgcttctctttgttcgtctattctcattataacggaagtatgtccttttattatcattcggtttccgtccgttatggtttctgtctccaagcggcttacttctccgccggtttccattgtaagagctgtaatccggtcgttaagctgcttttcagccagttttacagcttcgtcttccgtccttttcatttttacctttccgacctgtccgtatacggttttatttattccgaaagggatctcgtagtcccctatatcaaatttcagcctgtcgtccgttatgacctcataatcgttttcataagacggggttatgaaattgaaattatgtccgaatatatttacactataatctgttttcgcctttcctgtaaataccttttcattataattcagctcggaaattccttcaagctcatactgcttttcggcgtaaacttctcccgatgcacatacatacatttcacccgttttattttcaccgtcttttaacggcacctcgctgcttatgagcaagtcgcctttttttacttcatcgccttctttaaccatcggcgttcccgatgaagctgccacgcttactatcactccgtcggcattggcaacaacgtcggtcggcttttctctgtcgacatactgtgttttcggtatagtttccactatatttactactacccccgtgcctttcatatctacggctatccatgctatgtccttatactccatcatcagtttttcgccgacttcatataagtcaacaccatgtttcattttccccggagcaatacctttttccgcgcatgacctaattatatcgtcggcgttaagcctttcattgccgtttacccttactgtccatataaacgacgacattatgtacattgaaaccgaaaaaagcaatatccctgctatatatgctttttttgaagaacaatgtcttataaagacaggcagtccgtattctccttttatttcaaaacggcagcctgtctttattccgcattcttttaaatcatcggcattttttacagacgccttcattattaccatatttttttcctgtataacgtcccatataaatatacctttgtttacagccatatttataaaccgctctacggaaaatccggtaacatatatgataacatatccccttatataattccacaatgcaagaaacataagtttacctcatttatcacaaaaattcggttgcgtttattttgcctgtaataataacattgtcgcagtccaggcattttatgagcagattttctcccgtaatcttaaatattccggctgttgtgttcagtcttattttatcggtactgtattctattattcctctatagttttccaccgaaatttcctccctgcccttaagagatatgagcggcatatccagtataacctcaccgggaatctccaacgcggctgaaagttcttttttcaaattcggtttgtcttttttagaaatgaatttttttctcataaaaccgctcctcagacccgattgtaaattgccttatattattactatgccgattaacaccgtcaaattacatacttattttcttacaatataaaaacagccgagtataaactcggctgttaattacttacttaataattttttcacgtaaccactcacaactctgttgtcggcacgtcctttaaccttagatgaaaccgcacccataactttacccatatctttcatggtggctgcgccagtttcggctatggtttcctcaactattttttgaatttcgtcctcagtcaattgttccggaaggtatcctaacaggacttctatttccttattaagattatcaattaaatctgttcgaccgcttttttcaaattcgggaagtgagtcacgacgcttttttagttccttagctattacatcaaggacgccgtcatcatcaagctctacatgattgtctttttcaatctgaagaacgcctgcacggacaagctggatcgtattcttacgaacagtatccttgtctttcatagctgtttttaaatcctggaaaagcgtttctttcaatgacatttatatcatcctctttgtatcacaaaattatttgaatttacgttttcttgcggcttcggatttctttttacgttttacgctaggcttgtcatagtgttctcttttacgaacctctcccatgatgccgtcttttgcacagcttcttttaaaacggcgaagagcgctatccaaggattcattttctttaactcttacctctgacatgaatttccctccctccaattgctgagattgctttgtatggtttaagaggctttcagccactataatccatactcattgaattatacacaaaaaagcaagtatagtcaacatcaattttacattgatttcaagcgcatttacttttgtataaacatatttattcttcctcttcaactgcttttttcaatttttccctgctgtttggagtaagtgtaaatacggaagttgccaaaggaggaagatttatcgttattttattggcacatctgttgcagtgttcttttttgcttcttacggcttttttgtttataacgccgctgccgccgtacttttcatcatcgctgttaagtatttctttatagtatccttcatacggaacccctacgtcgtatccttcgacggttttcggcgtaaagttacatattatcacaataagatcttcaacatttgctccgtgccttacaaatgatacgacgctgttttccgcgtcatcgcactctatccattcaaatccttcgggatatgtgtccctttcccaaaaagcaggttcttttttataaagcttaaacaagtcctgtaaaaacagattaagtttacagttaaaatcattttcaagaacatgccaatctatgctttttgcttcattccattcgctgtactgtcctatatcgttgcccataaacaacagctttttgcccggataggcatacataaaaccgtaagccgcccttaaatttgcaaacttctgccatatatcgcccggcattttgccgatcatagagcctttcatgtgtacaacctcgtcatgtgaaagcacaagaacaaagttttcggaataagcgtaagttatgccgaaagtcaagttattatgatgatattttctgtatatggggtctttcttcatatattcaagaaaatcgttcatccatcccatattccacttaaacgagaatccgagaccgtttctgtccgctccctttgtaacgccttcccattcggtagattcttccgcaaatgtcaaaactccttcataggcgccctttatgacggaattcatgtgtttaaggaactcaacggcttccaggttttctcttccgccgtatttgttcggtatccattctccctcgtttctgaaatagtcaagatagagcatacttgccacagcgtctactcttattccgtcaatatggtattctttaatccaaaaaagcgcgtttgcaataaggaaattgcttacttcttttcttccgtaattaaagacataagtaccccattccttatgttcgccctttcgccaatcctcatgctcataaagcgctgttccgtcgaatcttgccagtccgttggcgtctttgggaaaatgtcccggcacccagtcaactattactcctattcccttttgatgacagcagtcgacaaaatatctgaaatcatcgggctctccgtatctgcttgtgggagcataataacccgttacctggtatccccagctgccgtcaaagggatactccgatacgggaagcagttctatatgtgtgtaacccatttttttcacatatttcaccagtttatcagccaattccctgtatgtaaggaacctgttttcctcctcgggtactctcatccagcttcccagctgtacctcatatatattcataggagacctgtatggatcgcttgtctccctttgttttatccactttgcgtctttccaacggtacacgcccaaatcgtatacaatagaagcattttgcggtcttttttccatgtaaaatccataagggtcgcttttgtccgttacgttgttattcctgtcctttatcctaaacttatatctgtcaaattcagccgctccgggtataaatatctcccatattccggaattacccaacattctcatctgagccgatcttccatcccagtagttaaaagagcctataacgcttacgctcttcgcatttggcgcccatacggcaaaggatactccttccgtaccgtttatctcgcatatattcgcccctagtttattatatatttcataatgatttcccgcgccgaacaaatatttatcatagtcgcttaccgtcggcggaaaagaataggcgtctgcggtaatattttcatttccgtcccaataaacaattcggagtttataatcaaaccatttatgcctgtcttcgattacagtctcgaaaaaaccgtcttcgtgtattctgtcagccttataaacggcgttttcatcgtttttatcaataacatatagttcctttgccccgggaagaaacgctctgacagcgactacttccctgtcgtcatgtagcacctcatgcatacccaaaaccgtgtgcggatctttatgttcacagtttactataagattcatttcgtatatgcttacggttgaaatcatggatacccctccctaaaacagctttcgtcaaaattatattatagctgtgtcatacagataattatgtcaatccatgtcgtaaaaattatgctttaatcattgtatcattaacaagaattttttaccacactaaattagtctttattctatataaaggattctttaattagcttatattcccacacctttgtcgctctatatgtaaaatttgcatttttatgccgacctatgcatataaaaagcaggggatatattcccctgccgtatatcgaccttattttattttttattcagaagcgggacatcataaaattcaagtttcggatatttcattgtttcatctacaggcttcaaaaacagtatgctctctatctcatcaacgtctataactctgtcggacgccagcaaaaatgaatatatgtcggagttctcgtcttcatatccgcctcctcccgggcctgtataaatatatttaatgactgtgccgtctttaagcttcactcccttggcaaacggaggctccccgaacatagtaaccatacccacttttccgttttcgtccatatactcttcttccgtctcctgtctcgggaaatcgtattctaccataatcgatatgggtgatacttctattttctttacttttgctcctgtatcttccagcataaaatccggctcatacacctcagtcgtatctgcccccgcaagagtccagtcaaatgtccaattaccttcaataccgctgaaatactcagccttggcaacagtgcccaggtttttcaattctacatgtatcggttttccgaaaaactttcctttttcctcattatggttaaaaagagttatatggtattccatagtcccgtcgtccaaaacgtaattctccactattcttccgtctttatcttttgccaacggtttgccatctgtagtaataaggttaccgttgttatcggaaacaatcccgtcccaaaagcctgccgatattccaaagtcatcttttccgtccaccgtaatatcgaactcctcaaagtccggctgtttcccctcttcaatttcaaagccctctaccctgaaagcaatatgagtataataattatcagttatactctggattgccgttaccgtaatgccgttatctgtgcatgactgctctacaaatttattcattccgctgttttcgacatttttcatttgatcttccgatacctgcattccttccgacaggctttggctccattttaataccgctgccgccgttgttacggcgcaaagcattactgccgccgcaacgactaccgtcatttttttaaggttgtgtctctttgtcggctttatattttttatttcggcttcctttgtattatctttacattccgcatatatcttttcaaatgcgtcttcagcctttttatttactatctcgggtatttttacatcttctctgagtttatcgaatatttctttcataacgcctgacctcctgtttcatactctctttcttcgtaaatctgcctaagctgttctcttcccctcgccaatctgcttcttacggttccttccggcataccaagcatttcacttatatcttttgtattaaaatcttctatataatacagtacaagtacaagcctgtatttatccgaaaccatattaattgtctctttccactctgtattttcaaagccggagtcaatatagggcttatctggaatatcggcttgcaagatatatttttttctgcgtattatgtcgttgcatttatttataagtattcttgtcatccatgttctgaaatatttttcttctctcagacaacctatgctttcccaacaggtaagtatggtatccgatacggcgtcggctatatcctcgtcattcataagaattgcccctgcagtcttatacatgctctgcatctgactcttcataagccgtgtaaacgcatcaggctctcccgcctttgcagctcttatcattttttccataaatgtctttcctttcttttctgtacgtacaggagcattttttatgcttctgtatattagacggaatagatacggtttgcgctccgttttcatataaaaatattttttaatttatttcatctatgaaatatcaaaataaaaagacccgtttaaaacgagccttttttcagattatcaaatttttatttttcttatccagttatatttatcttcaattttgccgtactgggtctttgttattgtgtcatatatgtcctgagcaacaggtcctatctttccttcgttgattatataattttttccgttatagagtatttctcctacgggagatattacggcagccgttcccgttccgaacgcttcgtcaagctttccgttttctgccgcttcaatcagctcttctatggaaatcttcctttcttcaaccttataccccttgtctctgaggagttctaaagccgacgcccttgttattcccggaagtatgctgccgttaagctccggggtaacgacagttccgtctataacgaacattatattcatagagccgacttcctcaatatactttctttcaatggcgtcaagccaaagtacctgcgcatatccggcttcttccgcctcttcctggcttttaaggctctgtgcgtagttagcggctgttttcgcaaatcccgttccgccttttacggctcttttaaaatcatgttcaacatatattttaaccggctttataccttcttcgtaataggaagcaacaggacagaacatacatacaaatttaaacgtctttgacgaatgaaccccgagattttcatcggttgctataatcataggtcttatataaaggctctttccctcttcctttggtatccagtctttttctattttaattgcttctataatatactccgtaaattcctccgggtcaagttcgggtatacataaacggctgttggaattattcatacgttcaaagtttttttcaggtctgaaaagatgaatcgtattttcatcaatataatacgctttaagtccctcaaaagaactctgtccgtagtggaataccattgttccgggataaagttccagcggaccgtaaggaactattcttgcgtcatgccagcctttttcggggttatagtcggcaacaaccatataatccgtaaatatctttccgaaaccgagattatccatatcgggtttctgtttaagttcttttctttcttcaaatctgattttcatagttttccctcctgaataataatactgttttctaagcgccgccgaaaaagaccgatcccgaaaaacaaaaaagcctttcgtctcttatgtaaagagacgaaaggctaaacttccgtggtaccactctaattcatctaaaaagatgctctcaaaacagatacggcaaactgcttatatcctgccgctgtaacggtcggcatccgtttccacctacttgaaataactcgttcagcgaaccgttcaaaggttacttcaactgaaatctcagtactgcctcgcaccaaacggcagctctctgaactgtatcagacagtctacttgtcctcatcactacgtttatcgttttttacagattaccacacgatttttcatgtgtcaatatgtttttttatttatcaaagttaatttttatcgtttactcatacaaatccaagtcgctcaaatctattgaggttttttccgtatctataggtttttcctttggtttcatactttccgaaggttccgaatattcgttaggtttgaaaaattccgaaagtaccgaatgcataacgattgccgtaagacctccggcaaatccgttattgtaaaggtttacgcccgaataccccgctccggcatacaatactacgcacgaatgtataaatcctgctatcacacctgcgatagggccgtatgtgcccgataccggcgcaagcgttgttccgaaaagaagagccagctgcgccgcaggcgtaactaccgctccgtcccctcttaaaactccgct

SEQ ID NO: 3541 - DNA, 4340 bp, Unknown
  16S sequences of unknown bacteria
atcggcacgtttctttttctctcgcgagagaaaaagaaatgtggggcgcaaccgttcccctcctcttccaagaggagaaaaaaaacgcccccctcttccaggggggaaccccccgcccctgcccaaaaccgattgaaaaaccgcccctcccgcgttataataatagggaaaaacaacaaaccaaacggttttcccaccaaagaaaagagggttatttgtatgaaagacggttttatccccgtggccgtgggcagcccgaaaatccgggtggccaactgccattacaatgccgagcagattttcaccatgatgcgcgcggctgagcgcgagggcgtgaaggtgctggtgctgccggagctgtgtctgacgggctatacctgcggcgacctgttttatcaggataccctgctcgacggcgcctgcgcggcgctgcagacggtgttggacgccacccggaatctggaagtgctcaccgcggtgggcatgcctgtgcaggtggagcagaagctgtacaactgcgccgtggtcatccagaagggcgagatcctcggcgtggtgcccaagacgttcctgcccaattatggggaattttacgaaaagcgccagttttcccccgccccggagggcgaccctttctatgtggatcatttctgcggccagacggtactgttcggtgcgcggcagttgttccagtgcaatgaaatccccgcgctgacggtgggttttgagatctgcgaagatctctgggccagcacgccgccctcggtggagctggcccgcgccggcgctacgctcatcggcaatctgtcggccagcaacgatgtggtcggcaagggagtgtaccgccgccgcatggtttccgtccagagcgcccggctgcagtgcggctatctgtatgccagcgccggggaaggggagtccaccgccgatctggtgttcggcgcgcatcagatcatcgccgaaaatggaacgctgctggcggaaaagcgctttgaaaacggcctgctgcgcacggaggtggacgtgagcaggctggtatacgagcgccgccgtactcagagcatgggcacggcagccgaaatcaccacgctcgccttttccctgacggtgaccgacaccagactgacccgcccgattgcgccgctgccctttgtgcccgcggacaaggacgaccgggccgcccggtgcgaggaaattctgctcatcgcttctctgggcttgaaaaagcggctggaacacaccggggccaagactgccgtggtgggtctgtccggcgggctggactccacgctggcgctgctgatcaccatgatcgccatgcagatgctgggccgcagcccctccgatgtgatcgccgtgaccatgccgtgtttcggcaccacggaccgcacgaaaaacaacgccgtggagctggccgggcgcatgggcgcaacgctgcgcaccgtggatatttccgaggctgtgcgcgtccacttccgggacattggccagagcatgagcgaacacgacgtgacctttgaaaacgcccaggcccgggagcgcactcaggtgctgatggacatcgccaacaagaccggcggcatcgtcatcggcaccggcgatttgagcgaactggctttgggctgggccacctacaacggcgatcatatgagcatgtacgccgtcaacgcctccatccccaagacgctggtgcgccatctggtagagtatgtggccaaagacaatctggaaaaggatgaggaactgaccaacgtgctggaggatattcttgacacgccggtttccccggaactgctgccggcagtgaacggcgccatttcccagaaaacggaggatctggtgggcccttatgagctgcacgactttttcctctattctattgtccgctgggcgttcccgccccgcaaggtttaccggctggcgcgctgcgctttcgccgggcgctacagcgacgcggtgattctgaagtggctgaagacgttctaccgccgcttttttgcccagcagttcaagcgcaactgcatgcccgacgggccaaaggtcggttcggtatctttctcgccccggggcgactggcgcatgcccagcgacgctgtggccaaactttggctcgacgaggtggagctgctccaggacgcgggcaccgacgtggcaaaagtataaaataaggagcctttatgaaaactgttaccctgtataccgacggtgcgtgcagcggcaaccccggccccggcggctggggcgccattctctgctatggggagcacgagctgtccctctccggcggcgaagcgcacaccaccaacaaccgcatggagctgaccgccgtgatcgaagggctgaaaaagctgaaagagccgtgcatcgtggaattgtattccgacagtaaatacgtcatcgacgccctgtccaaaggctgggcctggggctggaagaaaaaaggctgggtgaaaagcgacaaaaaacccgccctgaatcctgatttgtgggacgttctgctggcactggttcagacccacgaagtgcattaccactgggtcaagggccatgcggacaatgcatacaacaaccgctgcgacgccatggccgtggccgagtggcagaagctgaaatgatattcgccgccctgtccggaaacggcgcaggcggcggagcgccggaaggggaggggccatgaagtttgtcaaacagcacagctgggaacaggaatgggctgatacgctgcgtcaggagaaagcatatctgcaaaaaaacctgcacaaaaaggattctgccctcaaccgaacgctggaagagcgcatcccggacaccctgcaggacacgctggacgacgccttttctaaggctttcgcgctgatctttgaaaaaggaaccggcgtgatcgagcagacttacaacaaaaaacgcaaggccgccctgtttcagacccactgcgccgcagtgcggaagcagggggaccggcgcaccctgcaggcgccccgaaagcagaccggcctggccgccgggagaaatctggctctttcgggcgtggaaggcattggattgggtctgctgggcatcgggctgcccgacattcccctgttcaccgccatgattctcaaaagtctttatgaaatcgccgcggggtacggctattctcaccgcacccaggaggagcggcggtttctgctgcagctgatccgcaccgccctgtcccacggggagacattggctgcccagaaccgggcgctggaccgctacatcggtttgggccgctgggacgacgccaccatactgcgccgccagatcgatgcgacggcccgttcgctctccggcgaactgctgtatatgaaatttctgcagggcatccctctggccggcgcggtgggcggggcttacgacgtgatctatctccaccgcatccagacctatgcccgcatcaaataccacaagcgctttctgctttcgcgcaaaaatgaacttgcattttaccgctgagaccttgacaaaaacaacgccgggagaagccttttccgcttcccccggctttttttgtgtgctgcggcgccttataccctgcgcagcagatccaccatttcgatggcgctgagggcgcagtcgtagcctttgttgccggccttggaaccggcgcgttcgatggcctgctcgatgttttccgtggtgatcacgccgaagagcaccggcacccccgtatgcatggctgcctgagcgatgcccttggccgtttcgctgcacaccagatcgtaatggctggtagccccacggatcaccgcgcccacgcagatcaccgcgtcgtatcttccgctttgagccagcttctgtcccagcagcggcagctcaaaggcaccgggcacccagtaagcgtcgatgtcttccccggccacgccgtgacgcaccaggccgtcctcggctccggccagcagcttgtttacgatgaactcattgaaccgcgaagccacaatagccaccttcataccggtcccgatcacattgccctgtatcaaattcactgtcgttccctcctgaaaccgtcttgtattacgtttgtgtttttgtttcttacaattccacccgttcaaacaggtgccccattttttcctgcttggttttcaaatagaaccggtcatacttttgcggccggatctcgatcggctcccgccgggtgatttgaaggccgaaaccgctgagtccgtaaattttactggggttgttggttaaaaggcgcagttccttcacgcccaaatcccgcaggatctgggcgccaacccagtattcccgcagatcggcggcaaagcccagcttgaggttggcttccacagtgtcgtaaccctgtctcttat

SEQ ID NO: 3542 - DNA, 1885 bp, Unknown
  16S sequences of unknown bacteria
aaaatgagaagatgagttgcagaaaaagcacaaagttgatagaataaagaaaacagcaggcgaatctgaactggatgtccgcctgaaggaattctggaggcagaacgatcatttttcggatctcatcaatgcggtggtatttcatggaaggcagcggattacaccagagatgctcgttgagcaggatacagatatttccggagttgtattgtttccagaatatgaggagacgctgagcattacagctttcacaacgaagcggtgcggactgtgttcgaagggacaggggcattactgcgaggggatctggatttcatttcaaaaaagtataacaaaccaattccggcagaggaggcgatcctgatcgcgttgatttcgggggcggatgtgttacaggtagaagcggagagaggagagtgtgaatatgtgtacggcgttggaacggctggcggaggagaacagacaacgagggattgagcagggaatcgaacgaggaattgcgcagggaagatgcgaagaaagagatgcgacagttaaggcacttctgctacagggcttactgccggagcagaaaattgcagaagcagtaaatatttcgatgaaacagcttcaggagattaaggagaaaatgatagggggaaaggtgtagaaattccatcaaaacgattgctgaactggtagaagtttcaagttccgcagattaaaggatggctgaaagaggaattgagatgttgccgttttccggtgagccggaagcgagaatgtaagattgagtagaggagttgcatggctactggatggtgattttgaagaagattgtctgattcacagcccgattccggagtacgacaatcggtatgcatttgataacaaccgccattttataaagtatgtatatcatattaaacgggataagctgtttgcagatttatttgcaaaattgagcagataagaatatgaataaaatgtaaaacaatagtgctgctgttctataggtgaatcatctatggaacggcagttttttgttgaggcaaaaagattcgacactacttgggataccataaataaaaagatgcttgaattaataaaaagaatgcattataattcatacatagtatgatgctaaaaatagcaaaaagaaaataataaaaaggagaagatgagttgcagaaaaggaacaaagttgataaaataaagaaaacagcaggcgaagctgaactggatgtccgtctgaaggaattttggaggcaaaatgatcattttgcagatctcatcaatgcggtggtatttcatggaagacagcggattaccccggatatgctcattgagcaggatacggatatttccggagttgtgtcatttccggaatatgaggagacgctgagaagaaaccatgatgtggtgaagaagctggcgcttgacacagaatttcaggtctggtcggtggaaaatcagaaaaaggcgcattttgcgatgccgctgcggacgatgatttacgatgcgatgggttatctgaaggagtataaagagctggcgaagaagcgaaatcaggatcgggcggcaggcagattacggggggagacttcagaagagttcctgtccgggatcggcaaaggagacaggctgcatccgcagctgtcgatagtgctgtattatggtgaaggacgctgggatggcccacttcgcctgaaggatatgatgccaccatttccttgtgggacggaggcactgttttttgattacgggattaatctggtgcagattattgacagtgagcattatatctttcacaacgaagcagtgcgaaccgtgttcgaaggggcaggggcgttactgcgaggggatctggatttcatttcaaaaaagtataacaaaccaattccgg

SEQ ID NO: 3543 - DNA, 29112 bp, Unknown
  16S sequences of unknown bacteria
agaacgccccaccgcccgtcgcgcacgccctccgtgcgtttgggttccaacccttccgcggacagtttatcttcgagattttcgcaaagagccttgacctgctgggtgctgcggccgctcgccacgataaagtagtcgcacagcgaagtcttttcgcgcacgtcgatgagcacgatgtcctcgccctttttcgaggataaaaattcgcagatgctctttgcaagcgtttcggtttggttttctgttttcttcttcatgtttttttccgttcctttaaaaattgatatgcttcgagggtgagatgatagatctcgcctttttgtcgtttgaggtatttgatctgaaggcgcaggctttccagaaggcacgcgtccagatcggtataaaagagtttgcgcaaagattccacgccgcggaaatcccgacccggttcgagcatgtcggcaaggtatatcgccttttccagttcggtcatgttgggctttgcggaagtatgccagcgcacggcgcccagaacgtccgcatccgtcacgcccaaaacgtgctcggcgacgtacgcgcccgtaaactggtgcagaacgggaggcggcacctcttcttccatggaaaagcccgcaagttcgggcgcgtcgggcggcatgtttttcgccacgtcgtgcagcgccgccgcaagaatgatcttccgctcttcgagcctgtatttcgccgccacgtcgcccgccatgagcgcgagccgcagcgaatggttgcgccgcgaaggtttgagatagcggaaacagtccttcaccccgtccacgcggtatagtttgttcgcctcgatataatcgatcacgtcctcgcacagatacggtttgagatcctctccgaacgcgcacagtacgcgcgctttcgtggaggatacgttgcgccccacgtattcgattacgcggaactttttcttgaaccgcgcgaaaaatctgagcgcttccacggcgaaattcactttgtcgccctcgcggttgcacacgacaagttccgcaagggataaaatggtttcgggatttttccagttgtaaaaatctttgagcatatccgagccgacaagaaagtacagctccgcgtcgggaaatttgtttttgtagtattcgagggtcaggtaggtgaaactggtgcttttggcgttgatctcgtaggcgctcacctcgcagcccttgacggactcgaaggcgcggcgcgtcatttccagacggtcggcgggcgaagcgatctctttgccctgtttatgcggcggcacaaaggcgggcagaacgatgactttgtccgcgcccagctgggctttcgccgccttgacgatattgatgtgttccacgtgcacgggatcgaacgtgccgccgaaaatggcaattttcatactctttctctcttcgccgcatatgacgtatagaatgtatatccaaattataccacacttattccgtgcgcgcaaggtttaaaattcggaaaacgggataaaatcagtttatgaaaaaatttgtgttttccgtgtattcggatacggtgttcgttgcgttcgtcgcatttttgctttcgtttgcgctcttccgcttttatctgcgctcgttcgcactgtcgctcgcgctcgcgcttgtcaccgcgctcgccctttccgcgctcgcattcttacatatgcggcacaagtcggataaaaagttgttgaaactttccgacgagcgggagatcagcaaactcgcctttcacctcgccatggacacggaagaaaacaatctcgaacggctctttgcggcgctgttcgaaaaagacgataaggcgcagcgcgccgacgactccgtcgtcgtgggaaacgaggaatattttttctccttccgcttggaacccgtgcgcgccgacgagatcgccaatctcgtgcggcggggcggggaacgcgaaaaaatattgctgaccgccgacgtcacgcccgacgcggaaaaactcgccgcggcgttcggcatccgcatcatgcgcgccgcggacgtatatcttttatacaaggaaaccgaacaactccccgaaaattatatccttgcggaaaaaatgaagacgggctggaaagaaaaactgaaattccgctttcagaaacgcatgtataagggatatctgttggcgggcgcggcgctgctcgttttcagtttattcacgtttttccccgtctattacctcgtcgcgggcggcattttattgagcctcgccgtggcggtgcgctttttcgggaccacctgatccaaaaccaaaaagcagtccgttttgcgggactgctttttttaaaattcgacgtgctcgaaatcttttctcgaagaacggcggtacagaatgacctttctgccgatgaccgccacgcagtcggctttgagcgcttcggcgagcgccgcgcccgtttctttcgcctcgttttcggcgttggtcagaacactgatcttgatcagttcgcgcgcttccaacgcgtcggacagcgatttgaccatattttcgttgacgccgccctttcccacctgcgcgaccggctgtaaattggcggcgagcgcctttaaattgcttctttgtttgctcgttaacatattgctccttttttctattccttgaactcgaattccacctgcccgacgactacgacgtcgttttcgcaaacgcccgcctttttcagggctttgatgacgcctttatctttgagcactttctgaaaatacgccatcgaatcgggatcggataaaaccacgttgcgctccagcatgtcgatcagtccgcccgtcacgtagtacacgttttcctcctcgtccttgccgacggaaaactcgttgacgtcgggacgctcgtaggaaaactcgtccgcgggaatgggttccgcgggcgggagcgtcgacaaaacttcgaaaatttcgtcgatcagttccgccgtaccctcgcccgtcaccgcggtgacgggaaattttttgtatttgcggcattttttgcggaattctttcatgttctcttccgcgccgtacacgtcgcatttgttcagaacgacgatctgcggcaaagacgccaactttttgctgtactgtttgagttcggcgtttatttttttgaaatcctcgtacggatcgcgcccttccatgcccgaaatatccactacgtggcagagcatgcgcgtgcgctcgatatgcctgagaaagtcgtgccccagcccctcgccgttcgccgcgccctcgatgaggccggggatatccgccgccacgaaagacttttcgtagcgccgcaccacgccgagattgggcgaaagcgtggtaaaatgataatttgcgatcttcggccgcgccgcgctgatcttggataagagcgtgcttttgcccacgttgggaaagccgatgatacccacgtccgcaatgactttcagttctaagatcagttcgtgcacgggcgtcttttcccctttctgcgcgaaatggggggcgtgcctgcggctggtcgtaaaacggatattgcccttgccgccgtaaccgccgcgcgcgatgagcacgcgctcgccgtcgttgtatacgtcgcacagcaccgcgcccgtcgccgcgtcgcgcacgagcgtgccgagcgggacggaaatttcgatatccccgccgcccttgccgtaacggttgttggtgccgccgcgttcgccgtcgcccgccgtaaagcgcgagccgaaacggaattcgaacagatcgttcctgtccttatcgcccacgaaatagacgtcgccgcccttgccgccgtcgccgccgtcgggcccgccctgcgcaaaccctttgaaactcttgaacgagttcatgccgtcgccgccgtcgcccgctttgaccgtgatctttactttatcggtaaacatgggtaccccctcggatcatttttgtttatagtagtcgcagtattcccgcaaagcgcagttttcgcagtcgggcttttgcgaatggcatacgcgccgcccgtgataaatgagccaatggtgcgccttggaccaatccttttggggaatgacctttttgagttgttcctcggtttttagcggcgtattcgcgtctgccagccccagacggttggaaacgcggaacacgtgcgtatccaccgcgatcgcgtccttatcgaaccagacggcactgacgacgttcgccgttttctgccccacgcccgcaagcgatttgagatcggcaaaactttcggggacttgtccgccgaagcgttcgacgatatctttggtggcggataaaatgtgcgccgccttgctcttgtacagcccgcaggaaaagatatatttttccagttgttcctgcgacagcaaaagcatggtttcgggcgtattgtgctctttgaagagttccgcggtgactttgttcacgcgctcgtcggtgcactgcgcggagagaatgaccgcgatcaaaagttcgtacgcggtggcgtagtgcagagcgggacgcgcatctttatacagttcggacaatatccgcagcgactgctgcgcattttttgcattcatggaaatattttaccataaaaaggcgcggggcgcaatcagtttgcgccccgcgtgaaaattctttatccgttcaagggatatacgaagtttttgccgtatttgaattcgaaggcgtaaaagccgacgaacgcactgaaacgataattctgcgccaccctgcgcgcgcgggaaagttccgcctcgttgatctttgcggagatcccgcagcctacgttcgcttctttgggggtggaaaccgccgttgccgacagaccgttcgcgcgcaatttcgaaataaaatccagcgcctgcgaacgcgaacggaacaccgccagaatgattttcatgattatcaccgcctgttgtcgtttgtttttgcaaaatttgaaagcgtgcggcataaaatattagtagggcgccgcatggctttcgccctttccatatcaatatattcggcggagggaaaaaatgatttactttgacaatgccgcgacgggcggaaaaaagccgctcgcggcggttctcgcggcatatgccgccattaaggacggctctgtcaaccccggccgcagcggtcaccgcctgtcggtaaacgccgcgttcaacgtgctcgcgtgcagaaaacttttgtgcgggtttctcggcggttattgcgccgaccgcgtcgtattcacgaaaaactgcacggaggcgctcaatatcgtcctgttcggcggcattcccgcgggcgcccgcgtcgtgaccacggcggcggaacacaattccgtgctccgtcccctacataaactgcaaaaagaagggaaaatagaactggaaatcgtgcgccccgccgagggcgagagtttcgaaaacgcgctggcaaagagcggaaaggacgcggattttctcgttttcacgctcgcttccaacgtgacgggcatgcctatcgacgcgaaagcggtcagaaggctcgcgggcgaaaagccgtacatcgtctgcgacggcgcgcaggcttgcgggcatatcggcgtgaacatgaaagaatcgggcatcgacgcgctcgccctcgcggggcataagggaatgcacggcattcagggctcgggcgcgcttttattttcgccgcggctgaaaatcgagcccgtacagttcggcggcacgggcagcgagagttacaacctcgatatgcccgacgtgtaccccgacgctttggaggcgggcacgctcaattatcccgccatactgtcgctgttcgagggaacgctgtacgtgcagtccaaactgacgcagaacgcacactacgtgagcgacctcacggcgctcgccatcgagcggctgaaaacggtctcgggcgtcaaaatctattcgaaaaagaacgcttcgggtatcgtggcgttcgagcacgcgaacgtgccttcggaaatgctcgcgcagatgctgtccgacgagtacggcatcgcggtgcggggcgggctgcactgcgcgccgctcatgcacgaatatttaaagaccgaacaggggctggtgcgcgcgtcgctttccgaatttaatacgccgaacgaagtgttgacgttcttttccgcagtgcgcgatattgcgcataaatatgcgtgaccgacacaaaaaaaaccgcgtactttgacgcggttttcgggacgatctatgtaatttacatacctttcagttttttgatgacggcagcgagttttttgcgtttctgggcatcgagcatagggctgagcgtgttgtaaaagttatccaactcggcgtcggaaagcgtgcccgccttgcggttcttttccgcttcctgatagatcgctttcatcagatcggcctcgctcttgccgttgaacgaccccatcattttcgcggccatctgcgccacattgctcttttcaaaactttccttgtcgctgtcgccgccgggcgtataagaattgaaatctttcatggaaaccctccgaagtttattcaatttatgtatatgccgaaagcgcgacctttgacacgaaccatacggaggacgtattatggaactcatactcatcatcattctttttctcacgcaaatgaacggaaaaaacggaaagcccgcgttggaactttccaaactcacgccccttttgtccatgctgggcgataaaaatttatcggaactccccgcgctgaaaaatctggatctcaaatcccttctgcccgaaaacatgaacatttcggatattctgagcgcggtcaacacattttcgtcgtttgccgcgccgcaagccgccgagccgaaagcggagccgacgcagtcgatgccacccctgcgccctatctcgaaaatcgcggacgcgaacattacatacgcgctcaatcaatatttttcggagtaaaactctttcgcaaaacagcaaaacaaagtctgcacattgggatagcgttcgggggaaaaatccagccgaaaactcggtatcatggcgatcagcgccctttcgggcgtatcgacgacggacattttgcgaagcacggggagcggaacagagcgcagatctgcacacagacgacgatattcggcggtttcgtcgggcataaaaaccgccgaaaaatctattttttccagacggcgcaggcaagcgtccacacattctttttcctgcggggaaaattcctgtccgaacgcaaaaatccgcgtcagacgcgcgggctgaaaaaaacagcgcgcgatctcgtaacgaagcgcgtcttgtattttttgacgaatttcttccgacgaaagattgattcgcaccccctctctttcaaatacaaatccttgtaaaaattttttcaaaacgcgcctatttttgtaaataaaattttgcattttaaaatctatctgtaaagtatcgtacaaaatccgacggcactcgccgtgtgtgaagacgtagccgcacacggctttttccatatgatcggaaatatcgatcaattcggcattcttttctgcattcatggttttactcaaaaatattgatgatttgtttattgttttttttcgcgtgctcgcaggcgagaaaagcgccgccatgcgtgcggctgacacccgaaacgataacgtccgccctttccgccaaaagtctgtttgtttccagaatggcgagtttgggcggaatttttctgtccgcaaggtacacggaatcgtcgaagaaatacggcagttcaaaagacggacgcggaatatacgaaagcaccattgtatttttgatttggggaaagttccgtttcagtttccaaacgacctgcgcgcacaatttatcgaaattcccacgatagcccgaacaaaactcgactattccctgctgttcaatcaatccgacgatgatatttttaattttttcgcaatacggcatataatcgaaatttctatgaccgaaaaaagcacatgttttcataatatatttctcctcgttttatttaatactatttaggtataattttagacctattttatatactataatagtcctataagggaatatttttatgaatatcaaccaaagaataaaaattgaaatgaccagccgtggttggaccgtctataaattatctaaaattacgggcatcagtaaatcagccatcaatggttggtttaaagaaatccccactgctccgaattataagtctattcgtttagttgcaaaggcttttaatatgaaagccgaagatttagtttccgaaaaaaaagatgccgaccctcaaaaacaagaaatgttggagttatggaatcgtttggaaacagccgaaaaagataccgtcatcggcgttatgaaaacgattatcgaacataataaataacttcaattagtataattataaatgagtattctcataatgtcaatgaaaatactcataatattttataattcaactatgtttgatattcgtttaaaagaattaaggctggaaaaaggattaacgcaaaaggaacttgcgcaagtcattcaatgtgatcaatccatgattgctcgttgggaaaaaggcgaatgtgagccgaccgaaagcataatcaggaaaacagcacgattttttgaagttacagccgattatttaataggtttggaagatgaatcgggtacgaaaatttaatggtataaaggagagggacgcccccgtcgggggcgtccctctccttattttttaaattctcgcaagtactttcgaaagttcgggatcgccgtaaaccgtcgcgcccgtcgtttcgatcggcgtcgcgccgtccgcctcggtcacgcccacgccgtggatgcaatgcccgttcggccaaaaaatcttcgccgtcgtcagtttcgccgcctcgcccgtgagcgggttggaaaaggtcgtctgcatgatgcccttgccgaacgttttacaggtgtttccgattttcgaaaggaatatatccccgtaccctatcgtgccgtaagatatcatcgcgccgatgagcgcctcgctcgcggacgcgctgttgtggttcgccatcacgtaaattttgctgtccgcaaaatattcgtcgtagtaattcgctctggaataatatttttcctctctgccgccgcggtattgcgccgtcatgaccagattctttttttccttcgcgtcctttaaaagaaaattcgaaagcgactgcatcacgtccacgcttccgccgccgttgttgcgcaagtccagaatcagtttgcttttgccgtcggctttgtactgctcgcacgcgtgcgcgaaactgtcgtacgcgttgccgtaaaactgcacaagccgcacgtacgccgtgtcttggtccagttccgcgttcccctcgccgtatttttcccacgccatgccgttctcgccctcgacgagcgcccaactcgaattgtaggtctgatacaccgcgtaactttcggtaaacgctttcttctgcacttcgtaaatttttacgttctccgtatcgtccgcggcatcggcggaggcgcgcagataaaaagtctgattgctcgaaatatcgtcgagcgccttggaaagttcggtcggcgtaaacgtggaaacaaactcttcgcggctcatgccgacgcccgtgatatacgtgccctcctccatgcccgcgaaaaaggcgggagagttgacggcgaccttataaatcatattggtatccgcaaaaaaagataagcccgcgcccagtttttcgcccttggaagaactgacgatcacgtcatactcgtcggcggtgtagagcgtggaatattcgtccagcagcccttccgcgcccgagatcgcggcgttccagaaatcctcgtcggaaatattttcgtaatattcgtcctgcaccttgttcttgaaccatagaagcgagcgcagcccttcgtcgagcgtcagataataggtgaaaaaccctgcaaaaaacagcaggacggccgcggcgacgcagcccagcgcaatgagtaattttttcgttttcgcattcatatttatttcctttcgttccaccagtcgggcagaaattctccgagcgtcttgtaccgctcttcttcaagatccgtcaaaaatttcgtgtttacgttttcgggcgataattgatacaaaaattcgcggcaactgccgcaaggcgtcatcagatttccgcgcttgtccacgcagaccacgcggcgtacgacgcgttcgccctcggtgagcatggtgcccgccgcgttgcgctcggcgcagtagcccagcccgcaaaagaggtcgacgttcacccccacgtacactttcccgcccgcgctttcgagcgccgccgccaccatgccgtaggacaagccgtcttcttcggtgggattgagcgcggaaaccgccctttcatacatttcccgatgcgtcattttggtacctccgagtaaaaaagcgcgcatacgtagcatatgcgcgttctcattttttatgtccgaatccgcggcgttttatccgccgccagcgcgaattttattttacgagtttaaacaagatcgtaatgatgcggaaggtgaccgcgtcggaaaatttgcgcaggttcagccccatcacgcgctcgatcttgtccaagcggtacatgagcgtgtttctatgcatgaaaagattgcgcgacgtttcgctcacgttgaggctgttttccagaaactcctcggcggtgttgaccatttcctcgtcgcgcaagagttccttcgcttccttgtccagcaaaacggaaagataatcgcccagtttgccctcggggatatcttcgagcattttgatgaggataaactcgcggtacgtgtgcacgttgcccttggaaccgaacacgctgctcatgcgcagcgccgttgccgcctgctgataggatacgcacgcgtcctcgaaacggcggaaagtgccgccaacgccgatctctacgcgcagtcccagttcttcgtacatggaattggcgagaaaaaacgcgaaatccgcactcgactgatattcgccgtcgtcctcgatgaacttgacgatgacgcactcgcgctcgccgatcttcaccgcgaaatccacgccgttggtcacgtattgcgcggaaatgttcagaacttccgcaattttctgcccgctgcgcacggcgagcacgtaaaacggaagttcgggcacggcgtacttgatcttgaatttatgcacgtccgcgccgctgcaatcgccgagcaggatccgtttggcgtattcttctttggaaaggttgccttcgcgcgccgccatgttttcgatgaggttggaaagcatataggcatagttcgcggcgacggcgccgtccccttcgatctcgccgaacaggcggtcggtcttgtaatagagtttaaaatgcgtgcggtgggattccgtatcggtaaataccgtatcgaaagaaagttttacggggcgaaaaaacgttcttcccgtcgcggaagcgataaacgagccgtccgacgcatataataatacgtcgatacccgtattttcgtagacggtctttaaaattttcgtgagttctctgttcatggcggcgccccttttcgcaaaccttagcggtttcccgtttattatagcgtatattccaaaaaatatcaataaaaatttttttattgcgcgagaaagtccgtaaaattttaccaaacgagcacatactgttcatatcccgttccgacgatttgcaccgttgtcgaattttcctgtttttagggaggaatatttgtttataacttgacacttggcgggatatgtagtaaaattatttatacaataatatagagttccgcggaaaaagccgatttttcaaaggtattttccacagcggcggacggtgcggcgttccgaaaaaaacgcgcccgctttctcattaaaattcaattatggggtacatttatgagtaatcaatctgcggcgacggccgcaaaaaaacaaagcaaggctttacagctcgtgcttgccctcctgtttctggctgggtttgccgtgcttgccttcctgcccgacgcggcgggattcaaaggcgacagttttttcgatctcatcacaagactgtttcgggacggagccgcctcactcggcaaatttgcgggcgcggccatgtacggcgtgctcggcttttacgccgcgctcatcgttctgaccgtcgtttctttcttcgtcaaggggaaaggcgcgctcgttttgaactacatgaaggcggtcttggcagtactcgcgttcgcgctgttcgccttagcgctccgccaggacggcaccgcgggatttgcggcgatcttgaccgatgtcaacgcggtgctcttctcgctcgcgctcgccgtcctctacgtcgtcgtgctcaacttctcggcgtacgggcgctacggcatcgtcaaatgcctgctttttctcattgcggcggcgttcttcgcgttctattccttcgtattcgtcaacgggctgaaacttagcggcctgttcacgttcgggctcgatctcggcgcaaaaaccagcgaaaagatcgcgagttacgcgtttatggcgctcgcgttcggcgctgtcgtcaacgcggggcttgcggggctcgacctcatcatccccagaacaggcgctctggatctcatccgttccatcgtatttttcatcatcgcggcattcgcgttcgtcatgctcgcggtgttgacttcctttaaggatatttccgataatctcgggaccatctgtttcctgggccttgccgcgttgcagggcatcgtcgtgatcatcgtcaacgcgctcaataagcgcgcggcgcaacggcgcgagagcgaggacggcgcgttcgtcttcgacgagaacgaccagatggcgatcaagggcttcgagcccgcggcggagaccgaaccgcaggccgcggaagaagcgcccaaagcgagcagcgcgctcgacgacgcggcgcagatctccatcgaggatatcgtaaacgaaacgcaggcggaaacggagaccgcggcgagcgcggcggaggccgagccgttggacgaggcgcaagagcccgaacccgtaatcgaacccctggaagaagagcccgcttacgagggcgaaccgcaggaagaaaagccgttcaacttcgaacaggcgcagtacgacggacagttcaaccgcgaatacgcggacttcgcgcgcagacaagaacaggcgcaggaaacgccccgcgaacaggcacagcaacagccgaacaacgaccggcaggcgcagcagccggacggaggtttcgcgggttatcaacagcagcaacaacagcagccgaacagcggctataacaattatcagcagcaggcgccctacacctacggacagggctacgcacagcagttcgcgcaaaattacggcatgccctatttcggcggcgccgtgccctatctgcccgacgcgttcatcaacagcctgacgccgcaggaaaaagacgagttcgaccgcctgttcatttcccgcatctacggcgagaacaagcgccttcccatgtaccaggtgggcggcgacaaccgcgagtttttctccaaagtgttcgtattcatcggccgttacagaaacgtgatatccgacggactgctcgaaaaaatttataaccaaagcaatcttttgaaataatttttgccgttcataagcggagcctctatgcaggctccgctttttttggttttatttccccgaaaaatttttaaaaaatatattttaaaacgcttgacaaataatactatgcaatgtatagtataacgcataagacagtattgcaaaggaggcggcattggatacacagttaaaaaaagggctgctggacgtatgcgttctgtccgttttgagacgggaggagtcgtacggatataagatcatatccgacatagcgccgtacatagaaatatcggaatcgacgctctatcccattttaaagaggctggaagcgacgggcgcggtcacgacgcggagcaaagaacacggcgggcggctcagaaagtattacatgatcaccgataaaggaaagcagaagatcagagaatttatcgaggatatcaaggaattcgacaagatctatcaattcatattgagcggaggacgaaaatgaccaagtacgaatgggaacgggagctgaaaagacatatcgccgtgctcccgaaaaacgaacaggcgagaatattcgattattacagcgagatcttcgaagaccgcatcgaggcgggcatgcaggaaaaagatatcatctatgaattcggcaaccccttcgacgtagcccagaagatcctatccgattatcggtacgaggattacgaaacggtgcgtccgcccagattccgccccgaccgccccgaaagggatgaaaaaaaggcggagcccgttttcgaaagcgaacccgccgcgcctgcctataccgcgccgaaagaggcgccccgccagacggcggatttcagccaaagcgcgccgcgcgaagaaaagagttcctcggggaaattcggcagattccttttcatgttggtcttatacctctttttgggaattcccgtcatcgcggtcatcttaagcctcgcggcgatcgggctggcgctcgcgttctcctgcatcgccatgatggcgggcggactggtctacgccgtctattgggcggtacagatcggcatcgcgggatacgccgcctctaccctcgcgctcatcggcgccgggcttgcagtcgccgggctcggcttcatcttcgtcgcgccctgtttcaaactcaccaaaatcatcctcgtcagcgtaggtaaaatattcagagccacattccgctatatccgtggcaaaaaggcggtgaaagcatgagtgaaaagaaaaaatcgggcgcgggcaaaggcctcgccgtattcggcgtaattattctgttattgggcgccgccctctttatttacggaatgtccgtcatcgattgggatttcaagcaactgagcaccttccgttacgagtaccgcacgtacgaggcggaaaacgatgaaatcgattcgattttcgtggatttcgaccagacgaacgtgcgcgtggaaatttccgaaaccgcgcagaaaattacgatttcctaccccctcaccttcgacagagcagataagcaaaaaaccgacgttaccgtttctgcggaaggcggcaaactcaccctgcgggaagagagccgttacaactgggcggatcacgcgttcaacctgaattgggtatcgccgcagacggtgatcactctgccctcctccgcttttgtcgatatcaacgtcaagacgagttacggcgacgtcgtgcttgcgggcggttcgtacggtatgctctctttggaaacgtcgtgcggcgacgtgaaagcgagcggatttgttgcggatgcggcgaccctgaagaccgatgcgggcgacgtaaagatcaacgacgccgacataacgaaaaaactcgtcgcgaacacgcacatgggcgacatagaggcgtacggcgtacaggcatacgaaatcgacctccattccgatctgggcgagatcgaagtcgaaaatctggacgcgcagtcgatcaggctgacctcgtcgtacggcgacgtgagcggcagtatcgagggcgcggcggaagatttcaagatcgacgccaagacggatctcggcgacaataatctttcgaaccgcacggacggcgccaagtcgctttacgttcacaccgccctcggagatatcgagatctccttcaaccgttaacccctactcttctataaatccataaaaggaaagggcgcgaatgtaaattcgcgccctttccttttaaatacctatattacttgctgtaattatccaaaatagaattagaaatgcaaccgtagcaatacttaccgagataccagcaatcgcaaaagcattcattgtacattcttgccgttttgttatacctaatgcggaaaatactatacctattacccccaaaacaatgcccgccaaaatcataatccaaccgatcagaaacgctacgattcccactatcatgccgaccaacccataaatgttcgcattcttttcattttgactgttattatccacttgagaagtctcggtgcgtttatcctcttcttttgaatccttctgcgactgttccttaatgatcacatcttccatagacactacttcatgtaaacattcagggcaaaccaaacagtcttcctccaactcttccccgcattctttacaaattttcataatatcctccgttatttttcttgtccacatttagtatactatagtatttttaaaaagtcaagtatttatatataatagtattgttatattagtcaattcggagaaatacaatgttaaacgataatataaaaaggctgcgcctttcttttcaaatcagtcaagtagaattggcaaaaaaattgggggtaagcaagcagtgcgtatcgaattgggaaaacgacaacgtgcttccttctattgaaatgctcgtaaaacttgcgcaaatttttaatgtcacgacggacaatcttttagatttagattcttcagaaacaatcaatgtaaaaggactgaacgaaaaagaaatttcacatatcaaatgtgtggtgcaggatcttttaaatctaaaataacaaacgtccccgcttttgcggggacgtttgttatcgcgctcttttccttgtttataagcgtatgtaattgtaaatgtcgatatgcgcggcatagtacaggatcagcgcgatgacgaacaatatgatcgaaataacgcccaatatctgtcccgcgcgggaaaacgcatttttgcgcgtcgttaaattttgtcccgactcgcaagaaaaggcgatcgccatgatcgcaagtatgatattgcagccgcagaaaaaggacgcaagccccaatatgaatcccacgacggaagacgcgctctggcgcggcttatccgccgcaccgtacttttccaagacgtcgagcgtcttttccgcgtattccaggcgcaaatttttcgccaacgccctgtcgtatccgcagacgggacacatattgctgtccttttccagttccgcgccgcaatgctcgcattgaaacatatttatatccccctattttcctttttgcagaagccccgctcttttcgagcggggctttccgtccgttattttttacggtttacgtattttgtatggagtatctcgtgggctttgtgggagccgggagcgccgaaaaattctttataaagactgttgacggcgggattttcgtggctcttgcggatatcggacttcttgtcctcgtcgtacagcgctttggcgcgcttgcccttgatatccacggtgcggcgcgtgtacgcgctctgaatgggctgtccgccgccgttgatgcagccgccggggcagcacatcacttccacgaaagtgtagtcgcattcgccctttctgatcttctcgcacagcgctttggcgttggtgaggcccgacgcgaccgccactttgactttgagcccgttgaggtcgtattccgcctctttgatgccctgcataccgcgcacagccttgtaatcgaccgcgtcgaggctcttgcccgtaatggtttccgccgccgtacgcagcgccgcctccatcacgccgcccgtcgcgccgaagatgacgcccgcacccgtgaattcgcccagagggttgtcgaaggtgccgtcgggaagttcgttgtacaagatgcccgctgtgcggatcattttcgcaagttcgcgcgtggtgagcaccgcgtcgatatcgggatagccgctcgcggactgatcgtcgcgcgtgcgctcgaattttttcgctgtgcagggcatcacgccgaccacgtaaatatttttggggtcgatgccctctttctgcgcgtaataggtcttgaccgtggcgccgaacatctgcatgggcgatttgcacgaagagagattggggatcagttcgggatagtaatattccacatagcggatccagccgggcgagcaactcgtgaacatgggcagtttgccgccctctttgacgcgctcgacgagttcgttcgcctcttccatgatggtgaggtcggcggcgaagttgacgtcgaacaccttgtcgaagccgagcatacggagcgccgtgaacattttgccctcggtattggtgcctacggggttgccgaactcttcgccgatagcggcgcggacggcgggcgcgggcgccacgacgacaaccttttcggggtctgcgatcgcttcgcgcacgttgtcgatctcctcgcgctcgtgcagcgcgcccgtcgggcacaccgcgatgcactgaccgcaggcgacgcagggaacgtccgcgaggtcgctttcgaacgcgcagccgatatgcgtcttgaatccgcggcggctgggcgcgatgaccgcgacctgctgcacgctcttgcacgtggctacgcagcggcggcagagaatacatttttcattgtcgcgcacgagataggaagtggattcgtcgggttcggacaggttgcgctcgccctggaaagcggcggcgtcgcacccgtattcgttggaaagcgtctgcaattcgcagttggtgctgcgcacgcacgacaggcattcctttttatggtcggacattaaaagttcgatagtcgtctttctcgactttctcaccttttcggtgttggtgaaaacttccatgccctcgttgacgggatacacgcaggaagcgacgaggcttctcgcgcccttgacttcgacgacgcacacgcggcacgcgccgatctcgttgatgtctttcaaatagcacagggtggggatattgatacctacgctcttagccgcgtccagaatcgtggtgccctctttgacctgcacgggaatattgttgatctttaaattaaccattgtcttttctccccctttacgcctttacgatcgcgccgaacttacatttttccatgcagacgccgcatttgatgcacttgcccgtatcgatgacgtgaggatttttcaccgtgcccgagatcgcgcccacggggcagtttctcgcgcagagcgtacagcctttgcacttgtccgcgacgatgcggtactgcaacagttttttgcagacgcccgcgggacatctcttttccttgacgtgcgcttcgtactcgtccctgaaataatgcagggtggagagcacggggttaggcgccgtctggccgaggccgcaaagggaattttctttgatataatagcacaactcttccatcttatccagatcttccatggtcgcggtgccgtcggtcactttgcacaaaagttcgtaaaggcgcttggtacccacgcggcagggcgtgcacttaccgcaactttcgtccacggtgaattcgaggaagaatttggcgatatcgaccatgcagttgtcttcgtccatgacgatgaggccgcccgaacccatcatggagccgatggcgatcaggttgtcatagtcgatgggcgtatcgatgaggtgcgcggggatacagccgcccgaggggccgcccgtctgcgccgccttgaattttttgccgttggggcagccgccgccgatatcgtaaatgatctctctgagcgtggtgcccatggggatctccacgagtcccgtattgtgtatttttccgccgagcgcgaacacctttgtgccgcggctcttgggcgtgccgatggaggagaaccaatccgcgcccttcaagatgatttgcggcacgttggcgtaggtctccacgttattgagaatggtcggtttgccgaacagtcccttgaccgcagggaacgggggacggggacgcggctcgccgcggtgcccttcgatagaggtcatcagcgccgtttcttcgccgcagacgaacgcgcccgcgccgagacggatatccagatcgaaacagaaatccgttccgaaaatgttcttgcccaaaagcccgtactctctcgcctgctgaatggcgatcgtcaatctctgcaccgcgatgggatattccgcgcggatatatacgtagccctggtcggaaccgatggcgtaggcggcgatcgccatcgcctcgatgacggcgtgcgggtcgccttccagaatggaacggtccatgaacgcgccgggatcgccctcgtccgcgttgcagcagacgtattttttatcgcccttggaggctctggcgaactgccatttgcgccccgtggggaagcccgcgccgccgcggccgcgcaagcccgacttggaaatttcctcgatgacttcttcgggcgtcatttccgtgagcactttgcctagcgcctgataaccgtcgtaggcgatgtattcttcgattttttcgggattgaccacgccgcagttacgaagggcgaggcgcatctgttttttatagaattgcgtatcgttgagcgccttgatattgccgtcgtcccccaccgtttcggtgtagagaagccgcgttacgatacgccctttcacgatatgctcggcgatgatctcgtccacgtcctccactttcacctgtgaatagaaggcgccttcgggatagacgatcatgatgggaccgagcgcgcaaagtccgaaacagccagttttcgtcacgtgcacttcgctttccagcccctcgcgtttgatgccctccacgagtttatcgtatattttcatagaattgttggaggtacagcccgtaccgccgcaaaccaaaatgtgtgtcctgaacatgaaaactcctccgcgttatttctccgcgatcaaaaactctttgaccgcgttgccgttgacgacgtgctcggcaacgactcttcgcgccttttcgggagtcatcaaaacatacgtatatttttccccgttcttaaatacttccacaatgggctctaacctgcaaagcccgatgcagcccgtctgcgaaatgctgacgttgtgcagttgccgtttatccgcttcgtccaaaagcgcgccgagaacggggcgcgcgcccgcggcgatgccgcaggtcgccataccgaccttgacgactacttcgtcgtcgcccgcgacggcacggttgtccgtggccgatttcattttatcgcgcagggctttgagttcttccaaactcttcataacttacctccgtaaacactgactaaattttcctgaatatactctttgagatatgctctcacttcgggatccgttaaggagatatcccccaaaatttctttgatctcgcgcgtgtcgagcacgcccgtttgttccccgtcggaaacggtgatataaaagtccacccgctcgttcatcgtgaccatctgcaaaacgacgccgccgaaatcgcccagcggcattctgtcgatatgtccgatgcgataggtcgcctctacccttgtgccctcgccccttttcgattcgatggaaaaggcgccgcccgcgctctcggccgaaaaacggaagagcggcagccccaatcccacgtttcgcgtcgtgcgcgaggtagtaaaggggtcgcaggcctttgcaagcgtcgtttcgtccatgccgcagccgtcgtcctcgatacaaatggaaagaaaatcatcgcataaccgcacggtcagagcaactttcacgagtttcgcgcccgcggcgagcgaattttccacgatatcgagcacgttgagagcaagttcgcgcatcagtcgttatatttcgcgaggatggattccacttcgtccaccgtcactttgccgtatacgtcgtcgttgacggtcatgacgggcgcaagcccgcagcaaccgatgcagcgcgtggcgtccaaagaaaatttcagatcgtccgtacattccccgcccgatattttcagcgaatcgcaaaccttttgatacacttcgcccgaacctttcacgtagcaagccgtacccaggcaaacgcccactttatagcggcccttggggtacagcgaaaactgcgcgtaaaacgtggcgacgccgtaaacttccgccaatgatacgtcgaacgcgtccgcgaccatctgctgcacggcttcgggaagatatccgtagatctcctgcgccttttgcagggcggcgatcaaaagcccttcgccgccgctttctttgagcgcggcgagttcgcttttcaagcactcttcctgctctttcgtgccgttgaagggcacgtcgatttttttagccaacctcatctacctccgatttttgcggcggatggaaaaagacaatccgcccattttattcaatgcttttattttatcatattccgaaaaaaatttcaatatatcttgccgttttctaaaatataatttttcccaaaattccgcacgttccgacaaaaaaacaagccgaaatttttttcggcgttcgttttttacgcaaaaactctgctccgcgccgtccaatttttcaacggcttgacaaatcgtgaaaattgtgttattctataaggactttcatacgggcgagacttttagtattttttccgcccgtttcaattccaaaggaggtgaatcaaatgaactacaccgagtacatggaatatcttaccaaaaaatacggtcaggatattgcagaacttacgaaagccgcttccaaaagcgacgtgatcaaccccaaactgtacgaaaagtacgacgtgaagcgcggccttcgcgacatcaacggcaacggcgtgatctgcggtctgacggaaatatccgaaattaccgcgttcggcaaggacgcggaaggcaacaaggtgcccgtaaacggagaactctattatcggggcgtgaacatccgcgatttcgtcaagggcgcggcgggccgtagattcgcattcgaagaggcgacttatcttcttttattcgggcatctcccctcgaaggagcatctcgaacgtttttgcgaacttttgggcgatcttcgcgtgctgcatcccaatttcgtgcgggatatcattatgaaggccccctccaaggatatgatgaatatgctcgcgcgctgcgttctcagcctctattcgtacgatccgaaagcggacaacacttcgcgccgcaacgtgatgcgccagtcgctccatctcatcgcgcagttcccgcttctgtgcgtctattcgcagaaagcgtacaactacaacaacagcgacgcgtcgctttgcatccacaagccgaaaaaggaactttccaccgcggagaccatcctctacaccctgcgcgacgacatgaagttttcccaactggaagcgcaggtcttagacctttgcctcgttctgcatgccgaacacggcggcggcaataactccacgttcacgacgcacgtggtcacgtcctcgggaacggacacctattcttcggtggcggcgtccttgggctcgctcaaaggacccaaacacggcggagccaacatcaaagtgtgcgagatgttcgacgccatcaaagaaaacgtgcccgatttcgaacgcggcaaactcacggattacattgctaagatcctcgacaaggaggcgttcgacaaaacgggtctcgtgtacggcatggggcacgcagtctattcgctttccgacccccgcgcggacattttaaaggaattcgcggaaaaactcgccgtggaaaagggcatggagaaagaatacgaaatgcgcaagtcggtcgcggatatcgccgccgaactgatcgcggaaaagcgcaagatatacaagggcgtcagtcccaacgtagacttctattcgggattcgtatacgatatgctggggctgccgcgcgaactgtatacgcctctgttcgccgtggcgcgcatcgcgggctggtcggcgcaccgcatcgaggaactgaccaacggcggcaagatcatccgtccgggatatcaggcagtcgccaagcggcagaaatacgttcctttggaatcgagaaaactcgatcaataaaaaaagcgttccgcaaaaatcatgcggaacgctttttttgatcacaaatattcggcgatttcgtttaaactttccgccaccgcctcggcgcggtcgcaggaagtttccgcctgttcggcggtcgcctctccgcttaaaaccaaaagagtacggaacccgttgttgacgccgaagcggatatcggtattcagcctgtcccccaccatgacgatgcgctctttgggcgcagaaagtttgcgccgcacgcagtcgcccatgacggtgtacggctttccgcagatcacgtcgggcaggcgtttgcaggaagtttcgaacaatttcagaaaggatcccacgtcgggccaggaaacgccgtcggcgggacacaccgcgtcggggtgcgtggcgacgtaaaacgcgcccttgacgagaaattcattgcatttgcggatcttttcaaaggtgagagccgtgtcgtaggcgagcacgcagacgtcgggcgattcctcgcagagcgcaatgcccgcgcgcaaaaattcttcgcgcagcgcctcggtgccgacaaggtacacgcgctttcccgcgtgggtttctttgagatattccgccgccgccatcccggaggtatagacgctgtcgcgctcgtcccaaaagtgcaggcggtcgagtttgcgtatatattcttcggcgcttttagaagaattgttggtgagatagacgatggatttccccgccccgcgcattttttgcagggtattttgcatatctccgatcgggcgctcgcccaaatacacggtgccgtccatatccagaaggaatacgtcgcactcccgcgcgatacgggcaagattttcatttttcataagtaaatctatccttgcatttttatgtaagcaatccgaaatcccgcatgagcgcgggaacggacagcatgtcggaaagttccgccgccgcggaaaacgcctcgtgcgcgcgcaccgcgtcgatcgcaggcgcctttgcgcccagggcgtagagtccgctctttacccgttcggtatagaccgcaacgctctgcgccttgcggcaaaataccgcgcggctctccgtaaacacctcggcgagcgcgtccgtgcgctttgccgtagggactttgtttttgagaaagagcgcgcgttcatcctctcccgcgtatgccgccgcaatgcggatacggcgcgcgtaatcgggcacgtaaaaggcgcgcggtttcgccgcctgaaagaaatggcggtatcgctccaagagataacaaaaggaaaaaagcgccgccgaaccgcccgtacagccgcattttttacagagcaacctcgaaaaaatttccgcggcggtgcgtttttttctgcggctcagaaagagcgcgagatccgcggacaatgacagcagttctctttgaaaattctgccccgtgaaatcggcgagccgcacggcgtcctcgaagaacctgtgatacggcgcggaggcgtcgccgccgcccgcaaagacggaatgcgcctcgcagtcgaatgcggagagcgcgcaaaggcacagctttccgtacgccgcgtcgtacgagccgatacgcgaaagatcgcaatagaccgcgtcgggcgcatctgcgggatagcgggaaaagccgccgctcacgaacagccgcacgggattttcgaacgcggcggaaagatccgcatgatcgggcacgactatacagtacgcgcccctgagggtgcaaaaataccgcgccgcacaaaacgcgcctttccccaccgcgatcgcggcgcgcacgtcgtcgggaagggaaaaaagccccgaggcgttgtcgccttcgcccgcgacgacgcagaaacattcgaatcctttgagcgccgcgcggatggtctgcacggcggggaagttggattcgccgtcggcgatcagcgccactttcccgcagggtatgtagccgcgcaagagtttcgcgacgtcgcagagcggtccgaaaacgatatccgtatcggccgcttcatttttttgtaaattcaaagcgcacataaagactcctcgatttttctttcccttctcttttgtgctttcgaatttttataaaatttcgtcgagcgccgcaaacagcgcgtcgttctgttcgggtgaaccgatcgtgatgcggcagaaattttcgattttcggttttgtaaaatggcgcacgagcacgccccgcgcgcgcagttcttcgtaaacgcgccgccccgaaaggcatttatgcgcggcaaagacaaagttcgccttgctcggaagaacggtaaatcccttttttgcaagcgtttcgctcacccgttcgcgctcggaaacgacgatcgcgttcctttcgttgtaataggacttgtccgcgatcgccgccgcgcagacggcctgacaaacgcggtccacggggtaagaattaaaacagtccttcacgcgttccagtccgtcaatgagcgcggggtcggcaacggcgtagccgcagcgcatgcccgccagggaatagcccttggaaaaggtcttgacgacgacgagattggggtattttttgacgagcgataccgccgactggttgaaaaacggcatatacgcctcgtccacgatgacgacgcgcgcggcgttcgcgcggataaacgcttccatttcgtcaaggggaatgccgatgcccgtcggcgcgtttggattcgccacaagcacgccctgcgcttttgcggcggtcagtttggcaagatcgagagaaaggtcctcttccatctctatcgtatgcgccttcaccttgaaaaaatcacagaacacgggataaaaggaataggtgatctcggcaaaagccgcgccttctccgtcgctgtcgaaaaacgcgggaaaacacagcgcgaggatctcgtcgctgccgttgccgcagaaaatattttcctttgcaacgccttcggcgcgggcgatattttctctcagcgcgtccatcgtcagggaaggatagagattgagcgaagaaaaatcaaacgtttcgtacgcctttctcgccgcgggcgagggcggatagggattttcgttggtattgagtttgacgtagcgtctatcggcgggctgttcccccgcggtataaggctcgatctcgcgcgccgtgcggcttaaaaaacttttcatatgttaccgtcctttttcatcgaaaatcatactatttttactttcatttgtcaagtaatctcggccgcgcgcgccccgtacgacaaacaatgccctttttcggcaaaaacgcggacggcgcatatgcgccgtccacacatttatatttaacttttcgtccaattcgcaaataacttcgtttccgtaaaaatcagatttccctgttcgtcgtactccgccgctggtaatgtatcctcggcaaaatcccatacatgttcgcactcggattctttataccaacccgcgaaattatagccttctctctgcggttcatacggcgtattttctatctttccacctctcgcaaaatcatcgatgaaaaaataaccattgttcggcgctccctcgtagttgaaatggtatgaagtgttagcgatttgaacttctcctttagtcatattagcagctttcgtgtaatacgtaaaataattatcagtttctttttcaataatataatgatccattgttttcagcaagcatatagcataattaaagaacaaaggcgtaacataggctttgataccaccaccagatctaatatatgttaacatgctgtttacataactttcatcgtttttaacaaagtaaactttttttggcaatatatctacgaaatagtcgtcccctctcatttcatgcaaatatgacaaatataatttattcgcattacgggtataaataaaatatcggttttgcgcaagcgaatgatctatataggtaatataacggacctcttttcccttataatacgccggtacgatcaaagtgtcttttttacgtccctctttcgtagtatcgacgattgcgtaacaatccttatcgcttgcatagtaataagtaaaatctccgtcatcgaaaaaatcttctttaatacttccgcaagctctaaatccacataaaacagttaccgatagcaataaaataatagttaaagcaataaactttttcatttcaaacctccgtttcgctcagttttttgagcgcggcgaatacgccgtgcgcggagagcgtttcgacgtcgagtacgttttccgcttcggaaatttcccagagacggtgcgcgtcggaatcgacgaggcggggcaatttcaccccgctccccgtgcggctttcgacgagtctgaatccgagatgatagtcgaacgcgcccaaaacgccgatcagaccgttggactgcttgtcgatatgcgccgcgaccgcgagtccgccgaacgattcgacgagcgccgccgcgtcctctaccgatacgcccgaactcacgatgagaagatcctcttcccgcccgatcaactcgtcaaactcgttcataatgagttgtctgccgaaaatctcctcgcggtttttgatccgcaaacggcggggagcaatatattcttccagcgcggcgagttgttcgtacttttcgaacaggcacaaaacgtgtatatcttcgcttgtggtgagttccatggcgggcagcacgaccaggccgtttttcttacccgcagcaatcgtcgcgggacagtttttacccgtgttatggtcggaaagcgcgatcgcgttcagccctttgataagcgccatgttgacgatgttgttgggcgtgttgtcgtcgtcgccgcaagggctcagacacgaatgaatgtgaaaatcgtaatagatattcatacgccgcacgcttcgaaaagcatttttgcagtctgatatacgtctttggaacaccccaaaagattgatattctgcgttttggcgcgcgctgcaagcggttcgtcgggcgctacgccctcgcacaggaccacgcaggcgcagtcgacgagcgtcgccaccgccgccacgttgacgttattcatcacagtgagccaggcgcacgcgtcgggcgcgcggctgatcacgttgctcaaaaagtcgccgcaatagccgttttttatctccgcgtcgggattccccaaacaaaataccgtgaggcccgcgcgggcgcaccattctttgaccgtcatatttccacctattttacttcgttgagtttcacgcagttcaagatgccgccgctcatcgcgacgtcctccgcgtgcgtgcggcaggagggcgcgccgcaggcgccgcagtcgatgccgggcagttttttcaagtattcttccaccagcatcatcttttccatcgccgcgaacacgtcggagtcaaaacggaaagaggtgatcggctcgggctccttatcccataaaaagaaatccgtcgtcaatccgaattcttccatggtggcggg

SEQ ID NO: 3544 - DNA, 4443 bp, Unknown
  16S sequences of unknown bacteria
atgacacgcgcttgtagctcagtggatagagtgcccggctacgaaccggtaggtcgcaggttcgaatcccgccaggcgcgccagataacccgtaccatgtacgggttatttttttgcttgaatataaggttccgccgttatatcacacggcggaaccttttttactttcccataattctccgcaggcgctccgagaattccggaagagcttcggcgaaatgcggcgagaaaatcccggcgtacctgacgcctccatccttcgtcagcgccgcgacgcagcttcttccgcaggttatcgcctcaacgccggtccattccgagacatcggaacgtccgcggtcgaaaccggacggacactttcccgcgccgtacattcttccctgcccgtccacaccataaacaaagccggaatccgccgcgatggacctgatcccgttccattcgcgtgacttcagtctcgtgtctccgtccctgacaccgtcgatgatgactttcccgtttctgtcaagaaacaccgcgcagtctcccgcggcaatatccacaattccgtcaagccttctctttccgaacacggcgcggcagtcggtacttgtaagtgtctccgcggttccgtctccgtaaagcataaggataaaaccatcgcccggagccgcctttctcacgtcggaacggtcggtcttcagacccggaaacgtgagtccggtcacgcgcggctttccttttttgtcgataaaaacgctgcatctgtcaccggcggcggcataacgcattgacgggagctttgacgtccggcactgactgtaaacgccgcgcccgaacgccatgaccctgccgtccgcgccaagggcaagaatgtgctcgccgccgatacttatcccggatatgccgtcggtctcattgaagccgcacacgctgtcccagaacaacagcctgccggactttccgacaaccccgacggcgtccgccgatatggcgaacctgccaaagaaaccgtctcctgtgggatatgtctcccgcgccgccgcgagcctgactctgtagtcgtcaaggctcttcctgtcggcgaaccgatcggcaaaggcgagggcaaatccgcacaccccgcagcatacgctctccggatcgacgcgcctgcttccgcataccggacatttttctgtcttcatattcgcactttgctcccgagtaatacgaaagctccctttctctgaaaaaaatcatccacgctttcagtcctccgtgaaattccgccagaaatactcaatcgggctgaaaaagtcaatcccttccctgtcagagcatatcgtgcccgagaatacgcctataaccctgccgtcgctctctgatatgactgggctgccggagtttccggactttcctgacgtgtctgtgaagacgcggagaaccggatcgcctgtcggattcataaaccgctctgttatgtcgtcgcgcgccataccccgaccggtccgctgtatgctgacaatgtttccggaaatctttgagagaatcagttcccgcctgtccccggttatgctgtcgccgaacgggtacccggcgatgattattttctcgtcctgcccgattccctctccgggacctctgagcggcaatgtcggaaaagctcccggcataacggaatagtcgtctatcctgagcagacccatgtcgcaccatccgactgacggcgccgcgatccgcgcgtcgtacgtgatcgctttttctccgcgtctcagcattatcttgtacgagtctccggtcagcacgtgcgcggatgtcaggacgtgcccctccggactcacgaccgttcccgtcgcggtcatgatccgccctccatgccgaaagacctcgataaacgcgaccgccgcgagattctccctcgcaaaaccgcctgagataagcgtctcgtcggaatcagtgcgtatcatatcccgccgtatcttcgcaaagcgctcgctctcatggacaagacgctcgtattcaggcggtatatcctccgatgtcatccggcacagctccggcatcgtgagcccggccgccgccccgtcacgtctgagcttcatcgtcagacagccgtcgatatactcgagcaccgctcccgcgccgaccgacgagcgcccggcgcaaagcgccgccatcacgtgtccggtcatcccgcgcagcttcgcgtcaggcacaagacagtgaggcgtcctgagcgcgttatacgcgtaagctctcgcgcacatgacgtcgaacagcgcggtcagatcctccgccgtgtagtcggtaaagcgtacgcgtcccatcggagggactatctcggaaagcgccgcgcccggaccaagcagtctttcgccgcgctccccggtgtccgagaaaacgatacatacacgccgcgcttcctcgttccgctgataccagcgcaacagagctcttagcggggcgccgccgttcttcgagagctcaccggcgttcccgatatagagcatgcctcttcccgccgcggtgaatgccgcctgcatggattccccggcgacaagctcggcgccgtcgcgcagaataacgtccgacgacccgagcatccccgcgttcttcagcatcccggcgaggatccgcgccgctgtctttttgccggttccgggtgaaccgctgaagaaaaagcatccgggaatggttccgggtccgccgcccgaaagtctcaggagcacgtccgaaaagctccgcagtacctcgccgcgcctgacaaagcgcttctccgcgagatacatattatcctcagcgttcgtcttcccgaaccattttctgtattctgccggtatatcacgtcgtgtgataagctttttcccgcatttgccgaacgcgtcgacgagatagggtatttcgttgtacccacgccagatttccgggcgtccgcccatgtcaggaacaaaaccgcggaaaaactcaggcagaagctgctcagtctcgtcgtcgaacctgaatctgccctccgcgctcattctgaacaccgacagcatctcctccgcgtccggctcctcaagcgtgatcccgcgcgcgacaagcccggcgagctccggataagccgagtaaagctccgaaagcccttccctgtcgtcaagcagaaccacggagatgtcacgcctgtgagccgacatcatgctgataagctctgacagcgcctcgcgtccgaagtcggttcctctgccgtcagacagcatcgacgacgggtttctcacagcgagcatgccgccgagcgaattcataactatcctccgcacgttaggcgcggtctgtccctgatattctcccttgaaagaactgtctgacacatatgttatccttccgccggacagcagaccaatccttacgtacgctgcggcgaccgccatcatcgctgtcttccgaccgtatccgggtctcgcgctgagcgtgaaatgcagcgtgccggcagcggcgtatccggtctgatcgagcgacgcgatgtaatccgcgacctgcttctttccgacaagggtcttttcagggctcacggcgcatatcgcgtcgtaatcgctcccgaccggaggcgcgaagccgcgcattatgtccggcaggtcgtattcggtcagggtcacacgctcctccgctgaaactatccgcgtgtcatcgtcagaggacagccgctctttcagccgtcttgtcaacgccgagcgcgaacccggaagatacgtgttccgtatgaagcgtccgtttccgaaatcaggaggtgttgtcgtgagatatctcgccagcgccgcttcggagcgccgcaggtacttttcgtctgtccggagacccttttcggacgccatgcgctcaagtatagccgtgagttcagacgccgtgaagccgtcgaaacggatcctcgtgctctccggaaacctcgatgacagaccgatattcttctcgagcagtctcgcgatgtccgcctcatacccggcgagcacaaaaacagtatcctcgcgcagagccggatcgtcggtcagtggcacaagctcctcaatgacgctcctccctcccggtgtttcaagcagctgatacgcctcgtcaatgaatattacgccgcgtctgccgcgcctgaccgtctccgtaagcgctgagccctccccgcggactttcccggtgagtctggcggcgtcggcgcgctctacgtgttcccttcctatgacgccgagcatgcagagcatcttcgcgagccggtcggcgatcatgctctttccggtgccgggaggaccgacaaagcaaaaatttctcggacagtttgccgtgccggatattgacacgtcgtcggcgagccgcgttagaaagcgtttgactccgccaagaccgattataccgtcgatcatcgcgtggacgccgtcgatatcgcgtagtctcttcccgataaggttccggaatttctccggaatatccgcgagagtcagctccggcggctcgcctgtc

SEQ ID NO: 3545 - DNA, 32759 bp, Unknown
  16S sequences of unknown bacteria
atctattttcttatctgtttggattcctttttacacaaaaatttccgaagtgccaattttcattttatctctttaccccaactattgacaaagagcctattttaaatcggaatcaaagtcggctcttaattctttttgccgctctttatcgcttccagcgttttttcggcattggtatgcgcatcggcagagccttttttgctttcaaagacggtatccgacacacggcggcaggcaatgcgcagtccctcgggcagcttaccgtagctgtcggtttcggttgccttgtagaattcctctcccagcataaacggctcaccatcaaaaagcccatctccgttcgacagatcggcaagatatttatatgaatcctcatccgttataaacagcatcgcattttgatcaccggctatcatcgcctggagcttggtcatcatggtgtagcggtactgcgtatcgcccgactttccgttaaagctgcagttgacaacctgaatatttatttcgccgtcgccgttcacatcctcggcatacccggcaatatatttcgccaccgcgttcgtctgctcgtcaagcgccgcggtataggtgaaatacacaacctccatatcgtattttgttcttgtggcgcactgggttatcagcaccgccagcacaacggtaacagccgttatcgcaacaacataccatttatactgaaaccaaaaattatcccatttttccttcggtgttttcggaactatagcaacctcgctcggcttcggcggagcttccatttccccgctctgcatttttttaagctccaaaaattcctgacgcgcgcggcgctgctcctcaagaatctcgtttgtttctttatcggacatttccccgtctcctcggattacacttaataatacaaatataacattttcagtacgctttttcaagacgaaatcgtgaacaatttaataacaaaatcccgtagggcggaatatactgtcccgacgggattttttagtttgatttgaatatccaaagcttgctgaaaacatagttcagaagcacaacgattacctgcgccgcaagcttcacggcaaggctgttgaattgaagccatgttacgaatagcaaaattataagctcttcaatcgcaagcgtcgccgctctgccgccgaaaaaatttataatttcctttataacggcgccccccgtatccgccgtgctgcggaatacccatattctgcttgtgatatacgccgtaagcaccgccaatatccatgaaatcacatttgaaataagcgcgtcgattccgaaaacggcgcaggcaagctgatatgagccgatgctcacaaccgtcaccacgccgccgaagaagagatacagcagcacttccttatgccttttgtaaaacggctcaatttttttaaacggcggcagacgcataattttatcgaaaacatcctcccggcttccgctcattttatcaagtccttttataagaaaaacccggcgccctccggaaaacggagagcgccggagcggagatttttattatcagatctctgcgaaatatttaatagtacgaaccatctggctggtgtagctgttttcattgtcataccaggaaacaacctgtacctgataggtatcgtcgtcgatcttggtaaccattgtctgggtagcgtcaaacagcgaaccgtaggtgatgccgataatatcggaagatacgagcggctcctcggtgtagccgaaggaagctgaagaagcagccttcatagcggcgttgatgccctcaacagttacatccttgcccttaacaacggcaacgaggatggtggtagagccggtcggaaccggaacacgctgagcagaaccgatgagcttaccgttaagctccggaattacaagaccgatagcctttgcagcgccggttgaattcggaacgatattaacggcagcggcgcgtgcacggcgaaggtcgccctttctgtgcgggccgtcaagaaccatctgatcgccggtgaaggcatgaacggtggtcatgataccgctctgaatcggagcatacttgttaagagtatcagccatcggagccaggcagttggtggtgcaggaagcagcggagatgatcttatcacttgcgtcaagagtcttctcgttaacactgtaaacgatggtcttaagatccttacctgccggagcggaaataacaacctttttagcgcctgcgtcgatatgagcctgagccttatccttcgaggtgtagaagccggtgcactcaagaactacatcaacaccgatttcaccccacggaagatccgcagcgttcttttcagcataaatctttatggtcttgccgtcaacagtgatgctgtcttcccctgcggaaaccttgtcagccagagcatagcgaccctgtgcggaatcgtacttgagaaggtgagcgagcatagccgggcttgtaagatcgtttatagcaacaacctcatagccttctgcgccgaacatctggcggaaagcgagacggcctatacggccgaaaccattaatagcaacttttaccattggaaaaacctccttaataatttacattttctattttaacccatttgacaagctttttcaagctatttgtttaatatttaacaatttttttattttttatatattttggcataataacctcatatgcggaggttgcaatatgatatatttgtcaaagctgcgcgagcggtatttagctgcgctgcggcttcacattcaaagaggaattctgcgcgggcggaacacggaaaagctgcttttacagcttaaaaaaatcatgctgtgtgaggcgatgagctcagagggtgaaagctcgccgcttgatattttaaaatacgccgattcgcttttgggcgctgcaatcattatactgctgcaaaggggcaaacggttatcagtcgggctgtcgggcggcggagcttttcttataaaccgaaaggcattaaccgcacttttactgctttcggcggataattgcacagaggacggcagtattttaatatccgccgataaaaatacggttactattcacctcgcgggtattgtgctttacaatacgcaaaagctgctgataagaaggctcggcggcacattttacaaagtcgtttgcgaagacaaagcaattattacttcccccgccgaagaaaccgatgaaaaaccgacggcacttcaaaacgagtgggagcttttgtcggataaattttcggcggtaaacatttttttaatgcggaattcggaattcaaagactgatttcattttaagatttatacactcttaacttatgtatttaactcttaaggcgattttcgcctttcgcgccattcctcgctttgcttttttgtaccgtaccttggactttacacataatttgaagaagaaccttgatttccgcacattgaaatctatattctatgtgtatttatcctctttttttcgtttgttttttacagtccctacacatcatttttgcctgcaggggtattttaaatttaaatgcctttttttatattctcgtcgacagtatttcttccttttcgcgcttaaactcggcaaagcagccgttatcaagcgcgtttcttatatcctccataagatgattgtaaaaccacagattatgcatgaccgtgagcctttgcgaaagcatttcctgacttttaagcaaatgcctgatatacgccttgctgtacctgctgcaaacagggcagccgcagttttcgtctatcggggacatatcgtactcatattttttattgttgaggtttataattccctttgaagtaaacaaatgcccgtggcgcgcgttgcggctcggcattacgcagtcaaacaaatcaaccccgcgttccacggcgttgagtatattcgcgggcgttcccacacccattaagtagcgtattttattttgcggcatgtgcggcgttacgttatcgattatatcgtacataacctcggtaggctcgcccacggcaagcccgcctattgcgtagccgtcaagctccagctcggctattcttttcatatgctcaacacgcagatcagtgtaggtgcagccctgatttattccgaaaagcatttgctctgggtttacggttcccggcattgcgttcagctccgccattttctttttgcagcgctcaagccagcgcgttgtgcgctcgcaggaggccttggagtatgaatactccgcagggttttccacacattcgtcaaacgccattgcgattgtagaacctaagtttgactgtattgtcatgctttcctcgggtcccataaatatccgtctgccatccacatgcgaggcaaaagttaccccctcttcagttatatggcggagagttgccagcgaaaacacctgaaacccgcccgaatccgtcagaataggtccgtcccatgttgtaaacttatgaagaccgccgcagccgcgtatgacctcatcgcccgggcggacgtgcaaatggtaggtgtttgaaagcattatctggcagccgagagtttttaagtccccggcggaaaccgcgcctttaattgccgcggcggttgccacgttcataaacgcgggggtctgaacggtgcccctgttggttgtaaattcggcgcgccgcgcgctgccctcttgttttaaaagcttatacataaacctagtcccttattattttataaaatcagcattgcgtcgccgaagctgaaaaagcggtatctttcctttacggcggtgttgtaggcgttcatcacgttatcgtatcccgcaaaggcggaaaccaacattataagcgtgctttcgggcaggtggaaattggttataagcccatccatacacttaaattcaaagcctgggtaaataaaaatattggtgtctcccgagcactcctttatttcgccgtatttcttcgcgcagctttcaaccgtgcggcaggatgtagtgcctacgcatattaccctgccgccgtttttgcgggtctcgtttatggttttcgccgcttcttcgggtatgtaataatgctcggtatgcattttgtgctgtgttacatcctccaccttaaccggtctgaaggtgccgagccccacatgcaaagtaacataggcaatattcacacccatagccctgatattttcaagcatttcctttgtaaagtgcagccccgcggtaggcgcggcggcagagcctgcgtcctttgaatataccgtctggtagcgttctttatcctttagcttttcttttatatacggcggcaggggcatctgccctaccccgtccagcaccgcaaaaaaatcgccctcgcaggcaaattccagcatacggttgccgtcctccaaaacgtcggtcacggttgccgtcagcttatcggaaaatttgaatttataccccgttttagcctttttaccggggcccgcaagacactcccaaagcttattgcctcgctgccgcaaaagcacaaattcaactaccgcgcccgtgtcctcccgcgtgccgtaaagccgcgccggtaaaacgcgggtgttattaagcacaaggcagtcgccgggctttaaaaattcgggcagattgtaaaaatgcttatgctctattttcccgccgtttcgcggcagcaccataagccttgaagaatttctcggctcaacgggcgtttgcgctataagctcctcgggcaggtcgtaataaaaatcacttgttttcataaaataatccacaacttctttgatatttcggcataaaataaattgacaaacattatccgtaatgttatagttaattatattgcatagggcaatataattcaagattgaattttaaaaaatgtcttcagaaggaatgtgttttcaaatgaaaaagtacaatgtcggtataatcggcgctacaggaatggtaggtcagcgctttgcgctgctgctgcataatcacccgtggttcaatgtgaccgcgcttgcagcaagctcaaattcagccgacaaaaaatataccgacgctataggcagccgctgggcaatgaaggagcctatacccgagaatttacgggatatgaccgtttttgacgccgagcgcgatattgacaaaataaccgaacgggtagattttgttttctgcgccgttaatatgaaaaaggacgaaataaaggcgcttgaagaaaaatatgcaaagcatgagtgccccgttgtttcaaacaacagtgcgcaccgcttcacacccgacgtgcctatgataataccggaaatcaacgccgggcaccttgaaataatacccgcgcagagaaagcgcctcggcacgaagcgcggctttattgcggttaaatcaaactgctcgctgcaaagctatgtgccagccctttacccgctcgatgaaaaattcggcgttgaaagggtgctggtttccacctatcaggcaatttcgggcgcgggcaaaacctttgagcgctggcccgaaatgatagataacgttatcccctttataggcggcgaggaagaaaagagcgaaaaagagccgcttaaaatttggggcaagatagaaaacggcgaaatagtaccggcagaaagcccgaaatttaccgcgcagtgtattcgcgtgccggtgtcggacggtcatttagcctcggttttcgttgattttaaaaagaaacccacaaaagaagaaatacttgaaatatgggcaaactattcgggcgagccgcaatccctctccctgccccacgcgcccaatcagtttttacattattataccgaggacgatatgccgcaaaccaagctttgcagagattccgagggtggtatggcaatatccgtcgggcgtttgcgcgaggatacgcagtacgattataagtttgtctgcgtatcgcacaatactttgcgcggcgcggcaggcggtgcggtgcttttagccgaattactgtgtgcaaagggttatatggactgattttgtaagaaacggagtggtcttttatgaaaaaacgcatattcacaggagcagccacggcacttattacccctatgaaagcagacggcagcgtgaattttgagcgccttgaaacgcttgttgaagagcaggtaaagggcggaattgatgcgcttgttatctgcggtactacgggcgaaaaatccacgcttaattatgatgagcacgttaaggttattgaaaccgccgcaagagtaaacgcgggcagagtgcccattattgcgggcacgggcagcaacgacacggtgtattccgtagggctttgcgaggacgccgaaaaggcgggcgccgacgcttttcttatggtaacgccgtattacaacaagacctcgcagcgcgggcttgtggcgcactacaactacattgccgaccgtgttaataaaccgataattctttataatgtgccctcgcgcacgggggttgcaattaagcccgaaacctataaggagctttcaaagcacccaaatatagtagccaccaaggaagccaacggcgatctgtcctcggttgctaagacccgctatctctgcggggacgatcttgatatttattcaggcaacgacgatcaggccgtagctattatgtcgctcggcggaataggcgttatttcggtactttcaaactttctgccgggggttatgcataaaatgtgcgccgaataccttgagggacatacaaaagccgccgcagaaatgcaaataaagtatgtggggcttatgaacgcgcttttcagcgatgttaaccctatcccggtaaaagaggcaatgaatatgctgggtcttgaagcgggtccctgccgcctgccgctttatcctatggagagtgcggcgcgcgagaagctccgcgaaaagcttattgagtgcggctgccttaaataaaaaacaaacccactgcacccgataggcttttgactgtcgggtgcaattaaaaagcggaagtgaaatacatatgataaaagtaatattatgcggggcgtcgggcagaatgggcggctttgtggcaagcactgcggctgccgacagcgatatttcggtcgtcgcgggggttgacaaaatcaataacggtgaaaaatttcctattttttcttccttcggcgatataaatgttaaagctgatatgataattgatttttcccacccctcaatgctggagcctatgcttgaatacgccgtaaaaaacaatatccccgtagttattgccaccacaggctatgataattcacagaccgaaaaaatacgcgcggcggcaaaaaaaataccgatattttttacatttaatatgtcgctcggcataaaccttgtggcggcgcttgcaaaaaaagctgccgcgatactcggcgacggctttgatattgaaataatagaaaaacatcataaccaaaagctggacgcgccctcgggcacggcaataatgcttgcgaacggcatcaactcggttttcggcgatacgctgaactacgaatatgaccgccactcggtaaggcgcaaacgcccgaaaaacgagattggcatacactcggtgcgcggcggcacgatagtcggcgagcatgaggttatttttgcgggtcacgatgaagtcataaccctcacgcacaccgcacagtcgcgcgaaattttcgctgtgggcgcagttaaggcggcaaaattcctttacggaaagcccgccgggctttatgatatgagcaacgttacaaatatcgaatgagtttaaaaaacgggctgttgtttttacacaacagtccgttttttaattacaatgcgcctttaaagccgataaccggtgcttgatcttttttatgctcgcctatgattttttccatccaaatcatattgtaccaacgcccgaacttatagccgcatttatgaaattcgccaacctgcacaaaaccgatatggctgtgaaattcggcgctgtttttagtcaggtattcgtcctcgttatcgggatatccgatacaggcgtacatattaagaatacccatcttcttaagctctttttccagcgccgcatagagcgtttttccgattccgcacctgcgggcatttttatcaagatagatagaggtctcgcacgaccaatcgtaagctgccctgccgacgaacgcgcccgcatatgcatagcccgcaatttgcccgtccttttccgctaccaaatacgggtatttctgcatggttttttccattctgccgcgaaattcttcaattgtcggcgttgtatattcaaaggttatcgccgtgttcttcacataataatcgtatatttccaaaagccgctccgcgtccttaagctccgcatttccgacagtgatcataaacatttgcctttctgataataattgccttataattataacataaagcatatccaatgacaatacaaaacgccgaccagattttactactgcttgctttttcttagcttcttgtgttattatatgcatgtgaagttacttcctttcgatatttggttttgtggtaaaaacattataccgtatttggaagttaacttctctttttatcagcccgcatcattttaacacataaatgaaaacaatacaaaagcttaacaccgacttgaaaaatgcggcgggcggtcatataatgaaagatacacaggaggagagatttatgcttaaaatcgaaaatcttactaaagtatacggtgataaaaaagccgtggacgatttaagcctgcacatagcccccggcgaaatttacggctttataggtcataacggcgcggggaaaaccaccacgcttaaatccgttgcgggaattttgcaatttgactcgggcgagatatacataaacggaagatccataaaggagcagccgcttgaatgtaaaaaagatattgcctatattcccgataacccggatttgtacgattttatgagcggaattaaataccttaatttcatagctgatattttcggtgtcggcgcagaggagcgcgccgaacgcatcaggaaatatgccgatacctttgagctgaccgaaagccttgcagagcctattgccgcctactcccacggaatgaagcaaaagcttgcaataatagcggcgtggctgcacacccctaggcttataataatggacgaaccctttgtgggacttgacccgaaagccgcgcatatccttaaagaaatgatgcgcgaggagtgcgataagggcggcgcaattttcttctcgacccatgttttggaggtcgccgaaaagctttgcgacagggttgccattataaaggcgggcaggcttatacgctcgggcacaatggaagaagtaaagggcgacgaatcccttgagcaggtattccttgagctggaggattgagtatggttaaaatacttcttaaaaagcagcttaccgaaatattccgcagctatttttacgacgctaagaaaaacaaagcccgttccaaagcggcaattacgggctatatagtgctgtttgtaattttaatggtcggtattctcggcggaatgttcacctttttgtcggttgcgctttgcaagccgctttcggcagcggggctcggctggctctattttgcaataatgggcattatttctatattgctcggcgctttcggcagcgtgttcaatacctattcggggctttacctcgcaaaggataacgatctgcttttgtctatgccgatacccgtgggcactattatggtttcccgcctgctcggggtctaccttatggggcttatgtattcgggcgtggtgcttattcccgcggcggcggtatatattataatcgggtcgcacagcctgcccgccgttatcggctgcattttgcttgtgcttttaatttcggtttttgtgcttaccctttcaagcgcgctcggctgggtagtggcaaaaatcagtctaaagcttaaaaacaaaagctttattaccgtaatagtgtcgctgctgtttttcgggtcttattattttgtatgctttaaggcgcaggatattataagcgatttggtagccaacgccgcgaaatacggcgataagataaaaggctcggcataccccatttaccttttcggcaaagtgggaacgggcgattttactgcaatgcttattgtttcggcagttgttttgctgctgtttgcgcttatgtgggcgcttatttcccgcagctttttgaaaattgcgaccgccaccggcaaaacgataaagaaaaagtaccgcgagaccgcagctcggaaaaagagcgtacaatcggcgctcttgcacaaggagcttacgcggtttgtatcaagccccaattatatgctaaactgcgggctgggaattttgctgctgccggtttttggcatagctctgcttataaagggcaatacgcttatgcttgtaatgaacgagcttttcggcaaaaattcgggcagcgcggctgtattgctgtttacggcggtgtgcgctgttgcctcaatgaacgatatggcggcgccctcaatttctctcgagggcaaatcgctttggaccctgcagtcgctgccggtaaagccgcttgacgtattaatggcaaagcttaatatgcagcttattttaacgggcgcgccggttatattctgtatgctttgcgcggcgtttatgttcactcccctgcaatttgccgcggcgtttgtctcggcgcttacattcgtgctgcttttggcgcttttcgatttgtttgtagggctgaaaatgcccaaccttaactggacgagcgaaataactccgataaagcagagcggcggagtgatgatagcaatgctcggaggatttatttataccgtaatctattgcgcactgttctttatggtgggctacaagctcggcgcggtgcagtttttgctgactgttgccgcaattaatttgattttgtctgttcttatttatttgtggcttaagaaaaaaggaactgctgttttttctgcactttaaagcgcagatgatagaaaggcgggaaagagcgcactctttctcgccttcaatctgtcgataaaccctaaaatttgtttttgcggcggtaacgctgcatttttttgttccgaattccgcattaaatcagcctccgtttctcccgccggagatccgttttaccgtgcttataagctcgtcggtaatatcatcgccgctcattcgccactcccagttgccgtagggcacgccgggggtgttcattcgggcggaggaatcaagctgcagccagtcctgcattggtattatcaccatacgagcgcgcgagcgcatacctgcggcaataagactcagtaccgccgagcagcttttatcggcgggcactgtgcccgaaaacattattttttccttttgcgttgctttttcaaaccagccgcgcacggtgtcgttatcgtgcgtgccggtgtagcaaacgcagtttttatcgtagtttttgggcaggaactgattatcaaggtcagtgtcaaatgcaaactgcaatattttcatgttgggaaagcccgtgtcttcaatgagtttcttcacctcgggcgtgtccccgcctaaatcctcggcgataatttccgacgaaaccgcaggcttcaccatgttccaaaaggcaagcccggcgcccttttcccattttccgcttttggcgttttctgcgccgtagggtattgtgtaataatcggcaaaggcgcggaaatggtcaattcttataacatcgtaaagcctcgcattatgtgcaaggcgttttttccaccagtcgtagccgtcggtcttcattgcatcccaatcgtatattggatttccccaaagctgacccgtttctgagaagatatccggcggcacgcccgccacctgcgtgggggtcatatcgcgacctaacttaaacaaatcggggttgctccatacgtctgcgctgtccagttgaatgtaaaacggaatatcgccgattattttaattcccgcggtatttgcgtaatttttaagcttcatatattgcttaaaaaagaaatactgaataatttcgcatatagcaatttcttccgcatgggcggctttaaaggctttcagggtgttcggcagacggtatttaatgccgtcgtcaagctctgaaaggcttttattgcgcgcggacgcttttattaccgtaaacagcgcgtaatcgtgcagccagtaggcgttttcacggcgaaagtcgcggaagccgcgatccttgcggttgaagtttttcgcagcgcgtcttatcagcggcatcttgaattcccgcgcgcgcttatagtccacattctgtgaaaaggtatcttcgggaatatcggcgggggataaaagcccgtcgtttacaagctcgtcaaggtctattaaaagcggctcgccggcaaaggaacacaccgagctgtatggtgagttacccttgccgaccgggcacagcggcagcagctgccagtaggtctggttactttttttgagaaaatcaacaaattcataagccgcggtgccgaatgagccgataccgtagggggacggcagcgaggtgatatgaagaagtatcccgctctctctcggatattttgtatcgttaccccttaacagcacccgccgcaacccctttgattatatatttttgcatggaaagatagaaaatgattaccggtatgacagacagcacaagcattgccattaaagcgcccatatcaaccgagccgtagccgccctttaaatactgcacggctattggtatggttttataatctctgcctatgacaaggtatggcaggagatagtcgttccatatccacatagtgttgagtatcgcaacggttatggcagtgggctttaaaatggggaacaccacccgccagaacgtgccgagcggcgagcagccgtcaatagtggcagcctcttcaattcccagcggcacggttttaataaagcccgaatacatgaataccgaaagccccgcgccgaagcctaaatagatgaacacaagccctatcgggttatcaaggcttagcacattcgcggttttcgacattgtgaacattaccatttgaaagggcactatcattgaaaacacgagcgcatagtaaaataatgatgaaaacacgccctttacccgcactatataccatgcgcacatagaggtgcaaacggtgataagcgcgattgaggctacggttataaagagcgaccagccgaaagccgcggggaagccggttgtttcaatacccgtggtgtaatttgaaaaaccggcaaactccgctcccataggaacggtaaagggcgacgccggaatggaaaactttgatttaaaggaattcaccgccacaacggcaaccgggaaaataaaagcggcggcaagggcgataagcagtaaaaaggcaaccgcattaagcacttttcttttcaatcagctttcaacctcttttctgcgggtcaagcgcagctgaagcagagctatagccgccactattataaagaatatgacggctttagcctgtcctacgccctcgtagccgttccttgaataaaatgtgttgtaaatatcaagcgcgaccatctgcgttctgtcgccgggtgcgccggcggtaagggctaggttttggtcgaacagcttaaaggaatttgttatggttaaaaacaggcatatggtaacagagggcatgaccgacggtattataattctgaaaagggtggtaaccgagtttgcaccgtcaacctttgccgcctctataatatcccccgggatattctgtattcccgctatatatattatcatcatatagcctatcatttgccagtgcataagaattacaagtccccaaaagccgtaggtcgggcttgaggttatagagtagtcgtacttataaagcacgccgtttattattacctgccaaatatagccgagcactatgccgccgattaaattcggcataaaaaaaacggtgcggaaaaagtttgtgccgggcaggtcctttgtgaaaagcagcgccagcaaaaacgcgaaaacatttatgcctataaccgatattaccgcaaatttaacggtaaaccacatggcgtttataaacagcttatcgtctgtaaacgcgcgcacatagtttgaaaagcccacaaaggttgcgtcggttacggttctgaactcggtaaaggaaagcacaagccccatcacaaacggcaccgcaaaggctataaaaaacgctataagcgtaggcagcacgaatatgggaaaatagtgttttaccgttctgttcatctaggcgcgttcactcttccatttttcggttatgcttttttcaacatcctcccactttttatcgccctgaacgtaatcaagcagcgcgctgcccacttcctttttgtaagcctcactcgggaaggaggtgaaaatccacggcacggtgtttaggctgtcgtcgttcatatagcgcacaatttcctttgccagcgggtcgtcgggctgctcgttttgtgagaatgtggtaaacggtgtaatgaaattcagcttttcggtaacatattttttaccggtgtcgcttgaaaacagccagtaaaggaaatcgagcgactgatcctgcaattccttacttacctttttgtttattgcaaggtagttttcggtgcctatgcagataccctgcttttcttcgccgtcaattcccgtatatagcggcagcattttaatgtcgtcccgtttaacggtattgcccgaaacgcccgaaatctgcgaccacgcccagttgccgttctgaatcattgcaaccttgccgagcgcaaactccgccattgagtcggcaaccgattttgagcctaaaagcgtaggcttggtaatggaattgttgatataaaggtcgaagagcttttcaaagttatccttatacttgaatttgatctcctttgcggcaaggcctgtgagtgttgcgtccttgccgttttccttttcggcaaattcataataaagcggaacgtttaaaaggtgggtctgccagcgccagtcctcgccgtttgcaagcgaggtagaggcgaaaacgccctcaatgcctaactctttcaggtgcttggacatatcctcggttacttctttaagctttgcaaagttgtttatttgctcggctgaggtaagggtcgattttttatcctttaaatcgaaatactttttcataacggcgttgttgtatataattccgtagccctcaacaacatacggaataccgtaaacgccgctgccgtccttaatggcaagtgatttatcggataaaatgtcgtacagcttgctgtcctttaaatcaaggcagtagtctttccaggaatcatagccgataggtccgttgatctggaaaatggtaggcgcgttggattttgctatttcggactttaaggtctgctcgtagccgtttgcggcggcggttaccacctttaccttaacgcccttttcttcctcatatttctttgccagctcctcataaaccgtggcggattcgggcttgaaattaaggaaatacacttccgatgtttttttcttgccgcagcccgccattgtaaggcaggaaagcgcgcagagaaaagacgctattaaagaaatcgcttttttcataatatacctcctgatgatttcttttaataactttccacaaaaacacggaaaaattcaaatttgaaaattttcaaagcaaacattcccgccaagcatggtaaataaagggaattctaatgtcagtagagttcaaaaaaataattctaccgcatataatttttcggtggaattacctttttttaactttaggatgaattttcgggattaatcatgtataataatatttgaaaattcaatttgggagcagatgaaaaatgtcttacagaatagttaccgattcgtgcgcgaatttaaccgatcaacagataagcgattatgatgtagatattataacgcttaaatacaatatcaacggcaaggatttcataagctatcaaaagggcttcaagaccgattacaaggagacctatgcgcttttgcgggataaggcgaagatcaccacctcgcttgttgaccgcgacacctgcgacgcggttataaagccgatactcgaaaagggcgaggatgtgcttgtgcttgccttttcctcgggactttcgggaacatatcagaatatcgtaaatgcggcggaggattacaaaaacgaattccccgagcgcaaggtaattgtggtggatacgctttgcgcctctttaggcgagggcttggcggtgcactatgccgttaaacttaaaaacgaggggcgctctattgaagaggttgcggattggattgagaaaaacaagctgcacatttgccatattttcaccattgacgatctgttcttcttaaagcgcggcggcagactttcgggttcaagcgcaatgctcggcacgctgctcggcataaagccgcttctgcacactgcggatgacggcaagctttatgtgaccggcaagaccagaggccgcaaggcatcggtcgaatatcttataaactcggtcggcgagatgtcgtttgacaatattaaggagcaggaggtctttataggccacggagactgcgaggaagaagcactctatatttccgatgaaatcaagcgccgctacggagtcaaaaagactgttgttaattatattgattcggttatcggagcgcactcgggtcccggaacgctcgcggtatttttcctcggcgaaaagagataaagtgaactcgatcaatacaatcggatgattttccgttatggaaagcattgtgtccggagtgtattgtctgttaaaaacaacaaaatacgccacgcgaatgtgacataatttgcgccgcctccgccgtataataattatacgagggaggcggcgcttttgattgtatatgcggatatacttataatactgaattttgcggtggattattttctgctgcgcgccgcagcttttttgcagcaccttaagccgccgctttggcgtatgcttttatcctcccttgcgggcggcatttcttctctctacatattcctgccgccgcgtggagtaatattggatattttgttccgtacagccgtttgcgcagctatgacatttatctgcttcggcttcggcaaaatcaaacgctttttacgcagctttggggtatttttgcttgtgaccttcggctacggcggagctatgacggcgctttggtatctattaagaccgaacggcatgacggttataaactcggttgtttatttcaatatttcaccggcacttttgattttctcatccgttgcggcgtattttctgctgcggctgctgcagcttatattttccggtacatcaaagctggcggaaagatgtgagattaccgtttcggcagggaataacagcataacgctggagggaattgtggataccggaaactcggttgaggatatattcggcggcggcgaggtgataattgcggacggcgagtatgtaaaaacccttttcggcgaaatcgaccctgcccttaacagggaaatacgctcgcgctacagggtcatgccctgcggcacggtaacaggaggcgggacgcttgaggcattcaggtgcgataccgcgcttgtaagcgacggcaaaaggagcgtcaggcttaataagccgatacttgctgtatctaaaacaccgcttaaggatgattatgcggcaatagtaaatccaagaatttttatgtagaagggcgactgaaatgaatatcagagcgttaataataaagtggcttattaaattcggaatagtaaagccctcgttttacataaacggggcggaaacactgcctccgccgctcggcacggcggaggaaacaaggcttttgcgtgagggcgggcaggaaaaccgcaataagcttattgtgcataatctgcggcttgtggtatacatcgcacgcaagtttgactccgctgccgttaatattgaggatctcatatcgataggcaccataggtcttatcaaggcggtaaatacatttcgcccggataaaaacatcaagcttgcaacctatgcctcgcgctgcatagaaaatgaaattttaatgtatttaagaaaaaacgcctcgcagaagaacgaggtgtcgattgacgagccgctcaatattgattgggacggaaacgagctgcttttatccgatgttttaggcagcgacggcgacgaggtaggcaggggaatcgagcaggaggacgaaagatttttgcttttaagctttgtgtgcgagctgccgccgagagaaaaacagataatggaaatgcgattcggtatgaacggatacgaggaatatacccaaaaagaggtggcggacgcgctgggtatttcccaatcgtatatatcaaggcttgaaaagcgaattatatgtaagcttaaaaaacagcttgaaaaagcggtgtagggctggtaaaatatacacggtgatgcttcttggagcaatatgaaaaaatacttgccgtatggcttgttataataaattttatttccgttattgtatgtacagccgataaaagccgcgcaaaacgcggcaaacggcgtgtgcgtgaaaaaacgctttgggcactgacacttttgggaggcggcgtgggaatgtaccttacaatgcggcttatacggcacaaaaccctgcacaaaagctttatgatcggcataccgcttattgttattctgcaaattatcgctttgtcttgcattttgtacttgaaataatacggcggaaatgttaatataattacagtaaatattcagggggatgttaaaaatgtcattttgtactaaatgcggcaccgaacttaaagaggatgctaaattctgcccttcctgcggcactccgacagaacaaaaggcagagccggttgccgaagaaaaacagcccgagcagaacacatatcagcagaatactacatctgattttgcacagaaattcgatcaatttaccgatacagaggacagaaccgccgagtttgataaggcggatatatcggcaaataaggtttatgcaatcttggcgtacataggcttcttggttctggttccgcttatcgccgtgccgaaatcaaagttcgcgcgcttccatgccaatcagggtcttgtactcttaatcggcgaggtggcttacaatattgtgcgcagagttttggtttatgtcttaggtctcactatgtggggaccgctgcgtatagtttataatgccgtaaagtttgcatccggcgcggtaggtcttgtttttgtggtctttgccgtaatcggtatcgtaaacgccgcacagggcattgcaaaggaactcccgcttgtcggcaaggtcaaaatactgaaataattccgcattgaaaaggcggaaaaagaccgagccgtttgattcgaaataattttaacagcattaatccctgcgggtgtcacggctttccgaacacctgcagggattaatttatgcctttttttcttttttaattaaaattataaatgcggcggcgcatattattgccgacagcagagagcctgccgctgttgcaagccccatggggtagagcgttcccgggaacattgaggacataaaatacgctccgggaatacgcacaagcagtattgcaatcatattgtgcataaacgaaattcccgatttcccgcaggcacagaaatacccgctgaacgcaaagtgtattccggcaaaaagacaatcccacgcatagccgcgcaggtactcgccgccaagccgtatgaccgccgcactgtcggtaaacagcgatacagcgccgctcgataaaaactgcataataaccgccactgtgccgccaaagcccgcggcaataaaaattgcgtaaagcagcgtttttcttgcacgttcgggcttttgcgccccgatattctgcgcgccgagcgccgaaacggcagaaagcatagaagacggcacaagaaacagaaagccgattattttttcgacaattcccaccgccgccgcgtcgttaagcccgcggcggtttgctattacggtgattaccataaaggcaatttgaataaatccgtcctgcattgcgaccggtatgcctattttaagaattttaccgattatttgcttatttggccttatatcggcttttgtaagcgcaagtccggttgaccgccgttttattacaatgagcgatataataacgcttatggcttgagaaaggacagtgccgagcgccgcccccgcaggacccataccgagtgcgcctataaacaggtaatcaagcgctatattagcggcacatgcaaccgctataaagtacatgggacttttgctgtcccccatcccgcggaaaacggcgcttataatattatacgccgttataaacggtataccgatgaagcagattgtaaggtaatcccccgtgcccgccgcagcgtccgcgggggtcgaaacggcggaaacgattgcactgcgcaagacgagcagcaaaagcgtcagcaccaaggaaagccccataaacagcgttacggtattgcccgtaaaaagcgccgccctgcggttgtccctaccgcctattgcctgcccgatattgaccgtagcgcccatggcaagccccactatcataaccgtcatcatatgcatgacctgcgagcctacggaaaccgcggtagtgtcggcaacaccgccgtactgaccgattatcagaagatctgccattccgtaaagggtctgcaggaaaaaggataaaaggtacggcagcgagaagaacaaaagattcttcataacgctgccgcttgtaagctcccgtttcatacagaggcttaacctccgaggtaggcttttttaaccgagtcgctctgtgcaagctctgcacctgttcctgaaagggtgattctgcccgattcaagaacatatgcgcggtcggctattttgagcgccatttcggcgttttgctcaaccaaaagaatggtagtgcccgcatcatgcagttctttgattatatcaaatatctgctgaacaagtataggcgccaagcccattgaaggctcgtcaagcattaggagcttgggcttactcataagcgctctgcccattgcgagcatctgctgttcgccgcccgaaagcgtgccggcaatctgatttttgcggtgcttaaggcgcgggaaacgctcaaaaacatccgcaatgccttccttaacatagccgggctgtgtataagcgcccatttcaaggttttcaagcacggtcatatgcaaaaatattcgtctgccctcgggaacgtgcgccaaaccctttgatacaagcttgtgcgcctcggcgtgggtaatatcctcattcataagggttatactgccggtttttgagtgcataagccccgaaattgttttaagggtggttgacttgcccgcaccgtttgcgcctataagggctacgatttcatcctcgtgcacctcaagcgaaatgcctttaagcgcgtgaatattgccgtaataaacatttatatcatttaccgtcagcattaccgtcagcctcctctttctttccgagatacgcctcaataacctttggattcgccttgatttcatccggtgtacccttggcgattattttaccgtggtcaagcacgcaaatgccctcgcaaatattcataacaaggttcatatcgtgctcaataagcattattgcaatattaaaggtgtcgcgtatgcggcggatattttccataagctccgcagtttccgatgggttcatgcccgctgccggctcgtcaagcaaaataatgctcggatttgtggcaagcgctcttacaatctcaagccttctctgcgcgccgtagggcaaagagcctgcctcctcgtttgccacatccgccatagagaaaaagtcaagcagctctattgcgcgctcattagccgttttttcggcctttttatatccgaagccgtgggtaacagatgagaaaaagccttctttaatggaattatgcaagcctaccttaacattgtcaagcaccgacatattggaaaacagccgtatattctggaaggtgcgtgcgattcccattcggtttacctgcgaggttgttttgcctgcggtagaattaccgtctaaaataatactgcctctcgagggctgatagacatttgtaagcaggttgaaaacggtggttttgccggcaccgttaggacctataagaccggctatctcggttttgcctacggtaagtgagaattcgtcaactgcggtaagtccgccgaaatctatacccaaatggtgggtttcgagcacggggcgtttatcaacatcacgctcgggaacaattgcgcccgaagggtaaggtaccattttatccatttgattttacctccccgtttttatttttgcggaatattgcgtttaacttaattttcgtgttttctataacgagccttgcctttgagctgtttttaagcagcattaccgcgataagcagtatagcgtaaataagcatgcggtaatcgcccgcgtttatgttgcgcaaaagctcaggcagcatataaagcagagcggttgctataatcgtgccgaaaatatttcccattccgccgagcaccacaaaaacaagaattaaaatagaagtgttaaagttaaacttttccgctgcgatagccgagaaattcatagcgtaaagcacgcccgccatgcctgccaaggcagctgatgtgataaatgcggtgagcttgtactttgtaatgcttatacctacagattcggcggctattcggttatctcttatagcggttatagcgcggcccgaacggctgtaaatgaggttaagcacaataaaaagcgtgaaaagaataagaataaatcctgcggtgaaggtggctatcttggttatgcctaccgcaccctgcggtccgttaaggataattctgccgtttttcataccgaggcttgccgcgtccttcatattgacatgaagcccgctcttatcaatacctacataaaggcagttgattatgtttttaatgatttcgccgaatgcgagagttactattgcaaggtagtcgcccgaaagccgcagaaccggaattcctattaaaaaacccatgattccggcaattattccgccgataaccattgcgataacaagccttacggggtcagacccgaccttatcctgcagagccgccgtgactatggctcccgtgaacgcgcccacgctcataaagccggcgtgaccgagagacaactcacccaaaacgccgacagtcaggttaagtgaaatagccataactatatatgcgcagataggaattaactgaccggaaatggagttgcttatcatccccgcattctgtagcgggaaaagtattgcaaataaagctattacaagaccgtaggttttaatatttgttcgggcatatttgcttaagcccttgtattttgaagcgatactcatatttcccacctcacaccttttccgttatcttcttgccgagcaagccggtaggcttaacaaggagtactattataagcaccgagaaaacaatagcgtcggacagctgggtggaaatatatgctctgccgaaaatctctataactcccaaaagtatgccgcctatcatagcgccgggaattgagcctataccgccgaaaaccgccgccgtaaacgcctttataccgggcattgagcctgtggtcggtatcagcaccggatacgcagagcaaagcaaaacacccgctattgcagccagagcgctgcctattgcaaaggtcattgaaatggtgcggttggtgtttatgcccataagcagagcggcgtccttatcctcagataccgcgcgcattgccttacccattttaccctttttggtaaagaaggtaagcccaaccattataagcaagcaggcggcaatggtaacgagcgattcgggcgtgattatcagcttgccttcaaacattgaaatcgatttaaacggcaccaccgaggtgaacgcacgtggagtgctgccccagattataagcgccgcattctgtaaaaagtagctcacaccaatagccgttataagcacggcaagcgatgttgcctttctcaaaggacggtaagcaaggccctcaataagaatacccaataccgtacaaacagccattgaaataagtatagacagcaccgtggggatacccatgtttgtggagcatatgtaagaaacatatgcgcctaccataataacatctccgtgcgcaaagttgagcattttcgcaatgccgtaaaccattgtatagccgagcgctattatggcgtaaacgctgccgagacttattccgtttattaagttggaaattaaagtcattgcttacaccccttttaaaaacgggaaaacggggtcatataagaccccttttccctattgaaccgaatacgaattatttatccataccgacatatgcgccgtctttgattaccatgcccttaggaggcttggaaacctcaccggtggttttccatgtcatccccgtaccggtaagaccgtcaaacttaaaggaagaatctgtgaactgtgcggtcaaagcctcgcatatatcagccaccttatcgcttgcctttacaccctttgccttgcatgcttcatagagtgcgtaaacgcagtcataggtatctgccgcgaactggttcggtatctcaccgaatttctctttatactttgcaacaaagtttttggttttttcgtctgctgcgtcagctgcgaagggagttaaaagcataacattttcggcaagctttgtatcaaagtttttaactgtgagtataccgtccataccatcaacaccgaagaatttgggagtatagcccatcttgtttgcttgggtcagtatgagggatgccggagtatagtaaatcgggaggaagagaagatccgcaccctttgccttagcgtcgttaagctgtgcagagaagtcactgttggtatcatccgggaaagtagtcgtgcttacgatttcaagtccctcggtcttagcttcggccgcgaatttctgatagataccggtcgaataagcatctccgttgttgtagattatcgcaatcttggtgccgagcttctgctttttaatatactgtgcggaagcaacgccctggttcgggtcggcaaagcacatctggaatacattgtccttgcgctgaatggtaatgttgccgtcgctgtcaggctgaccgcctataacgtcggtagaagaagcggaaggagtaagctggaaaatcttatcggagttggtctcggttgaaaccgcaatgcagggctttgtggtaactgtgcccataaggatctgcataccccagtccttaagcttgttgtaagcgttgactgatttttcggcgtcgttttcgtcatcctcgaacttcagctcgaactgaatgtcctcgccctttgcgttgatttcctcaacagcgatctcggcagcgtttttaaccgcctgaccgtaaatcgcggtagcgcctgtgatagggccgataccgcctattttgatcttgccgtctgaagaaccgccgctgtctttagagccgccgcagcctgccatcgcggtaagaacgagagcggctgacattgctgcgctcattactcttacaaattttttcattttaaacaacctctttcaaagttttttatatttaacagccgaagctgaaaaacaacaataataaaaatgactttgctttttttgaaaagcaaagtcagcggattttcaagccctatcagctttttacaggctcaacaaaagctgttttgcttctcatatatatatgttttgaaattcctatcaatcttataataattagctgtaggaaaataatggcgttaattacaaaaagggacactgtgctgacgacagtgccctctgtaatacctattaaataagcagacgaaaattcaggtgcagtatttgcatccgttgacggttcatatgatgttgacattgatgaaatacgcatggctcttcgtcctttcttttttattgcacccattttatcacaagcatataatcttgtcaagtccgctttagcgatttaaaccaaatttccgctttttaataaaaatatacgaaattcggttcgcattttgtagaatattgaagaaagagtaaaatatgcaaatttactgttgcataattattcattgtatgctatactttatgcaaagaaaacaagcaaatatgcaatcggaggaatatattatgaataaaaaagatattaaaaaagtggttctcgcatattcgggaggacttgatacatcaataatcattccgtggttaaaggaaaattacaacaatcccgaaattatcgccgtatccggcaacgtgggtcaggcaagcgagcttgaggggcttgaagaaaaagcgattaaaaccggcgcttccaaaatatatatagaagatcttacaaaggaatttttggaggattatgttttcccctgtgttcaggcagatgcgctttatgaggattatatgctgggcacggcgtttgcacgccctccgatagccaaacgcattgccgaaatagcaattgcagagggagccgacgctatctgccacggctgcaccggtaagggcaacgaccaggtaaggtttgagcttgcgataaaggcgtttgcacctgatattccgataatcgccccgtggcgcgaatggagcattaaatcaagggaagaggaaattgagtatgcagaggcgcataatgttccgcttaaaataagccgcgagaccaactattcaaaggataagaacatctggcatttatcccacgaggggcttgaccttgaagatccgaaaaacgagccgcaatacaataagcccggcttccttgaaatgggcgtttctcccgaaacggcacccgataagccgacctatgtaacgcttcactttgaaaagggcattgcaacggcggttaacggcaaggaaatgggcgccgtagagttggttgagacccttaataagctgggcggcgaaaacggtataggactgcttgacattgtggaaaacaggcttgtgggtatgaagtgccgcggcgtatacgaaactcccggcggcgcaattctttacaaggcgcacaaggtgcttgaaaccatttgccttgataaagaaaccgtacattataaagcgcttgtggctcaaaagctcggcgagctcgtatacaatgcgctgtggttcaccccgcttacaaaggccatactttcctttgttaaaacaactcaggaaaccgttacgggcgatgtcaccttaaagctttacaagggcaatatgataaacgcgggcgtttcttcgccgtattcgctttatgatccggaaattgccacatttgacgaggatgatgtttacaaccagtccgacgctacgggctttataaacctctacggtctgccgacaagcgtttacgcaaaaatgaaagctaaaaacggattaaattaaatttaaaaacctatgccgcccgattatacggacggcataagccataatctgagaggtgtaaaaatgggaaaaatgtgggcagggcgctttaagagcgcgcttgataagcaggcggacgattttaattcttcgtttcattttgataaccgtatgtataagcaggatatttcgggctctgttatgcacgcgaaaatgctcggggataaaaaaataataaccgaggaagaaaaagccgaaattataaaggggctttcaggcattttaagcgatatagaaagcggagcgctgccgcttgagagcgacgccgaggatatacacatgtttattgaggaggagcttacaaaaagaataggcgaccccggtaaaagacttcacacggcgcgcagccgtaacgaccaggtagcgcttgatgtaagaatgtatatggcaaacgaatgtgaggagataggcggacttattttaaagctaatcaccgcaataaccgataaggcaaaggaaaacgtaaacacaataatgcccggctacacccatttgcagcgcgcgcagcccataaccttcgcccaccacattttaacctatgcttttatgttaaagcgcgattttgaaagaattgccgacgctgaaaaaaggatgatttcccagtgtcccatcggttcctgcgcgcttgccggcactacatacgataccgaccgttattttgaagccgagcatttgggctttaccgatatttcgcttaacagtatagacggcgtgtccgacagggatttttgtcttgagcttttaagcgcgttttcaatacttatgatgcacctttcgcgtttttccgaggaaataatactgtggtcaagctgggagtttaagtttatagagcttgacgacagctacaccacaggctcaagcattatgccgcaaaaaaagaatcccgatatggccgagctggtgcgcggcaaaacggggcgtgtttacggcgacctgatgggacttttaacaacccttaagggtctgccgcttgcgtataataaggatatgcaggaggataaggaagcgattttcgacgcggtcgataccgtaaagcagtgtcttaccgtattctcgccgatgataaccactatgaaggttctgcccgacaatatgtacaaggcggcgcagaaagggtttataaacgctaccgatttagcagattaccttgttaaaaaaggtatgccgttcagaacggcttataaaaaggtaggagaaatcgtagcatactgcattgaaaacggactggtgcttgaaaccgtgccgattgaaaaatataaggagcttgacagcctgtttgacaatgacctttataatgaaatttcgcttgagacctgcgtttcaaagcgtatttccgcaggcggcacgggagagcgatcggtcgaggcacagattgcatatttaaccgaatttttgcattaaatgcaaaaaagcttgaaatacgcgtgtttgtatgctataatatttttcaatttaataagctatgtgaagtatgcaggaaattacgggcttttttgtccgtttccgaaggagtaacactctcaggtgtcgcaatggtgtgataaaactgtatacggatagcgctccggagaaatctgtttaacgggtgccgaaggtgcaaggcgtgtaaaaatgccaatctctcaggcaaaaggacggaagctttattaacgcggtgaaagccgtgtttcagtgcgtttttacggagttgaaccatatcggttcggctcctttattttttcaaaaggggagaaattaaaatgtgggattcatttattgaagccgtcacaaaaattaacgattgggtaaacggtgttgtgtggggctggcctatgatcatcatgattttgggcacgggtatttggctcacaatcagaacgcgtctgcttcaggtgcgtaaattcggcgagtcaatgagcagcacaatcgtacccgccgttaaagacatgggcaaaaagaaggataaaaaggataaaaactcggtttcgcagtttgaggcgttttcggccgcgatttccggcactgtcggcacgggcaacattatcggcgtcacctcggcaatactgacaggcggtcctggagcggtgctttggatgtggatctccgcctttttcggtatggttacaaactattccgaaaatgttttgggtctttactaccgtaaaaaggaaaaggacggcagcttcagcggcggtgcgttttattacatagcctacggtataaagcagcgctggctcggaatgctggcggcaatattctgccttttggcggcgataggaatgagcggcgttcagacaaataaaatcacaggctcatatacagccgtgctgaataacgattcaaccgcggttaagcttataatcggcggaatagtggcgttttttgcggcaatcgttataatcggcggaattaaacgcataggcaggattgtttccatgctcgttccgcttatgtcgcttttatttatcgcaatggcgtttgtcataatcggtaaaaaccataccgcaattcccgagacctttcgccttatattcacaagcgcgttttcttcaaaggcggttgcgggcggcgtcggcggcttcgcattctcgcagataatcaaaaagggccttgcacgcggtgtcttctcgaacgaagcgggactcggctcttcggtaatagctcactcggcttctgaaacacgcgagcctgtaaagcaaggactttggggcatatttgaggtcttttttgatacctttgttatctgcaccttaaccgctcttgtaattcttacaacgaatatcggctcgggcgcatatgaaagcggctcgtttttcggaacaacgaacgctgcgggcgacttcgtgggcgcttcggattcggcaacggcgctcggtgcgttttcttcaaatctcggcaccttcggaacggtcaccttcctgataattcttccgctttttgcctttaccaccgtgcttgcctggtcatactacggtgaaaaggcggttgatttctgcttccgccatatgccggagaagaaaagaaaaattccggttatgatcttcaaaatactatttattcttcttatagtattctcatcactcatcggctcagatcttatctgggcgcttgacgataccttcaacggtcttatggcgctgccgaaccttatagctcttgtgttcctttcggggcaggtcgcgcgcattacaaagaattatttcgaccgcaaaaatggcaagaacgttgagccgatgctctcggcgtaccccgagcagaatgaagaattcaaggcggatatcgaaaaggaataatttgctttgcaaaaccgtaagcggcgggtcaggtgcattaagcgcccgacctgccgtttttttatttcatcaagcaacggaaataattaccgcagcggataaagcctgtaataaagtctttcagccgaaaaaaatatgattcggctcttgacaaataccccactggggtatataataacgcacagaaaggaagatagcctatgaaacaggaagaatatattataagcggaatgtcctgtgcggcttgctctgcctcggttcagcgtgtagtgtcgcggctggagggcgttgaaaactgtgatgttaaccttataacaggaaaaatgaccgtaagctatgatgagcaaaagaccggtcaggctgattttacccgcgtggttgaaaaggcgggcttcggaatacgccccgacacgccggagaaagcggaaaaaccgaagactgccgaaaagaaaaaggacggcttcggcgatacggttgtttcggctgtgttatcggcgctgctcttatacatttcaatggggcagatgctgacagacaagctgcccgtgccgccgttcatgaatatatcgggtgacccttacggctttgcgcttacccagctgctgctttgcatacccgtaatgttcatcggcaggcgatttttcactcacggtattcccctgcttctgcgcggcaacccgaatatggattcgcttgtagccgtaggtgcgggcgcctcgtttatttacagtgtggttatgacctatatgataccctacaatatgcacgcggtgcataatctctattatgagtcggtagcggtggtaataacccttgtggcgctcggcaagcagcttgaggagcacagcaagcgcagaaccgcctcggctgtagaaaagcttatgcgcctgtctcccgataccactcgtgtactgcgtgacggcaaggaaattacagtgcccacaaaagatgtagccgtcggcgaaacggtaattgtaaagcccggcgagagcataccgcttgacggcaaaataataaagggagagagcagtgccgatgaatctatgcttaccggcgaaagtctgccgattgaaaagacagagggcagccttgttactggcggcagcataaatataagcggcgta

SEQ ID NO: 3546 - DNA, 11150 bp, Unknown
  16S sequences of unknown bacteria
acaaccagacagatcacatcggccagaaagtctttgattcgccttcaaacaaaaaaaatttctttagttttccacttgacaggttttggccgactgtgaatagtaacgatgaatgcgccatatacaaaagcgctgaagatgatcgctgatgaagaagcaacacaggaaatggtcgatcagctggcagaagagatgcagacggctatcgatgcgcttgaaccgatcgatgtgagcatcacgacgccggatagcgataatgtcaatgattattgcagcaacagcacagtagctaaaggaacagatactgcggcaaccgcgcagacagggatgatgcttggactgctgttcgcagcaggaatcgcggttgctggtgtgtttatgtatcgccggaaaatcgctaaataagcttgaagctgtaagtaaatgaaactttcttgcagttgatatttaaacgaatttgaagccctgtgtgatccatggatcatacagggctttgatacggtgtcggctccagcagcaatgatcagcattttctccttaggaacatgcttgcgcgggatctacgccaataccgatatatatcgtaatgaaggagagactgagaaagagggatggcatcaatgatggacttcatagatttgagccttcgtatacgatctcatctgtacggcggtgcggagataaatggtttttcctgctcgtttttagcatatgtaaaaaatggatcgagcgaacgatccattttttcttataactttctgttgtagaattcgacaacgagcagttcgttgatctcgctgttgagctcgctgcgctccggcagacgcaggtaggtgcccttcttggcatccttgtccacatcgacgaatgcgacagtgttcaggtttgcttccagcgcatcgttgatggatgccatgttcttggagcgctccttgatctcgatgaccgcacccggctttacgctgtagcttgggatatccactttcttgccgttgaccagcacatgaccgtggttgaccagctgacgagcgccgcggcgcgtgcgggcgaagcccatgcggtataccaggttgtccagacgagactccagcatgaacaggaaagtctcaccggtgacgcccttggaagtagctgctttcttatacaggttaccgaactgacgctcggtcacgccgtacatgtaacggatcctctgcttctcacgcagctgcagtccgtagttcgttaactttacacgctttgtcggtccgtgctgaccaggtgcgtactgacgtctctggagctcttctccagtttccaggatggagaagcccagacgacgggatttcttccaaaccggtcctttgattcttgccataatttcctccttattgttttattggccataaaacaataacagtacagatctccctgcagggtgttggtgcgcacagtgtcttcgccgccagcagcggggttaccggcactccatgtcttgcatgtcaccaacgcggtccgcaggactctgtatgctgctattccgttttacgcctaatcataatagcagagcgtgcagacaatgtcaaacttttatcacaaaatatgattaaaatatgaggaagtatgatacaatatatgcaaatgtacacacagtcaggaggagtaacatggatgacttttttaattatatggaaaacatcgtcaccccggagctgctgatctatatggcggccgcgctggcggcgctcatcatcttgacgatgctgctcagggggatgcgcaagcgcaggctgaagggcatgcaggccgggctggaaagtcagtataatgagatcaaggggatcccgctcgccttcaagttcaacaaggccgtggcgctgtcccgcgtcaatgagaacatgctcagcaaggtcaacgaatgccggcctactttcgacgctgtgcaggagacgctcaaggagtgcggcgtgctgctggcagaagcggaggacatgctgttcgtgcgcaagaacaaatcggctgcccgcaagatggagacgctgcgcgagaacctggatcgctgccgcaaggacgccgatcatgtcaaccaggtgctcgatgagatccttgagcaggaaagtgagcagcgcgcgcagatcaatgtgctgaaggagaagttccgcagcatccgcaagctgttccaggagaaccgtccctcctatcatcagagcgacgaatacatcgaagggcgctttgcgctcgtcgagaagaaattctccttgttcgaggagtggatgttcgcctctgaatttgacaaggcccatgaacagctgatggagatctccgccgatatcgaggagctgaccgatcagctgcatgtcctgccttcgctgtatgagcaggccagaggcgtgctcccgcgcgccatcgacgagatcgggctgcgctatgctcagacccgcaacaagggcgtgtatcttgagcatctggatgtgcagaagaacctggacatcatctctgatcagctcaaggataatctcaaccggctgcgcaacggcagcctgacggacgtcaaggataatctggacgccatgggagagcggctcgtcagcctgcaggaactgatcgtccgcgaggatcaggcctatgatgagatccacaacggcatggaggataccttccgcactgtcaagcgcgtcaacgagatgttcgaggagatcgttcagctgtatcagcgcgtgaatgagcgtttcggcttcgaagactggagcgcgcggctgtccaaggccggcgcccagctggaagagatgaacgcgctggtgaaggaagtcggcaagaccgcgcagaaaaatgagatcgcggccagcgcccagctgatcgaataccgcgagctggtcaagagcgtgcagctcttcggcaaggatgtcgagacgatgaagcagatgctgacgacggcctgcagcgatgaggagcgggccaagaatcagctggtgaagctgcagatgatcctcaacgaggtgcgtctgaagacgacctgccaccgtctgccgagcatttccagccaatacaataccgacctgcaggaaggagaccggctgatccgccgtgtgcgcagcgtgctggagcatacgccgctggatgtgtcggagctcaacgccgacctgcaggaagccatcgatttcatctataagctgtacaacaacgccagcaatctggtgggcatcgcgatcatggtggaaaatgccatcgtgttcggcaaccgttaccgctccagctatccgtccatcgattcggagctgacgcgtgcggagctgtccttccagaacggcgagtatacgaaggcgctgaagatcgccattcagtccatcgagaagatgcatccgggcatttatgagaagctgatcaaatcgaatgatccgggcatcatgaaccaggcggcgtgacgatgatctatcttgattacgcatcgacgacgccgatccgtcaggaagtgcttcaggcgtatgaaaagatcctgaagacctattatgcgaatgcggattcgctgcatcaggcgggccgcaaagtgcagtcattgctggaaacgagccgtgcgaacatcgcacagcttttccatgtccagcccagggaaatcatgttcacttcctgcgcgagcgaagcgaacaactatgccctgaaagggtttgcccttgccaatcagcagcggggcagacacatcatcaccagctgcgcagagcactccagcatcatgagctcggctgctcagctgcaggaggtgttcggctttgaggtcacttacctgccgcttcaggcggacggcaccgtgcatctggaagaggtaaaaaaggcgctgcgtaaggataccatcctcgtgtcgatcatgtgcgtgaacaatgagaccggatgcatcaacgacatccggaccatcgccaactatgtgcatgcgcactctcgcgccatggtgcacagcgatcttgtgcaggcgctgggaaagatggagctcgatctgtctttcctggatatggcgaccttttccgcgcacaagatcttcgggctcaagggaagcggcctgctgtatcaccgctccaatgtggagcttctgccgctgatcagcgccggacaacaggaggacggcctgcgcgggggaacgagcaatgcgccgacggagatcgtgtttgcgaagacgctgcggctggcgctggaggagcaggcggcgcatatcgcgcatgtgcgcaagatcaacgactatgcgcgcagccagcttgcgcagatccccgagatcgacatcaattcgccgcaggaggcactgcccttcatcctgaatttttcctgcctgtgcatcggcagtgagatcatgctcaacgcgctggatgccaaaggcttctgcgtcagcgcgcagagcacctgcaattccaaaggaaaggccatctcgcatgtgctgctcgccatgggaaaggatgagctgcacgcgacgcacgccgtgcgcctgtcgttttctcatctgaccacgatggcgcagatcgatgccttcattcagtcattaaaggagattataaaagattatgccacaagataactttgtttacgatcatatcctgatccgctatggcgagctttccacgaagggaaagaaccgcaaggatttcatcaagaagctgttcaataacgtgaaaaacgcgctgagcggatttccggcgctggactatgaaaagacccatgaccgcatgtacatccatctcaacggcgaggatccttttcaggtaaagacgtatctggagaaggtgttcggcatcagctcgttctcgttcgcggttcgctgcgacagcgatatcgaagcgatcaaggcgacgacgctggcgctggccgagcaggatgaacagcggaccttcaaggtggcggccagacggagctggaagcagtttccgatgatctctgatgagatcaaccgcgctgtggcgggcaacatcctgcgcaatacggcgtggaaggtcaatgtgaagacgccggatgtgaagatccagatcgaggtgcatgagcaggatacgtacatcatgaccgataagtatccgggtgccggcggttatccggtcggcggcatcgattcgccgatcgcctcttacctgacgatgaagcgcggggtcgccatcgaatgcgtgcactatgcttctccgccgtatacgtcttcacaggcgcgggaaaaggtgctggagctggccaggctgctggcgccttatcagggacacatcatggtgcatatcgtcccattcaccgatctgcagctggccatctatgatcactgcgacgaaagctatgcgatcacgatcatgcgccgcatgatgtatcggatcgcggagcggctggccaaaaagcagaacgcgctggccatcgtcaacggagagagcatcggacaggtggcatctcagacgctggagagcatgcagaccatcaatgacgtgacgcgcatgccgatcatccgaccgcttgcctgcatggacaaagtggagatcatcgacctggcgcgcaagatcggcacatatgagacgagcatccagccctgggaggactgctgcacgatctttacgccgaagaacccggtgaccaagccgacgatccgccgcgcggaatggatggagtcccactttgacttcgaacagctggtggatgcctgcgtggagaactgtgagtccgtgctcatctacccggacaagaaggaagaggagacagaagacctgttctgacgatggaaaaatatagtcatcccgtgcgcgtatgatcctgtgcgtccatctcatactaggagcgtgaggtgataagcatggatcgcagaaagcattatgacaacaacaagattcaggagaacctgtatcagtatgagatgggcatcgatctgggtgccgagatcgaatacgacaagcggcgtcatgaagcggaatatgaccagaaccgccgcagccgcgatttcaaaggcgtcaacgacctgaatccgcagcagcgaaaccgccgcgcgcgcaatgaccagatgaatcatcagtaagcgacgacagtcagcgagagagctggctgtcattttttatttgcaggcattgacagccatccgacaaggggttatgatactattgtactaggacaataatacaataggaagtgatgcccatgcactatgatcatgccagagcgatctatttgcagatcatggatgatatccgcaaacggatcatcaatggagaatacgcgtgcgatgaacagatcgcacctgtccgcgaactggccgtgcgctatgaagtcaatcccaatacgatgcagaaagcattgagcgggctggaacaggaaggcctgctgtatacgaagcgcacgagcgggcgcttcatcaccaacgatcaggcgcggatcgaagcgctgcgcatacaggtggtcacggacagcgtgcgggcgtgggtcagggaaatgcgcgcttatggcgtggatgatgagatgctggaggaactggtgagaaaggagctgaacacgcatgaaacagattgaatgcatcgacgtaaccaaaagctatggcagagaaatggcgttgttccatgtgaactgtgtgatcgaggcgggcaaggtctatgcactgtgcggaagcaacggcgccggcaagacgacgctgctgaggaccatggccgatctgcagctgccggatatgggcagcgtgcgtatcgacgggcagctgctgcgctgcgcagaccgcaggcggatcgcttatctgtccgatgaaagcagctttaccgacctcatgcgggtcgggaaggtccgtcttctgtatgagacattttatgatgacttcgatccggccgcctgcggcagaaggctggatcgcttcggattccgcgatcagatggtcctgggcgccatgagccgcgggatgcgtaccctgcttgagctcatcttcgtgctcagccgtcaggcagagctgtttctgctcgatgaaccctttgccgcgctggatccgcagcgccgtgaggaagcgatgcagctgatcatggaggcacaaggagaagcggccgtcgtgatctccacgcatctgcccggtgagatcgagacttatctggaccggatgctcatccttcagaacggccgcctgtgcatcgatgaggatgcggatgccctgcgtactcggtttggctgcgggctgcaggatctggtgaagcgttacatcacagaagagagggggtgagggcatcatgaagatgatcagattggaaggaatgctgctgaagaagccgctcttcatcctgctgctgatgagcgctgcgctcattcccgcagtctcgctgctggccggcatcgtttcggtggaagcgcggtatctgatcacgtccgcagtgtttctcctgctgatggccgctgccctcctcagaagggcgctgtatgtggaagcgcatcaccgcatggagcccttcatgccggtcgatgtgcgctggcatatctgctttcaaagcgggctgatcctgctgcaggccttgtgggtcgccttgatgctctgcgcgtttcgcttatgtccgccgctgcagatcgaagaggaaacgctgatccgctgcgcattgatcacggcggtcttcatcgttcctcagctgggctggatgatgaacggctatctgcacatcactaagacgcttcatatctatatcctcgatatcgcgatcacggccatcgcgggcatacggatgatcatggccgatcttcgcgccagcctgctcctcacggcgttcatcctggtgcctggctgcgtctatgtgctgatcgcactgtacaagatgatcaggaggtgatcgcatgaagaagatcgttggcttccatctgcgcagcatgcagggaacgctgatctgcattctcattctgtgggccatgatcttgatcggatatgtcatggagagagcgacattgcccgatcatgccggcttcttcgtctggctggccgcatcgatggaagtgatcgtggtcctggcggaaatggagacgatgctgtatggcccgccttgccgcacgatgttcctgcttcccttttcccggcgtcagatcgtttcggcgctgctgatgacaaaagggctgcttgcgggagcgcagaccctcgtgcagtctatcgcgctgctgtgctttcgcgaaccggttgcgcatctggtgagcatcgcggcgctcggctgcttcacgtatctgtgcagcgtgctgtacttccttgcggtatcgatccagcgcgaaagcacatgggggaagggcatcctgctgcgcgcagtgttcatcttgttttgcctggcgctgggcgctgcgctgtttttgggatggacagatctgcctgtggccatcgcgctgacgatcatcctgcttgggacagacatcgcgctcagcgtgcggctgatcaaacgggcttccgcatgctgaggaagacgcatgcccgccgtccgcatggacagcgggcatgttttacgctacaatggtcgaagaggaaagagaggaagatgtttatgctgcgctgtcccaactgccatgctgagctgaaaagagaaggaaaggcattccgctgccgaaacgggcacagcttcgatgtggccagacagggctatgtcaatctgctcgtcaatgcacgcagggagaccggagacaataaggagatggtgagcgcccgcaccgcctttctcgaacagggccattaccgctgcctgcgcgacgcgctgtgtgagatcatccgttctctgccggtgcaggtcatcgcggactgcggctgcggggaagggtattacacccaggcggccgcagaagaggggaaggacgtctatgcgttcgacatgagcaaatatgcgctgatgaaatgtgcgcggcgccatccggccatccatgcctttgcggccagcatctatgatctgccattagatgaagcatgtgccgacatggtgatgagcatctttgcgccctttggcgcagatgagttcttgcgggtgctcaagccgggcggatatgtgctcaaagtggagcctgcgcacgatcatctgctggagatgaagcaggtgctgtatgatcaggtctatgaaaaccgcgaagcgccccaggcgtatgcggggctcacgctgcgcagcgagcaggtgatccgcgatcggatcatcgtgcaggggcagcagatgatccatgccctctttcagatgaccccgtatttctatcgttcgcccaaagcgggagcgaaacggctacgtgcgctggaagagctggatacgcgcatcagttttcggcttgcgctgtatcaaaaacaatagccggataaacagaactgtgttatactggaacggtgtgaaatgaggtgtatcagatggcttttgaatccttaaccgaacggatgagtcaggcgttcaagaacctgaccggtcagggaaagctgacagagaaaaacatgaacgacatgctgaaggaagtgcggatgtcactgctggaagcagacgtcaactataaggtggtcaaggacttcatcgcccgggtcaaggaacaggcgctgggcgagacggtcatgaaatcactcaaccccagccagatggtcgtcaagatcgtccatgatgagatcaccgatctgctgggaacggaagagacagagatccattatcagaagaacggcatcacgacggtgatgatggtcggtctgcagggtactggtaagacgacggccagcgcgaagatcgccaatctgatgaagaagaagcagggacgccggccgctgctggttgcctgcgacgtcattcgtccggccgcgatcgagcagctgcagacgctgggtgagagcatcggcgtagaagtattcacgctgggcgtggagaccggcgccttggaaacggccaagcgcgcaatgtcgtatgcgaaggaacagggctatgacaccgtcctcttcgataccgcgggccgtctgcatattgatgaagaactgatgcaggagctcggcgacatcaaggcgttcctgcacccggatgagatcctgctgaccgtggatgcgatgaccggtcaggatatcgtgaatgtggcgcagagcttccatgatcagctcgatgtcagcgggctcgtgctgaccaagctcgacggcgactcccgcggcggcggcattttgtccgtgcgcgcgatcaccaatgtcccggtcatgttcgtcggtctgggtgagaagatcgacgatctcgatgtgttccaccccagccggatggcagaccgcatcctgggcatgggcgatgtgctgacgctgatcgagcaggcgcaggacaagatggacatggaggcgtccaagaagaccgcggaccgcctgatgcagggaaccttcaccctggatgacatgctcgtgcagtatcagcagatcaagaagatgggctcgctggggggcatgatgaagatgatcccgggcctcaacaagatggccggccagatcgacgatgtgcgcgcagagggcaccatccgtaagagcgaggcgatcatccagagcatgacgccgtatgagcgtgagaatcccaagtgtctgaaggcatcgcgcaagaaccgcatcgccaagggcagcggaaccagcgtggcggatgtcaaccgcatgctcacgcagtttgagaagatgcagcagatgatgaagatgatgggcggcatgggcggaggccggatgcccaacatggctgcgctcaaaggcatgagcggcatgggcggaggaatgcccggcgccagcaagcatgccggatccaagaaggcgaagaagaaacgcaagaagagataagacgatcatgaaaaaaagacggcagtgccagcggcggccgtctttttcttgctaacgcgccatctcatgaatgagcgcgagcagctctgattccgtgtatgcctgttcaccgcgctgatcatgcacatagagggcaccgtcctcctggatgaggagcacggcgcggcccaggcgcagcgtttcgccgtttgcggccgagatggcatccgggatcgtggtgtcgggcagatagatgtccgtttcctgcatgcgccgctcatagcgcatcggatagcgctccagcagatagctctgggctgccggcagcaggaaaggctctttgagcgcgatatagtcgaaagacagttcatcggatccgccgaggacatgatgcagcagcgcgctttgcctgtcttggacgtcatcgaacgccatgccctgcacgatggcggggctggcc

SEQ ID NO: 3547 - DNA, 9965 bp, Unknown
  16S sequences of unknown bacteria
tgataggggtagggcggacgacccttttcgttatataggtttttcgacagtctgaggggagggtttcccctcccctgttacgaccggtcccggcttttgaagatcagcgcgccgatcaaggaaaaaaccacggcagcggcaatgccgccggctgtggcggtgaggccgccggtaaagacccccagaaagccccgctgggcgatggcctccttcactccttcggccatggtgtagccaaagcccagaaggggcacagtggctccggccccgccgaattttaccaccggctcataaacaccgatgccggtgagaatgacccccagcactacaaaggtcaccagaatccggccgggggtcagcttggtccggtcgatgagtacctggctgatggcgcagatcaccccggcggtgagaaaggctcttacatattccatttttcatcggcctccaaacaaacaagatgacagatcccagggatgctctggccctggttgcaggaagtgggactcaaaagggcgccggtgccgcagaacagcaccttgcggaaaatcccctgctccatggccttgaggatataggagcaaagcaccgccgccgaacagccgcagcccgagccgccggcgtggacatcctggctgccgtcatagagcaaaaggccgcagtcgtcataggtggggcgcatatcgatgccgtcccgctgaaacaggtcgatgacgatctgatgccccaccttccccaggtcccctgtgacgatgaggtcataatgggaaggcccggtgtgggtgtcctggaagaagcggctgatggtctcgtaggccgacagggccatggcggcgcccatgttggcctggctggtcactcccgggtcggcgatccggccgggggtggcgtgggtgatgcgcacccccatgcctcctttttgcagcaccaccgccccggaagcggtggccgtccactgggccgtctgaggacgctggccgccgtattccaaaggatagcggtattgccgctcggcggaacagaagtgggaagaagtgatggcacaggccgtctgctcaaatccgctttccaccaggcaggaggccaccagcagcccttctgccatggtggagcaggccccgtacagtcccaaaaagggtacattggtgggccgcagggcaaaggtggtgccgatgcactggttgagcaggtcccctcccagaatacaccccagctgggaaggaggcagatgggctttggagagggcccgctccagggccatggacatcatccggctttcggccttttcccaggtttgttctccaaaggtgttgtcgttgctgatatagtcaaaatcccgggacagagggccttccccttcctttttgcccaccaccgaggcgtaggccagcacccggggcgggtcctgaaagcaataggtgttccctgtttttttcatattcccaccccctttatgcaaaaatataatagatcaggccgtaaatcaccgaggccgtcaggccgcaggccagcaccggcccggcgatggtgaacatcttgacgcaggtacccagcaccaggccttcggttttgtattccagggccggggcggcgatggaattggcaaagccggtgatagggacaatggtgcccgctccggcgaacttggcgattttgggatagatagccaaatcggtgagcagcacccccagaaagaccaggatgatggaaagggatgctccggctgtcttttcatccagaccctggctcagcagaaagttgcgaatggcctgggccagagtgcagatggtgccccctgtgacaaaggccagagaggcatctttcagcaagggcgagggcggggaagctttttgatagagctttttatattcttggttggtaatatccatgaaaaaaccctttctgccggcgcaccggctcgttttcttgccggtagtatatgccggaaaagggtgatcatacaaaaaagtggccaaaggccacttttttgatggggaaagaatgggtttttattgccgggcccggtgaaaaagctgcttcaccttttccagcaaaaggggatgggaagaaagatccgggtcctggcgcagcacctgttgggccgcttgctgggcattttgtaaaagggatacatcctgggacagatcggcgattttgaattccggcagaccgtgctgccggtcaccgaaaaagtctcccggcccccgcagcttcagatcggcttcggcgatgcggaagccgtcatgacactgggtcatcacccgcagccgctcctgtgttttggcgcttttgctggcggataccagcacgcaataggactgccggtcgccccggcccacccggccccgcagctggtggagctgggaaaggccgaaccggtcggcgtcctccacgatcatcagggaggcccggggcacattgacgcccacttcgatcacggtggtgctcaccagcacctggatctttccctggacgaaatcttccatcacctgttccttttcccggcttttcagcttgccgtgcatcaggccgatggacacctggggaacccgctgctccagtgctttggcataggccaccgccgattgccgctcgtcctccccttcttcggtttcgatgagaggacagacgatgtacacctgtcccccttcctgcacctgtttttgaataaaggcatccagccgggggcgatagctggggggcacggcgtaggtctccacccgtttgcgtcccgggggaagttcgtccagcaccgacacctgcaaatcgccgtagagcatcagggccagggtgcggggaatgggggtggcgctcatcacaagggaatgggtgtccgcccctttgtcccacaaaagctgccgctgctgcacgccgaagcggtgctgttcatcggtgatggtcagggccggacggcaaaagaccacattgttttcgatgagggcatgggtaccgatgagaacagagatctccccttgacctagcttttccagcatggtttcccgctgctttttaggcgtggagccggtgagcagagcgcaggaaatgccgcactgctccatcaggggctggagggattcgtaatgctgccgggccagaagctcggtgggggccatcagcgccccctgcattccgtttttggccgccagccacagacaggcggcggccaccatggttttgccgctgcccacatctccctgcaccagacggctcatccgtttgcctcccgtcatgtcggcaaaggcctcatgtacggcccgccgctgggcgccggtgggagagaaaggaagaacctggtaaaattcctccgggggataccaggtgaggccgatgccctgggcggtgatattctgctgtcccatcagctgcaagccgcaggcaaactgaaagaactcctcaaaaatcacccgtttccgggcctcttccagggcttcccgatggacgggatagtggatgttttcataggcatagcggatgtggcacaggtcatattgctggcggatttcttcatccaggctttcggtgagctcgtcggtatactggatggcctgggaggtggcctggagcatcagcgtgcgggacagcccgccggtgagacggtagaccggaagcaatcgtccggtgatcattccccgtccggccggttcaaattgggggttggtcagctgttttttcagcagtgttccttcgattttgccgaaaaaggcgtattcctccccctggcgcagctgagagctgagatagggttgattgaaatacaccagatcgatctggccgctttcgtcaaaggcccgcagtttggtgatgctcagccctttgcggatcagccgtgtggaagggggctgggccacggtggccagaatgcagcaattttcccccacgggggcctgagcgatgggataaaagcggctgcggtcctcatattccctgggaaagtgctccaggcagtcacccagggtgaaaaggcccagcttgtgaaaaagctgggccttcttctcccccacaccccgcagggtgcggatatcgtctgtgagatggctcatgggatacacctagcgctggtattggcggtagaccgccaccaccaggcccaggatctgagcatcgtccccatcgatgggctcataagcggggttctctggcagcaggcgcacatggccattggatttgtccagccgcttgacggtggcttcatcctccagcatggccaccacgatggccttttggtcggcggtgtcctgacggcggacgatcacatcatccccatccaggataccggccccgatcatgctgtcgccccggatccgcagggcaaaatattccccgctgtggtactcaaaggggatgtagcccagaatatcctcctgcatcaggatgggctggccggcagtgaccactcccagcaccgggatcttcttcacgccggtggggtggtttttcagggtgatggaccgggtgcggccctcgcccttgtccaaaaatcccccttcctgcaagatcttcagatgggagtggaccgtggagggggatcggagccccaccgcttggcagatctcccgcacggcgggaggatagccattttcgtcggtatagcgggagatatagtccaaaatcttttgtcgcatgggactgagttttttcatgggatcacctcaagggacggcatatggcatagaattgtatatagtataccataaaacacgggatgaggcaaacatttgttccgatctatggaaaaacagttttggatgggcacaggaagttctgctgcggcatatgctgtcattgtaatggctttggggcctgggagaggactgccctggctccatcgaaaagtttcacgagaaacaaggagggatccctgttgaaggagatcgattggaagcaaaagaccagccgggcctccggagaggagacggaggaaaccccgctccttcaccgggtacgccgggtggtgcgggtgcggcccgacggcagttatgaggaaaaggaagggcgccagcaggaggtgcagcagtcccttcccgaaagccctcttctccagtgggccagagaaagcggccagtgggtgcccgagggactgagcctcagttgtcagtgtccttccggaccggagaaagaggaggacaaagagaatcgtccctgtatcccctgtcctccctgctcctgtgagccctgttcctgctcttgcgtctgttcctgggatgggcctgcccatgattatctcaccggtgtggacccggtagtggggggccagcaaggggaaaaagacacggcgctgaagctggccctggccgctcagcaagggttcagtgcctgcatggaggaagagggcatccggttggaaaagggagcctatctggtgctgctccagggccgggcccaggattactccggcgaagaagccggtctccagctgctgctggatggccaggccgtgcccggaggactgtggcggggcaaggaaaccgcatctctgggggcgattctggccacccagggggccgtcctccaggtgatctgcctggaagacggcctgtatcagaatctgtccctcaccgtgcttcggttggacggctgagccatgaaaatctatgtgtatgccatctgcaaagacgaaaaagcctttgcagaccggtggatggattccatgtcagaggccgatggggtctatgtgctggacacaggaagccaggacggcactccggccgccctggcttcccggggggcttgggtggcctgtcgggaggtcgtcccctggcggtttgacaaagcccgcaatttgtccctggacctggtgccccaggatgccgacctgtgcgtctgcaccgatctggacgaggtgtttgaaaagggctggcgaaaaaagctggagcaggcggccctgacgcagtcctgccctcaataccggtgccgctttgtgtggagccatggagaagatggaagagagggcatggtattctggcagaacaagattcaccgtcgccatggttttgtctggcattatccggtgcacgaagtgctgcaatggcagggggaaaaagaatacaccctgggagaggccgccggggtctctctgcaccactggcccgattcccagaaatcccggggacagtacttgccccttttggagctggccgcccgggaagagccggaagacccccgctgcgctcactacctgggccgggagtatctgtaccagggggactggcacaaggctgaagaagagcttctgcgccatctggcactcccccgctccacctgggaagcggagcgggccgcttccatgcgctatctggcccggtgctgtctggagaccgggcggcggaaagaggctcttcgctggttttaccgggcggtagcggaagctccctccctgcgggaggggtatgtggaatgtgcatggtatttttcccaggaagaaaattggcccggggtgctgctcatgagccaaagcgccttggccattacccagcgggacaaaacctatatcaatgaagattttgcctggggcagcgtcccctgggatctgtccgccctggccttctggcatctgggccaaaaagagaaggccggtttctatggagccagggccttggaaaaagagccggaaaatcagagattgcagcagaatctggccttttatcaaggggaaaaataatatatttttcaaattttctttacaaaccgtccacatctttttttcttggtgtgttattatgatatcagcaacatacctctctttattccccccacaacaataaagaagcaaaagggcgtccgcttaggcgggcgcccttttgcgtagattgtcaaaaaacaggatagccaaaaggactactggccctacccttattgattcgcaaaaagccgcgacctgtgcgtggctttttgcacttctcaaggagccagtgtgcgccgaaggcgtgcatgcagacccttgcaaaactcgaaaaagtggcttttgccactttttcgacatgccctttttcgtatattgactgtgagaattgtacgatttttttccttgtatttcggtaagtatgccgcaggaaaactatgctataataataccatggcgaagatcaccacaaggaggaaagatgtgagtcccctattgtttttgctttattttttcaatgtgatggctgcaatttccatcctgtttttccgcaaaaaacaggtgggcagcacattggcctggcttttggtcttcgcctttgtgccctggttgggctttttgctttatttctttttgggcagtacccgaaaactgcgacttttccgccgccggttccggcccaatccccgcttggccgaatatggcccaagccctggggaaaatgcccgggctttgctttccggtcagttcaatctcagcagtcagggacgggaaggctgccgggatctgatgctgcttaacttgcagggagcaggggccgtctacacccagggcaacagcgcccggctgctggtggacgcagaaaaaaagtacgaaagcctgtttcgggacattgaggaagcgcaggaaaccatccatgtgctgtattttatcttcaaaacccgggatgaatgcggcagaaagctgctggatctgctggtgcaaaaagcccggcagggggtaaaggtacgggtcatttacgacaccctgggctgtctcaaaacccacagggtggattttgatcctctgatccaggccggtggcatggtgtatgggtacctcccctcccctttgcgcaccgttttgcaggtcaactatcggatgcatcggaaaatggttatcattgatggcaaagtggcctataccggcggcatcaacatcggcgacgactacctggggaaagacagacggatcaccccttggcgggatacttcggtgcggctgacagggccttgtgtccagcaggtacagcgccagttcatccgggactgggtttttctggattctcaggccgcccggccctatgtggagaaaatcgactcttcccaaagcctggaacagtgtatgaaagaagaaaacaccgggcaagtgggcgtgcagatcgtctcttccgggccggatagtctctatccctataccaaagaaagttatctgggcatgatcacaagggcccgtcggtatctttatatccagaccccctattttatccccgacgacacccttctgacggcgctgcgctgcgccagccgggcgggggtggatgtgcgtctgatgatccccggagtgccggacaaggcctatgcctatcatgtgaccatgtggcatgccggtgaattgcttcgctggggcattccggtgtaccgttatcccggttttctccatgccaaaacctttgtcatggatgatatggtggcatccataggctccaccaacctggatatccgttcctttgacctggattatgaactcaatgccctggtctatgaccgggattttgctttggagtgccggaaggtttttttgcaggatcaggaaaaaagccgccgcctcaccagagaggaataccaaagccgtcccctgccggataaggtgaaagcagggcttctgcggctggtggcccctttgctttgatatttcgggatcatggcctctggccttgaccataaaaaaacaatgagaaggagacttggcgaaatgattgcgattaccaacggaaaaattgtgacagtcaccggcgagacctatgaaaacggtaccgtgctggtggaaaagggaaaaatcaccgccgtgggagccaatgtggccattcccgccgatgcggaagtcatcgatgtgaagggcggctgggtgacccccggtttcatcgacgcccatacccatatctccaactttaatgaacccgacaccatgccggctctgtgcaaggacggcaacgagatgagcgatcccatcactccccaggtgcgggcctctgacgccatcaacccctgtgattatgccattgaaaaggtgcgcaacgccggctttaccaccgtctgcactctgcctggttcggccaatgtgtgcggcggcaccggcattgtctataagctgcggggccataccgccgaggaaatgatcatccccggcaccgagcagatgaagttcgctctgggcgagaatcccaagcgcgtctatggcacaaagaaccagatgcccatgacccgtatgggtacagccgctctgctgcgccagaccttctatgatgccaagaattattccgatgctctgctcaaggcggagaaagatccctccaaggctcccaagcccgacttcaagctggatgctctggtgcccgtcatgcgccgggaaatgaagtgccgtatccatgcccatcgggccgacgatatctgcaccgccatccgcatctgcaaggagtttgatctggacttctccatcgagcacgccaccgagggctataagatcaccgacgtgctccagaagaacaatgtgacctgcgtggtaggccctcatctgtggggaccgggcaagcaggaaatccatggcctgagcctgcacacccccgcagcgctccatgaagcgggcatcacggtgtgcctcaccgccgactccggctcccagacccagttcctccccgccaccgtgggcatcctgatggtcaatggcctggatgagcaggccgcctttgaaggcgttaccatcaatcccgcccgtctgctgggtgtagcggacaaagtgggcagcatcgaagtgggtaaggatgctgacctggctgtgttcagtggccatcccttcagcagcctgagcaagtgcatgatgaccatgatcgacggcgttgcctacaacaagagcctgtaagatctacataaacaaaaaagcagccgggaaattttcccagctggagctgatcgaaaaagtggccttgggccactttttcgagtttttgcaagggtctgcgtgcagccattcggccacactggccccttgataggtgcaaaaagccacgcacaggtcgcggctttttgca

SEQ ID NO: 3548 - DNA, 16672 bp, Unknown
  16S sequences of unknown bacteria
gcctccccgctttgctgtctccattataccatgccctgctgcgtttgacaatggcccaaacaaggcgaatgcgggccgccgttcggctaccccatccgccgggcccaccaataggccgcgagcttgagcgccaccgcgaaggccagcgcggcaaacgccgcgtagaaggccgacatatcgaacagcgcgcaggtgcaagtcaaaaacaatagcccgatcaaaagggcgtccatcacgaggccgccgctcttatcgtgcaaatagcggttgcgctcatcccgctccgcgagtagctgttcccgcaggcgcagccggtcgcgcagcatttttttgtagcccaccaggcgcgcaatggcatacgccagcccgccgaagaaaatcgcgcggtaggcgaactgcgccaaatccgtcatccggcgcgaatcgccgccccccagttccgccaccgccaccatgtaaaccagcatcaaggcgatcacgccccacagcacgcggatgcgcaggcgaatcacctgcgaaaacggacgctcactccaaggtttcataccgggcctcctccttttgcaagttttcttccaggcaacacagttcctccacgctggtgcggaattcccgcgccaagcgataggccagcagcagcgaaggactatattgttcgcgctcaatggaaatgatggttctggccgaaacgcgcacccgatccgccaactgttgctgcgtgagccccgcggccagtcgggcctggcgcaccttggttttcatgccgcactcccccttcacatgaagcatacttcacgaagccaacttcatattagcacaaatccgcgccgttgtcaagcggtttgggcgcaatgggccaaaaggccgagcaggcagacgaatgaacattgcaaagcaaaccgcggattttccggcacgcaaaaggggctgtgaaaaaacttttggttttttcacagccccatgaatttttatgcccttgccagcgcttttcttgccgcgggaacgtttttatgcccggcgcataaagcggtattgcgcttccaccaggccgcgatagtgtccgcccgggatcttcatcaattccgcgtgcgtgccggtttccgcaattttgccatcctgcaccaccatgatgcaatccgcattgcggatggtggaaagccggtgcgcgattacgaagctggtgcggccgcgcagcagcacgtccagcgccttctggatgaggatttccgtcttggtatcgatggaggaagtcgcctcgtccaggatcaggatcttggggtcgttgagcagcgcgcgggcgaaggagatcagctggcgttggcccacggacagcgaggaaccgcgctcgttcacctcggtctggtagccgcgctccatgtgcatgatgaaatcgtgcgcgctcacggccttggcggcctcgatcacttcttcgtccgtggcgtcgaggcggccatagcggatgttgtccatgatggtgccggagaagatgaagctatcctgcatcatcacgctcatttgtttgcgcaggctgcgcagcttcacatcgcgcacatcgtgcccatccagcttcaccgcgccgccctgcacatcgtagaaccggctgatgaggttcaccaccgtggatttgcccgcgcccgtggggcccaccagcgcgatggtcatgccgggcttcacgtcgaagctcacgtttttcagaatcaccttttcaggatcgtagctgaaggtcacgtcgtcgaaggtcacgtggccctcgatgggcggcaggtcgatcgcgtcgggcttatccgggatgtcgttgggcgtatccataatttcgaagatgcgctccatagacgccgtggcggaaagaatgctgttgtagaagttcgaaagcgtgttgagcggctcccagaaccggcccagataccacaggatcagcaagaggttggccagttccagcccgccgctgcccatgaattgcacgccgaaatagtacacgagcaccgtgcccaccgtgcccgtgatgtccagcgcgggccagaaggcgttgttgatctggatggcgtgcatccaggaggaacggatatcgtcgtttacgttgcggaaggtatcgtcgttttcctcctcgcgcacgaaggcttccgtcacgcgcatgccggcgagcgattcgtgcaggtagccgttcatgctggaggttttcacgcgcactttctgccagcgcaagcggattttgcgcttgagcttgaagaggatcagcagcaagaacggcaggatgcacatggcgatcaaggtgagcttccagttcaccgccagcatgatcacgatcagcaaaatcagcgtgaagcaatcgatcaacacgttgacgataccgttggtgaacaggtcgttgagcgagttcacgtcgttgatcacgcgcacgaggattttgcccgcactgtgcgtatcgaagaaggagaaagacagcgtttggatgtggttgaacagatcctcgcgcaaggtcgccagcgcgcggcggcccgcgccatccatcaggcgcacgcgcacatgcgtgcagatggcggcgatgactgagagcgccaccatgccgccgatcatccagggcagcgcggcgcgcgtgttatcctggatggagccgatggcgcggctcatgaggaacgggttgcccagcgagcacagcgccgcgatgaccatggcgcacagcgccagcgcgacccggctgcggtagggcttcatatagccgagaaggcggataaactgttttgcgttaaatggttgctccagaacttcatcatcaatctggcgaagcatttttgccatcttagcccacctcctcgtccaccatattggccgtttgctcggcgaccatgttcgcgtaaatgccgcccagttccatcagttcgcggtgcgtgccgcgctcggcgatttcgccatggtcgagcacgatgatctggtccgcgttcatcacggaagaaatgcggtgcgcgatgataaacgtcgtgcggcctttgagcacgccgcgcagcttttgctggatcaccgcctcggtttccatatccacggcggaggtggaatcgtccagcaccaggatcttgggatcgatcagcaccgcgcgcgcgatggccgtgcgctgcttctggccgccggagaggcccaggccgcgctcgcccacgatggtctcatagccgttgggcatctggtcgataaattcggtggcgcaggccacgtccgccgcctgggccacgcgctcgtgcggcgcgtccacccggccaaagcggatgttgtcttccagcgtatcagaaaataggaacgtttcttgcggcacatagccgatttcgcggcgcagcacgtccagcttctggtcgcgcacgtccacgccgtccaccagcacgcggccctgcatcacatcgtaaaaccggcccagcaacaggcacagcgtggatttgcccgcgcccgtagcgcccatcaccgcgatggtctggcccggctccaccttgaggttgatgttcttgagcaccggctcgccgccataagagaaggtcacattgtcgaattccaccgcgccttcgaacttggcgggggaaatcgcgtcgggcttttcgcggatgcggctgccgaagtccatgtaatacagcaacttttccgcgctggtgatggcctgcgccgtcatattgatgatgttggaaagcgcgcgcaccgggttggtgagcatccaaatgtatcccgtcacgcccaccagggtgcccacgtccatgcggccggaagccgtgagcagcgcgccgccgatcagcgccaccggcgtgcacaggccgctcaaaaactccatcagcggcacgaagcgcgaccacacgtaggtcgcccgcaggttgagcttgaggagcgtctggttgtcctcataaaagcgctcttcctcatagtcctcgcgcgcgaaggctttcaccacgcgcacgcccgccaggttttcctgggtgcgcgtgttgagcaccgcgttctgctcgcggatgttggcaaacacggggcggatgcgcttgttgaaggcgaaggccgtggccccgatcacgggcaggaacaggatcaatagcagcagcatttcaatgctcatcgcgcccatgaagatcagcgcgccgaagaacatcagcgcgttatcgaacgcggtgatcaggccgcccgcgatcatgttgcgcacgccttccaggtcgcccgtcatgcgggacatgatttcgccgatgcggtgcttgtcgtaaaattcataggggagttcttccagatgccggtataggcccgtgcggatgtcgaacgccaagttctgcgccacccgctcattggagaccgaacggatgtaggtacacgcaccgcgcagaaccaccagcgataaaagcgcggcgcacagcgggggcaaaatcgtcaaattcccggctgtgatgacgtcgttcacaatggtttctgtgatgatgggaacaatcagcctcgttaggatcacaatcagttgcagtgcgaacaccatgaccatggtttttcggtatggacgcatcatagatgcgatccgcttgacaatgtccatggaacatccccctcgctatcgagtgtatgagcatgatattcgattccggcgctcgcgtcaatgcggaaaaaacccgagtttcgccgcggaaagcggcttggcccgctggaaggcgcacagcgcgaatccatagggttaattctccgcttttctctggtttccttcccttttcgcgtgtttttggcaaatttaccaaaaaataaagtgttacaaaatattttatccgcgaatttgccgccgctaacgggacaaatccgcggattgatcagcatttgcacatcagtttttaacaatttgtgtgtcaattccgacaacggcggcgtagcctttgtcaacgggcggagccaaaatccctggccaaagctttgctgctctcgcgcgccatcaggcgcggggtgatggccacggactgcgtgaaggtctcgccattttgcaaaattttgctggaaagaatggccaccgccacgcggcactgcgcggcgacgtcgcaatccacggacgtgagcgcgcagggcaggaaggggcaaaaatccgcgtcgtcaaagccggtgagggcgatgtcctccggcacgcgcaggcccgcttcggcaatggcccggtacgcgcccagcgcaatggtatcgtacccagccaccacggccgtcggcggggttttgagcgcgagcaagcgcttcatcccctcatagccgcaaggctcgttgcgcacatcgggagtggcgacatattcctctgggagggcgatatccttctgggccaacgcctgccgcagcgcgtgcaagcggctttgcgccagcgcgtcgccaatgaaggcgatgcgccggtggccctgcttggcgagatgctccaccagcgcgcggatgccataggtttcgtccacgctcaccacgtcgtattcgcgggaagcgtagttcagccccatcaccaccgtgggaatcgattgcgcgcccggaatatcgtggatggaattgctaatgtcccgctgctccgtcacgacgatgatgccggagggattcaactgcgtcaaaaacgccagctgctccttttccaattccggggaaaacgcgctcagcgcgagcaaggcctggaaccccttcttgcgcaggtgcgcttgcaagtgcgtggcgatgcgggcataatagccgctcacaatttccggacaaatgacgcccaccagattgcgccgctcgacaggagcctttttccgcttgtgcttggtatagcccacgcgctccgcctcttccagcacgcgctgtttggtggcgcggctgatgtcggaagaatcgttcagggccttggaaacggtggttttgttcaggttcaatgcggcggcaatgtctgccaatgttgccatattctccctccgcttctggttttccttcttcacaccgtgcttgcctcgctaccggcgctttgctttgcgcccaagaatttcgacacaaagcaggcgaactccttctttccgcgcggaactttcgaaattccatcgcataaaaccgcgctatcccgcaaatcccgccgctttttgcaaatggcggtggtaagcgggctttccttccgccgctgcttcccgtgcgatcagcttgcccgcccgcaccatggcttccacgcgcagggcgatccacgcgtcgccgatgcccagacggtatttctccaaaaccgcgccgatcagcctgccctcataaaacgtttcctcctgcgcggcgatttcccgcaaaatccaaggatcgtaaaaatcctccggcacgctgcgcagaccgccgttgactaccgcgcgcaaaggggcgttttccgcttgcaacgctgcccaggcgcgggcgatttccgccaaacccgcgggggaaatctgcctttgcagcgccaggaagcgcccccattcgccgggcgcaacgtcgccccaactggcatagcgctccgcaccctccggccaatccggcaggcgcaccaaaagcacctgtccggcgggcgcttgccgcgcgcaaagctgcgccgccagccaatgcaggccgcacatttcatcgctctgctggctgtaccaaatgcgaacgcgctcccccgcgcgcaggcgatcctggattttcgaaaggtttgccgcggcattttcgcaaatttccgccgccgcgggcacggttccttcgggatagatcgacgccaagcgcaggagcgcctccattcggcgcgggcccgcgcctgcttccgctatgtcgcccacgctgagcgccagcgagaaggaaaccacgtccgccgcgctgccgcccaggggaacggcgctttcccaggcggccttttcgcgcgcctccgcttcccgccgcgccgcctcgatttccgcttccgtcgcctcctggccgtcctcgcgcagcaaaatcacgccgatggccccggggcggtacgggcccttgccatagctctgcgccagcttcaagctgcccgcggcgctatcgccgaaaaccacttccaccacgcgttacgcctccggcatttccgccacgcacgcgcggattttggccatgatttccgcgtccgcgcccacgggagagaaggggctgaccacgccggatagcgttttgagccacagcagcgccagcgccgcgcggccatgcgggatttcgatgtggaagccgtcgcggcacagagaacccaacccttgcgcgcgcaggcgctgcaccagttcgccgctgcgaatcaggggcaaacccagctcccgcgccgcctctccataggccgccttcaggcaggcgaacatttcgctctggctgtggtggtatctcacaaaggcctcgtgcgtgctgtcctctgcgtaagcccaggtctggtgcaaaaactgccgcgcgccgggcgcgagttccttcgcgtaagcgctcagctcgcgcaggtaagggaaataggtctccttgaggccgctatcgtggctggcctgctggaaggtgaccacgtcccacgcgcgctccgtcagcgcctcgcgcagcgaaaccaatcccatgcccacgccgttcttctcatagtgataggcgcgcaagtcgccctgcatgttctcccaatgcgtctttaggctgcaaccgccgatgtacaggttcaccaccagcgtttccacgcccgccgcctccgcggccatgtgcaggtacgccgtggcgtcctgcgaaaagctattgccaatcgccaaaatggatagcataaccattcctccctcatgttgtcctcatccgctgggcttcagtataccacaatctgccgcgggtgtacagcgcgccgggcaaattttgcgctgcaaacgctggacgggcgggactatatatgctatactgcattataaaaccatatgcgggaggttcgccatgaagctgcgaaaaatgctgggaaagatggattcgccggaatgccaggccctgatgcgccaaatggaaacgcaaagcaagcaaacgctagccgcctgggccgtggcctatgccaaagaacggtatttgcccctgtatcaaagcgcatacccggcggaggagcggctccccgccgcgctggaggcgtgcgcggcttgcctgcgcggcgaaggcgcgccagccgagggaaaagccgcgcagaaagccctgcggcaaatcgccagcgaaacagaagggcctgtggcgcaagccgcggcccgcgccatcgcgaccgcctgcgcggcggtgcaaacgcccaccaacgcctttggatttttgctctatggcgcggcggcgttcgcctatcacagcgccggcgtccgctctagccaggccgtgtatgacccattggccacagaagaattggcgcgcgcactcgcgtcgctgcgcgccgccagcgtacccggcgaacttaatcccgcaaccctccgctggaattgctaaccggccgaaggattgtcctcacgcgtctcgcgaggaatccagccggaaaagcgcgtgcggccatttttgctttccaattccagctgcccgccatactgctcgaggatttcccgcacgatggcaaggcccatgccatgcccttctcccttggtggagaacccggcctcaaagatgcgttcgcgcagttccgcgggcacatccgggccggtattttccacggcgaagcggtagccctgctcgtcctcgcccagcaggatgccaatttcccggttttccccctggcgcgtggcgtcggcggcgttgtcgatcaaattgcccagcacgcggcacatttcccagccgggcacgggcaggtcgcgccaggcggacgtgatggccacctgcgcgtggatgccgtcttcttccaaatcgttcagcttggcggccagcagcgcgttcaccgcgggcacagcggttttgagcgcgcggcccaccagttcgatatcgccgtgcaatttttcgatgtattcgcgagcagcgttcccctcgcccatttcaatcaaggcgaagatcacctgcaaatggttcataaaatcgtgccgctgggcgcgcagcgtgcggttgagcgcctcgagctggccataggcctgctccagcatatcgctttcatcggcaaccttgcgggcatagtgcgcgtcgcgaatatcgacaaccgcgccccaaacgacgatggccgccatcacgcccaccaccgcttgctccaccgcgccattgagcacctgatcgccgcgcaataccacgatcaagccaatggcccctgccagcaaaatttggatggaattgatcacgatggaaaaccacgttgccttattgagattgatctttttgcgcattttctgcccccacaaagtgaaagttggctgaccgcggcgcggccctgccctaaaattatagcatatgccgcccgaatgcgcaatgcccggcaaacttgcgcgcgaatggagggcggcaaaaaacggcaaacgttcttttgcggccctataactctccctatccggcgtaaaatacttcttggagttggctttcattgcaagcaaattgtaccacaaaaaagaggatttggggccttgcggctcccaatcctcttttgtcgatggcgcttttcccagccccacaaatcgaaaagggcaatcgcttaacgattctgccagcgctcaaactgcgcgtctttgatttccttcgcttccaggatgcccatatcttccaactgggcgatgaaggcgtcgaaatctccctcggtgttgagcgtgccgttcacaaacagcggcaactggctatcgacgtacttggtgatgtccgtcatgatattggccagttccgtctcctcttccggcgtgccagcaagaacgggctgcgcaggcgtgacgctatcagcggtgttggcggcaatcatcgtcacatattctggcaatacgcccagccagccttcccattcggagacgtgcaggaaagtcacaggattgatgccgaactgccgtctgccgtccagcgggccggcggaactttccataatttcaggcacgaactgcttctcgccgtccaccacattgtacgttacgccttccacgccccaggtgaagaggttgcggccctcctcgctgaagatgtaatcgcacatctcgatgaccttatccagcacttcggaatgcgcgttgatatagtagcggttggtcacagggttgcaaccaaaccagccgctatagccctcgggcccttccaaaggatccacataggaatagttcacacccagcgtgccgccttcgatcagccgcgacgcgtcgtccgcccaggcatagaaatacccagcctggttgttgctaatcagcgcattgatggaatcatcgtcccgcgtgagatactggttatccagcaagccttccgtgtacagcttgttcaggtaggcgaggcaggcgcgcatttcttccgcgtggtcataggggccatattccatgccgtcctcttcattgaacatgcgccacgtcggccaggtgttgaaggcgaaatagaaattgtgcagtttatccgaccagggacccatgatcagcgggatgcaatcttcgcccttgttctccttgaacgccttgagcacttcatagagttcatccgtgtttgtggggatttccaggcccaattcatccagccagtcctgattgatccaatcgatctcccacatggctacggagccctccagcttgggaatgaaccacaacttgccatcgtccgaagtgatgtccttcagggcgccatacgcctgcacctgctcatagacgttgggcatcctttccggcatgatttctgtgagctccaggaaaatgcccgtatccagatagggattcaccaattccgccgtgcccagcatgatgtccggataatcgccgccggcgagcatcaaattgaacttttccgcgtaatcctctgcgctagcggtcgaaatgttcaactccagatggatgttcagtgcctcttccaaggcctgaatggtgagcgtttcattggtcaaagcggcgttgacaaattccgtggtcataaattcaatggtgacaggctcctcttcggccagcgaaatcccgcccagccccgcgagcgcaaaaaccagcgcgagtaccagagacaacttcttcatggattttacctccttatcctccgcaaatctattttcgattctctctgcaagcgatgccattccctgcgcctggcgttcgccaccacctcccatcccggcatacaggaaacgccctatccctttacagcgccaaccataactcccttgacaaaatacctttgaataaacggatacaccaccagcagcggcgccatggcgatcaccatgatcgcacacttaaagcccagcgatgacacggaattctttgcctcgcgcagcatttgctggttgagcgttttatcgtcgttgctcaccaggatatcgcgcaaaatcaattgcaacggatacttctcgcggtcgttgagatatatcagggcgttgaaccaatcgttccacttggccacgaaatacaatagcacaactgtcatcacggacgccatacacatcggcaaaatgatccttaccaggataatccagtcgttcgcgccatcgatcttggcgctttcctcaatcgcgtcgggaattccctgcatgctcgtgcgcaaaagaatcaggttaaatggcgtcaccgcgcacgggaacaccagcgcccaaagggtgttgatcaacttcaaatcccgtaccaccaaaaaggtggggatcaggccgccgccaaagagcatggtgaaggcgatgatcagcatgaagaaatcccgaaatggcaaatagctgcgcgaaagcggatacgcacccaaaatggtgagtagcaccgaatacgccgtgcccaataccgtatatagaatggtattgccataggagggcaacacatactcgtgctcaaaaaccaactgatacgatcttagcgttacatccacaggccacagccacacttcctggtgcagcaacgcttctgcgccgctgaaggaactcgatatggcataaatcaccgggtagagaaaaattgccgaaaggacgatcataatcgcgtatacgccggtatcaaacagcgcgtccgtgcggctgcgaatgatgcggtcggacatcgaacccctccccttattataaaattagaagatatacgtctccgagtacttcttgctcagttggttggccgttaccaccatcgcaaagccgatgacggactggaacaggcccacggctgtggaatagccataatccgccttgataatgccccgcttataaacgaaggtctggatcacttcggagacaccctccgtgagcggattttggagcagcaaaatttcctgccagctcacgctcaaaatatttcccacgcgcatgatcagaaggatgataatggtggagcggatgcctggcagcgtgatgtgccaaatgcgggaaaagcgccccgcgccatccaccaccgccgcttcgtagagatcctggctcaccgcgctgatggccgccaaatacagaaccgcgtcaaagccaatccagcgccacaagcccataatctgataaattgtgaagaaataccgcggttcgcccagaaaatagatggattcgccgccaaagctctgcacgatctgattgacaattccccggtcttccagcaaaacttgcaccaggccgacgacgaccactgccgacaggaaataaggcaaataagaaatcgtttgaaataccgttttcgccctgtgattttgcacctcattcaaaaccagcgcaaaaaagatgggaaagggaaagccaattgcaatggatagaagactgatgcgcagcgtgttccccagcacttcccaaaaataataggaactgaaaaagttcacaaaatgctccaacccgatccacggactcgcgccagcgcccaacacgatattgtagcgcttgaaagcgatctgcaggccatacatgggccaataatgaaaaatcacaaaattggctaggcagggaagcagcatcaaatacagccatttgcaattgaacaattttctggccaagggttcttcccagcgctttcggcgctttgctgcgcctgtccacgcgaaagctgctcgcatattcccatcgctcctttctggacttcgctttgtgatgttaattctatcagcagattattcgaatttctatacacacaataaaaattgatggacgatttacagcccttatttttgtcccatcgcgcgaacctgccgagcaacgccattttttcccgccgtgcgtacattttcctttcaaaataatatgtcctccaattttgcgcgaacggcgaatttttgttctggctgattaggattctctgcgattcctcatgcgaacctctggtgaaatattgcttttttgccagccaatgccattctccggtttgcgagaaaatgttctgtaaattatccatctatatgttaataatgcatttatttttgcccggcaaacgattataatagcgagtgaaagcataggaggtttgccgccatgggatatacacggatgacgtttttgcaattccatcgcctcatccactcgcattccatgtcgcaaagcgactatcgctacagcctaagcagctatggtttcggttgctatggaacgggcacgcgcttgggcggggtgctggaaatcggctttgtggaagaaaatcccctggtcttccattttcctgagctcggggagcgcctcaccgtccaagtggacgacatcttcatcattccacccaaccaccgtctggaagtttccacgctgcatcccggcgagcacaagcacacttccgtggaattcctcatcgattgcaccacggagtgcctgcgccagaagaccctttccgcgcaggattgcgaaagcatccgcggccaaaccgtgattttgccctatgtgatcccggcttctaaggaaaacgcggaattgatcgcgctgattcgccaactggcgcgcgaccagatgctgatggtggaaaagaaccactttgaggagtgcctggcctgcatgcggattctggccttcatcgccgcgcgcatgcgccaaagcaccggcgatgacgcgatcccgccttcttaccaccggtattgccagaaggccaaggagtatatttcccagcacatggaggagcacatctccgtgagcgagatcgcggactttgtgggcgtcaacaaaaactacctcacgaacatcttctccagttgcgaaaaaattggcatcgccgaatacatcaaccgcgtgaagctcaaccgcatgaaggagttgatcgtcaagtacaactattccatcaaaaaggccagcgaggccgtgggattccaagacgtgaattacgtcagccgcattttcaaaaagtactttggcatcaccatcagcgaataccgccggatgctcatctcgtagtccaaaccggctgcggcctgacggacaccgtcccataacaaataacaagtagaatccgccctggcggacagaggtgtgtacagccatgcaaacgctcattacccatgccaccctggtgatggaagaccattattgcccggacgcctttctttggatccgcgatggcaaaatcgccgatttcggccccatgcggcaagcgggcgtggcggggagcgccccgcgcctcaacgtccaaggcgcgctggtagggccggggctgatcgacattcacacgcacgcgggcggcaacgttttctttcaggacaatcctgccgcggcctcccgggcgctgctggaacacggcgtgacgggtgtgctgcccgcgctgtacatgaccttgagcaagcgcgaatatttcgcagccctggacgccatcgacgctgcccgcgaagcgggccagtgcgacaacattctgggctattacatggaagggccgtatctcaacccgctttacggttgcaacaaggaaagctatccctggggcgaggagattcgcccggaggattatctctccctgatcgaccgggtgcgcggcagcgccatggtgtgggcactggccccagagcgcaagggcattgtggaattcgctcgcgacgttgcgcagaaaatctccggcatcgtgctctccgtggcgcacagcgaggccacgccccagcaaatcgccgcgctcatgccctatggcctgcggctgggcacccaccataccaacgccaccggcaccttaaacaaataccccgagtgccgcggcgtttgcgtggacgaggccgtgaattactacgacggcatctatgccgagctgattgtggacgcgcacggcattcacgtggatccctttatgctgcggttggtgcgcaaaatcaagggcgacgcgcgcattgtgctgatttcggacgcctttgtgagcgacggccccactccgcccggctatgacggcgtcacggacatcaattttgattccaccggggaaatcgccggcacgcgcctcacgctggacgccgtgtgccggaacatgatgcttcacaccggctgttcgcccgtggacgttttccgctttgccgccaccaacccggcaaacctgctccaccggcccgatctggggcgcatcgcgcgcggcgcgcaggccaatttggtggtcgtcgatccctggctgcacgtcaagcacgtatttttgaaaggagaactatttgtatgaaggacattcttttcgatccccccaccgattttgctttccaacccgcggatttcgtgccgttcaaagaccgcgcgctgtgcgagcgcctgcgcaaactcagcggaaaagatctggaaaagcaccccaacccggatttccagatcaaagtgatgatgaacccgcacccggtgctgatcgccaccctgttcgcgcgcatccgcgaagctgcgcagaacggccgcaaactcaccatgatcctcggcaatccggagccggaaacctatattcccctggcgcagctcatcaactatttccaggtggactgccgcaacgtacacattttcgccatggacgaatgggccgacgaccagggaaacatcgcccctgaaacctacaaggcgggttttgcgcactccatgctgaaatacttggtgtaccaaatcgaggaaaaattgcgcatgccgctggaaaacgtccattatcccaccaacaaaaatatttccgtctattccaaaatgatcaccgagtgcggcgagggcggcgcggatatctgctcttcttcgcccggctggacgggccacatggcctttatcgacccggtggacgatttcatccgccccaccatggaagagtatttgcagcaggaggcccgcatcgtcacgctacatcctctgaccatcgcgcaaaattcgctgcacggggtctttgggcaatccggttacgtggcggatgtgcccccgaaggccgctaccatcgggccggtggacgtgcgcaacgcgcgcgaacgcatcgaagtccatgccctgctcaccaacaacaccttctcttcctggcagcgcatgacctcccgcctggtgctgcacggccccgtaaccccgctggtgcccagctctatgctgcaattgatgaaaacccaagtgtatgtcagcgaggaaatcgccgcgccctttgaatgctgggaaaaggtagggtattaatgcgaagtggacgggggagcaagctatccacaattcgcaatggtcggttcgctgcgctcgcagagctcgcttgcggccctcccttgcttattgggcttacttcgcgctgcttcgcccacagggcgcgcgcttcgtgcgcccccc

SEQ ID NO: 3549 - DNA, 5948 bp, Unknown
  16S sequences of unknown bacteria
ttttcctccccccgccccccctcttttcaagaaactttcatacatgggcaaagcgcctcggatgaagacagaggaggggcgcaggggatattaaaattaatgcgttatcagaaataactgacttttactcgtttgcccatctgacgcaggcatttcgagagatcctcaaccaggttcatcttaatgctgaaattgatcggcagatccgggttctggtgcgcggggtttatcgcgcgtccgacgaagaaattgatgtcggtcgcctcctcgaacagcatacggcagataagcgacgcgccgtcacgctttatgctccagtgctcatacgacttgttctcgccgagataatccctcgcgtactgaagcaccttattcaccgtgatgacgccctcggtcacaagatccactccctcaagctccgctgtgggaggtatctccggatcgtcaaaattcaggctcgcgcggatcggcttcccgaggtacttcgcagcgatcgatgaagtggttccgccgcaaacgatatgctttcccgcctttgagaagaacagcgacatcatccggtcgcagtcatcccggttcgacggcggtccgaaaaggatattcatcggctcacgcttccggatacggataacacaggacgtcgcgtcgtcccccggctcgttgttgtaaagccggtcgcactcgtcaacaagaattgtcgacagcgttttcgccgtatacccgacgtccgcgaaggtctccatgaacgagatgatatcctcccgcttccagccgaaatcgtacacattcccgatcccggcgtgcgggcatccgtcgctcatcagaatgaagatatccttctccgtgagctttatctcggacttatatatcttcttcccgccgatattcatctcggtgcgcggataatcgtaattcttcccgtcccggagcagtatcgtctgcgggttgtcgtactcgatgagctccgcctcagtgttgttcacgaggtgcaggatagtgaacgtcgaatacgcgacgccgcgcaccgagcatatcggaagcgtcgccgcgatcgtctcgacgcagtcctcaagggacagcccctcgctcatcatcgttgagattatcttcgaggtcagcgtcgagagtatgctcgccttgacgccgctgccaaggccgtccgcgaggacaatgacggtcgagttctcgccctgctcgacgatatcaacatggtcgccgcagagctgctcgccgtaatgattcacgcttttatagccgatatcggcgcagagatcattcatcgcttatcgactccttgagcttcgttaaggctatcttcgtctccgccgcggtctctccgagcagcgacgctatctcctggacaatccgcatctgcttgtcgaccaccttgtcggcgatctcgacagtctggcggctgatcgattccttcttctcgcgctcgttctcctcgtcggtgatgtcgcgcattatgcagacaagcaggttgtaggtgccgtcgtagatgaccgattcctcgatgtacttcttgtactccgcgaggtaaacgcgctggtcgcgcacgcttcgcttcgtgttcagcacctgtacgaacagctgggggtcgaggatacgcacgacctgatcgccgagaatgtcagaggcgctgcggatattcatgattcttctcgccgcgtcgtttatctgctgaacctcgagattttcgttgagcacgataagcccgttcggcgtgttcgagacgatgcagtcggagaagctctccgccttctccttgaggtagggaagacacatcgatatctccgccttgccctgatagatcgcgaccgccttctcgcggcaggtattgtatccgcaggagccgcagttcagctcgtcctcggggcgcagcttgcccatcttcttgagtatctccgcgatctcgatgtcggtcgggaccggaagcttgtgctctatcgggatgaagtgcttgcggactgtcaccgggtccggctgcgcgacgtcgaagtcgcgctttccggcgtaattcgataccgccatgtagtccttgaccggcgagcggtgatatttctccatgaccgggccgccgacgcagcttccggagcaggcggacatctcgatgaaacagcggtggatctttccgctctcgatgtctctcagtgcctcgatgcagttctcgacgccgtctatcgcgaggtaagtgtatccgggtatgtccttcgtcatcgtcttgaggattccgccggtcgtcgggaagaagcgcgcgcggctctccggagtcacgtcgatgttcttctcgagagtgattccctcttcctcgagccactttgtcagctcctcaaaggtgagcacggcgtcgacgacgccctcgtaatactccgcctcgtccttcttcgagacgcagggacctatgaacacgcacttcgcgcccggatttctcttttttatatcctgacagtgcgcgagcataggggacatcacgtccgcgaggtagggcagctcggcggggaagtacttctggatgaggagattgaccgagtggcagcaggacgagatcagcacgtcgcagttgtcctccgagagcatcctctcatactcgttctttacgattgtcgctccgaccgcggtctcctcgacaccggcgaagccgagcttttcgagcgccgcgcgcatcggcgcgattccgacgccgtcgtagttcgcgatgaaggacggcgcgaggctgacccagacaggggctccggaagcgaggagaaccttcgccttttcggtctcgttgacgatctccttcgcgtcctgcggacatacgacgaagcactgtccgcagagtatgcactcgttcccgatgatgtgcgcctggttcgcggagaaccttatcgacttcaccggacagtggcggatacatttatagcagttcttgcagtttgatttcttcagtgtcagacagtttgccattttctataccatgcctttcggatttggtcttatttgacttatttcgatattctgccgcgcgaaaaagccgcgcggtaaagggttgcggttataaggtaaaatggttattgccggtgattattcgtcggctttcatcgccgggacgatcttgtcgttccagaaggcgtcgaagccctccggcgtcactcccgtgtaaacgtcgtcgccgacagtgacggtcacgccgtcacggttgcatctcccggcgcagagcgtgccggtaagcgctatcctgtcctcgcaggaattgtcctttatgtatttctgaagcagtcttacgatctcgggggcacctttgagatggcaggagctgccgatgcaaatctgaatcgtgatcataattccatgacgtcctttctctgacgctcgttacttcagcgcgggaagcactacggtgtcgaagaattcgtcaaccttatccgagtcgaccgagtggaactctccgtcaaccgtgacgcagacgccgtccttacatctgcccatgcagaaggttccgccgagctcgacgcggtctgcgagacccttttcggcgatgagttcctgaaggcgctcgacgacctgacgcgagcccttgatatgacatgaacttccgatacatacgatgatcttcatttgagttacctttacagaacgcgttgtcagcgtctgcccttaaaaattaatattccggcgtctgtgacgccattatttcgaaaacctgtaattccgcgcgatctcatgacagaaggcgcgctccgacatatagccgtccatcgcctccgcggcggcgattatcggtatccattcgtggacggcgtccgcagactttccggtcataccgctccacaccctgacataatcgtcggcgcccgccgggtcgccgtttatcatgaacctcagccacgtcttcgcggcgtccgcctccgggtttccctgcgacgcgcgggaccagtcgagaatccagatctccccgtcctcgccgaggatcaggttctccggctcgaagtctccgtggcacagcctctcggtctgcggcatcgcctcgagacgtgagatgagatcatatctcagcgtcgcctcgaggtcggtcagcggcagcttccggcgtatccggtcgcgcagcttcacgagcggcgggcaggtcttctcctgcaccgagagctgagtcttcacgaagagctccatatagcgcgctctctgtccgggatcctcacgcatcagcctgtcgagcgtttttcccgggatataatcggtgatgatcgtgaagcagccgtcgatcggtctgacctcacgcagctccggaaccctcacgccgatctccgcgaccctcgcgaggttcagcgcctcgctgaggacgccagcgcgcgagtaggtgcggtcgaagaccttgagacacatgtctccgtcgcgccagaccgttttgttcgttctgacggcgatcatcctgtcgagcttcatctgccgctttcctccttaagaataaaatgttatgacgcggcaacacagttgttaaaagtataacacaaaaatgccgctttgtaaagaccggttttgacatagccgcatatcataaaccgcataactggttatttcctgttttcgtcgaacacctcccgcttcacccggcagagctcggagataaaaagcttgtccggctcggcgaggcggtaatcggtctcgtggatcatgacgtccttgaagaggcgtcggtcgtcctcgcactctcgcgtctcgagtccgtatttcccgagcgtttcccgcggaaccggggaaacccacatataggtcgtcgggtccttctcgaggatcgagaactggctcgcgcgctcatataccacgatgctccgcgacggctcgccgtcgctctcgtcctttttctggtccgggagagagaagggctgcgccgggtccgcgtgagttatcatggtgagctcgcggaggtcggaggtgtaaatccgctcttttcccgccagcgggctgttctttgagaagatgagaaggtatctgaactcacagatgagctcgtagtcgagccgcttgtcctcgagcagagatttatagtacctgtcatgcgccgccggatagcggattataccgagtctgaaatcatcctgcaaaacgcgtctgacggcgtcggtctcaccgcactcgcggtagcgtatcctcgcctccccgtcctgcttcataagcccgacgaaagacgcgaacgcctcgccgatatagcttgccgccggagccgcgagcgagaagcgcagagcggaccgcccgctcttgaacagtccctcgaccgcgtcgacctgcttcaggatcgatttcgcgtagccgaggaatatctcgccgtccggggtgatctccattcccttagacgatcttccgaagatggtgactccgagcgaggactcgagctcctttatggcgcggctcagattcggctggccgatatataatttttcggcggccttgtttatcgagccgcaggcggcgacctcgaccgcgtatttgagatagagcaggttcattcctgatgaccatacctttcgcgagagtactgatttggcgctatgcgtaacgaggcatatccacacacaatatattatataacatttcccgtgaattttcaatacgtaaattaaaaataatgcgaaaaaaccgcgaaaattttcacacgcgtatatttttaagggcaaaattcagaaaacacttgacaaaccggcgggaatacggtataattgtatcagggcggatgtctcctgacctgttcgcggagcggagggaaaggtgatattccggaaatcgcccgatagctatatcatatccgacataaggtaaggaaacgatccgagtgacaggagagaggcagaatatacttttaccgaggatttatagtccccggcgtgtgtttgtatctttgaccgcttttccgttcaccggagggcggttttttcgcgtctgacgggcgcccgaataaacgaaaaagaagg

SEQ ID NO: 3550 - DNA, 10655 bp, Unknown
  16S sequences of unknown bacteria
ggctccctcatcgcgtatctggcagtcgccgcggaaagccgtccgttcaaccataaggctgtcgtcgcgccgaccgtgagacatgtcatcacacgccgcgctgtatcgggcgcgcccgggatttcctactatttattttcagaaccctgctcgggaatgtattcgcatgatccccgccgtggtcctttcaccgcccggaccctctctgcgcggcaaagagaaaaagctacttctttccgtcatcgcgtttcaactattactaccattataccacaccgcgccgcgaaaagcaaggggttcacagtttttttacaactattgactcattttgccttgagtaaacactgaccaaatcgggttttcgcagaaaaaaggcttggatttatgggcttttttctgcgaaaacaaccttaaatcagtgtttacttcgagagagcgtctttcacggcgttcatgatgcccttagagctgtatgtcgcgccggacacgacgtcgacgctgtccgactgcttgtcgatgatgctgtccgtgaccttcttctccgcctgctcgaagtaccacgggtcctcttcctccgacttcgcgtcgatcgagacgatctttccgccctcaatcttcaccgtgaccgtaatgtcgccgtcgtagccgtaagccgtgccggtgtagctgccgtccttgtagccggtcgacgaagcggtcgtttcgggggcttttgtggtctccggcgctttcgttgtctcggtttccttcgtcgtttccggagcctttgtggtctcgggagcggctgtcgttccggcggttgtttcgggcgtcttttcggtttcgggagctgttgtgtctgatgtttcaggggcttttgtggtcactgacgaagcggttgtctccggggcttttgtcgtctctccgtgctttttggtttccggtgattttgtcgtttcggcgtcggtcgtctcggtcggggttgtctccggctcgcctgttgtcgtgtcgtcggtccgcggctcatccgtggtggtgtcgggcaggtcggattcggtcgtatcgtaatcggtctccggaaccgtgtcctctgtctcctccggaatcacgtccccggtgctctcagggacgctgatgtcctccggctccttcgccgcgctcttcgcgggggacatgactatgaaaacgacgatcacagccgcgagcgcagccgcgcagccagtgacggaatacccgcggcgcttgtccggcttcttcttcgagagcgccttcgcgattcgcattcccgcgtagccgagaaaaacgacgctgtacgcggcaacgcttatccgcgccggcatcctccccgccctcgcctgcgagctcagaagtatcatcacatggacgtacatgagcccgtagaaggcgtaggcgagccgctggacgcgcttccatgtcttcgccttcatcttcttcctgacgctcttaaaggacatcacggtgagcggaatcattatgaggagcattattatggatatcgtccctgccgcaaactgcgcgggcttcatcgaggacggagaggtgaacatcctgacaaaatacgtccgaccgaagccgatgttgtgcccgagggtcagtatagccgtgaagatcgacagctcgcccctgaccggcataagagctttcacgggcttcgaaccgttcggtagcgcgccgagccacatgatgacgacccagaacccggcggcaagcgcgccgcggctgaacagcccgatcacataattcctgacgaacggcgaagcccacgagaagtccatgaccgacacgagcgccgttatgaccgccgccgcaacataaaacggcgccggatgctttttgagaggaccgcggagaagatacgagagcgccgccgcgatcagaaccgaaatgataaagagcatctgtttcttttccttttctattcatgaaaagccgccggagggcgccgcgacgaatatcgctgccctccggcgtacccgtttttattttattacgatcttacagtccgagcataccgacgagcagaatgtcgatgatgccgggatagctcttcttcacggctatctcgccgttcttgacattgatctcaaaggtaacagtctgggtgtagccggtcgcagtgactgtgacggtgtgagttccgtcagcgaaaatcgcgttctcgccctgctttgcggcgaggtcgagccgaccgtcagagccgacgatcttcacggcgcgctttccggaagcggcgtaggacgtttcgtccacggtcacggtcgcgatcttcgagaggaattcagcgaaatcagccgtatccgcgcccttcgcagtgacgatcttctcgccgtcaaactcagcgggcatctcatcggtcgtgagcgtgaaagacgcgctgacagaagcgtacttgccgcccttgtcggtcgcagtgagcgtgtaagcgcccggagccgcgtttgtgtaggagagaacgccgtcagcgacagaagcctcaagcccgtcgacagaatactcagagtcataatcctccgggaaaccggtcatcgtgaccgcggtcttgccgacggtgatgtccgcgtcggcgacggcgagcgtgttctcaaacttctcgggaacgtagatatcagtcttaacggtgtggtatccggtctcggttatgtaaacgatttcagaaatggtcttgcccgggagggtagcgtaattctcatacgcgagcgcgtttccgtgaacttccttcgtgttgaagccggaagaccacgcgatcttgtcccgccagatgttctcgaggtggcgcatagcgtaaacgccgccgtcggtcgtcttcaggagcacgccgtagatggttccgagagaggacttgccgttcgcgttgtcaagccccttcgcgtcgatctggtagtcgccgtagcgggagctgtcgctgagggtgagaacgatattgtcaacgtcctcggacgcgccctcgaccgcggagaaaaccacctcgccgtcgacaactgagacggtcttgtacgcctcgggaacgctgtccgtctcggtgaacgaatacttttcatctatcgaagcaacggcgtccttcggaacagcgacagggtaaacgacgccgtcgatgactccgcccttctccgcctcgtgcgaataggttccgccgacgaggttctcgttcttccacttagaggcggtagccgacgtcacgacgtcgacgtcataatccacgccctcgccgcggtagaactccgcgtaggggatcgtcatcgttccgtagaccatctcagtcgtgtcgtcagccgcgacggcgaccggaagcgcgcccgcgaccatcagcgccgcgagagcgatcgaaagtttcttttcagccttcattctgtttgtttcccttcattcatcaacattttgccgtcagcctcgccgcgcgaaaagttaccctctgctaaccaagtgcctgaaaaacagaccctccgccgggtctttcatcacgttagctaccgctaactacaataattataccatcacaggctcgttttgtcaagtaccgcgcggggaaaaaccgaatttcagcgtttttattactccgcgcccctccgcggatgatttttttgcccaaaaaaacagagacgcccgtccggacgcctccgttattcgtttttaagacggtctcacgacacctcgtccgtgacagcgggaccgataccccggacctttcatggagccgcgcatagcagcccccgcgcttcatccgaacgatacgcacctgccgtaagttccgcgccccgggaaccttatcagttgtcggctctctgctgcttcatctcagcgtagcactcgctgcaatagacaggtctgtcgctggtgggctggaacgggaccttagcttccttgccgcatctcgcgcaggttgtggtgtaaagctctcttgccggcttcgcggtgttctttctcgcgtcgcggcaagccttacatctctgcggcttgttctggaagcctttctctgcatagaattcctgctcgcctgcggtaaatacgaactcagcgccgcaatccttacagatcaatttttcgtcctggtacattgtttttttcctcgcttgtgtataaagaaattttttgccctcgacggattccaaccgacacctttgatacataaaatggcacaacgctctctgttaagctatacgggcatatatgacggaacatatatatgttccgttattcacttttctgcggctcgccggactccttccggctgcggtttctcctcgcgacgctctcgtttttgccgtgcgtcggcgcggcgcgctttttcggcttcggcgtaattttcccgctgagcttctcctttatcctgaccttcgcgttatacaccgacttcaccgggcgtccgagctccgacgaaatctcggcgcagctctttcccgcgcggatcatcgagtacaccttccgctcgtacgcggacagcagccccggctcctcagcccttgcggagagagcctcaagctcgccggaacgaccgtcggacgacccgccgtagttcccggtcttctcgttctcgcgcgccctctgctcggccctgagccgtctcgcgcgctccctcgccctgctcctcagacaattcgtcagacagatcttgaggtagagtccgaaggtgacctcgctctgcttctggtcaaaggtattcgccacgcggtgaagcgtcatcagcatctcctgcatgaggtccggcagctcgtccggagaaagacgtccgccgtcgatgaactccgacgcgagcttatacatcagcggctgataccgcctcgccagctccgcgaagccgtcgtcgctgttcatctttgtcaggtgaatgagctgtttctcggttttcgttatcatatccgaattatttttcaacccgcacccccgctcattctgagcctactattattataccattatttaaaaaaatgtcaataggttttgaacgattctcatcccgcaatcgtccgacctttattgacaatacacatcatatacaagtccgttttatgcacaataacggaacttttccacattttcgcaaaaaccgccgttatcgtgcataatttgaacacctgttttttgtgcacatatcacaatatcaaattcagaataccccatgaagacgccctcgtgacatggtacacgacgaaattctttattaaaaattgttccgtatcaatcgagaagataattaatatctccggtcagcagagaaatgatcccccggtagacgacctccggcttgcggtcgaagttcgtcatcatccggtcgagctgatatttcgagtcgacgacgaccttcagctccatcaccggaccgcccttctctattatctcgcacttcagatcgtatcttccgtcctctctcgcctcgccccggcacttcacatccgacccgcgcgacttgaacgaaaggagccgcatcgcgctgcggagactcttctcgcgtatcataccgagaatgttcgactgcaactgctcggcgacgagcctgccgttcggcgttatcctgtagaggtcgttcggctccgcgtgaatgatctcgatgttgccgcagtcgacgagctccgcgaagcactccgcgaaatcgaaatacccgacgaagtcatcctgcacgacaatatcgcttatcgtgttgaaatccagcggatacccgacactgccgagaagatatagtatgaatatcttgatatcgttcttatccttgagcggtgcctgcatgacttccctcctgttattcaaagcgggcaaatgccgcagcatctgcccgcaaagatgtttgattttactcagcggcggcagccgtggtttcagccgcggtggtctcgctgtagcttcgccagtccttcatcttgagcttgtcgaagttcctgaagccgtagtaagtggtcttgatgcccgagagcacgccggaattgtagacatacgcatcctggttgaagataaccgggattatcggcatctcttccatgaggatcttctctgcgtcgtgcaggtagctcgagcgagcggcgcggtcggtttcggcgtaagccttctcgatcagatcgttgtaagcgtcgttcgaccagcccgggacgtacgggacagcgtcgtaattttcgttttcaaggtcaatacccttgccggagaagtccggatcgaacacggcgagagcggagaaagcgtcagtggaaatggactgatagtcaacagcgataacgtcatagttgcccttctcgtacgcagccttataggaagacgcgtcgagagcgtcaatcgtcaccgagtagcccatgccctcccatacgctcttcgcgtactcggcgagagcgacgtcggaggcgttgtcgcggacggtaagagtgaatctgccgctgccgctgccggaagaggcggaagtcgagatgaggtcgccgccgttggcgcggaagctgtcgccgaccgacttgtcatagacagtggacggaacaagaccggtagccggctttgcgaaggtcacgatctcagccatcttgtttctgtcgagagcctgagacatagcgacacggacagacgcgtccttgaaggtcgagttcgtggtgttgaacatatagcagtgagtcgagagcagatcctgcacctttgcctcggaagcgtaggaagagcgcttcgagagaccgatctcaccgaggtagaagatgtttccgttctcgtaatcggtggtctgctcgtcctcgttcttcgagaaatcgacaagcagtctgtacggaaggacgtacttgtcaagcgcgtcgttctcggtatcgcggtagtaataaacgttgcggtcgagctgaagcaccttgcccgccttgaggtcctttatagcgaacggaccgttggtgcacagagaagtgaccgccttaccgaaggaacccatctccttctcgtaacgggtgacgatgtcctctctcagcggaacgagagcgaggcaggcgagattctcgaggaatctgtcataatcgatcttctgctcgaactgaacctcgatgacggtgctgtcgacagccgcgactccgaggtcgtcgacagagttgtcgccgttcttgacgtcgcgcgcgttctttatgtcaaagagaagagccgccgcggaacatgtgaaatccgggttcaggatgcgcttccacgcgtagacgaaatcgtcagcggagacggcgcgtccgtcgctccacttcgagtcctttatggtgatttccatcttgtactcgttcttgtcgggtttctcgatgatcttgtagctcttcatcatcgcgttctcgaccttgcccttgtcgtttatgcgggtaagaccctcatagatgagaccgagcaccttaacggcgctgtcgtctgtgtacgcgagcgcggggtcgtagtcagagatctcgtttccgatatacacgttgacgatcgctcccttttcgtcccccttgagcgtagagccgcagccggcgagcgaggttgcgagcacggcggccagcagcagcattgatatgatcttcttcatgataagtgtgactcctcctgaaattttgcccgtgagggcaggatggtgctttacgaaataaagccgggcaggttttccgggtcacgttccgaccctccggtcatggctctattaggatattacatatattatatcatttctttcttatataatcaatcaccaaaatgcaaaaaatccaaagatttatactattgcacaacattgcaattttgttttgtgcattcttcacacagaaaattgccattagtatactatcgcatccatatgattccatttttcttcccgtttggccccaaaaatccccgtttgaatagttagggaataaaactatcgccatccgggcagaattctattgcgcaatttgcacaaaggaacaggaaggtttatcaatgccccataaaggaaaaaagtttacagatcactgtcacaagagttctttccccgccgtccgcaccgacctcgccgccgagctcgacctgaccgaccgagacggcgtcgacgagaggacggaaacccggagcggcttcggcgtctcgacgattaagataaggacaaaatccgccgccgaacgcctcggaaagccgaccggcgaatatataacgatagacatcggaaaaatctggctcgagggcgacgagcgcgtatccgccgccgcgggaatcatcgcgggaaagctcgcgaggctcgcggaggagatgtgcggcgagattcccgaaaggatactgatagccggactcggaaaccggcatataaccgccgacgcgctcggcgacgaggttgtagggatgataaccgtgacaaggcacgtaaaggctaaccgcgagctcttcggccttctcggcggccgtgaaatctccgccatcgcgccgggcgtactcggcgagaccggcatcgagaccgcgaagctcgtcgcgggagccgtgagggcggcgaaaccgcagatagtggtggcggtggacgccctcgccgcgcgctcgacagaccggctcgcgacgacggttcagctcggaagctccgggataagccccggctccggaatcggcggcagaaggctcgcgataaacgaggaaactctcggcgtgcctgtcatagccctcggggtcccgaccgtcgtcgactcgtcgactctcgtcacagacgcgctcgaaaaggcgggaatgaccggaattccggaggagctgcgccatgtcctcgagagcggaaggagcttcttcgtgacgccgaaggagaccgacacgataataaaggagttagcggagctgtcggcaagggcgataacgctcgccttctccggctgatcttcagctatgaatattccgccgcgccgtcgaatagacttgtctcagtatctcttttttcgtgaaaacaggaacgcgaacaaaaaggatggtggcatatggacgagtctttcgtaaaatacacggcgtcgcggcacagaccgcggatactcaggcgggcgctgtccgccgtcacggcgataacgggcgggcttatactgacggcggcgtgcacggcgggcgtcagacaggcggcgaagtcgttctcggtgacgaacatcgcgaagaggtgctttccctacccggagagcagcgtcggctacgacgcggagccgggagaagcggcgggcgagctcgccgaggagatcgcgcgaagccttctctcgtcggctttcttcggcagcgacgcgctgtatttcgacctcgccggcgagaacaccggcacgcttgagctctcgccgaagccctccccggtcgccggaacggaggctccggacgacccgctcgatatgccgtcaatatccggcgcgccgtccggcggagatatcataccggaaggatacgacatctacgcgttcgaccgcgcgtcggtcctgtccggcgaggtcggtctcgtcccttatgatatgtcgtctaaaaagaccggcatgaagtacagcaacgcgacaaagatagatatgtcggaggtcagggctccggacgattacccgataaaggcgtccctgcctgaaagcattcaggtctcatccggaaatatgagcgtcacgccgctcgtcctgatcgtccatacgcacggaaccgaatccttcgctccggagggcgtcacgtcggtgaagcgcggcacgagtatgcgctcgtccgacatttcggagaacatcgtggcggtcgggagcgtcatggcggacatactgaactcctccggaataccgacaattcactgcgagacgatgcacgacatagactcctaccgcgagtcatattccctctccgccgacacggtgaggcgttatctcgcgaaatacccgtcgataaaatatgtcttcgacgtccaccgcgatgccatcgtgacaagcggcggcgactacgtgaaggctgtctgcgaagcgggcggaaggctttccgcgcaggtgatgctcctcgtcgggacgaacgagaagggcgccgaccatccggactggacgaccaacctcgccgtcgccgaggaatggcagagacgcgccgagaaggattcccccggtctcatgcgcccgataaacctgcgcggcgcgtcattcaacgaacagctggcgcccggctcgctgctgatcgaggtcgggagcgccggaaacacgctgtccgaggcgaaatacgccgcggagaggcttacatattccctcgtcgggatgatacgcgacaacgcggaatagctacataccggtctgaaccggataattcccgcgaggtgaaaaaaatgttcaaactgataatgaaagcgatccgccgcgccgtgtgcgatcttgtcgtactgtcggtgctgttcaccgcccttccggtcgcggtcgggaggatgtacccggagagcggcgcggagaaattctcgattgtcgcgtatgaaaaggagacctgcggcggcgccgtactgcgcgtctgcggaataccgataaggctcggcgagagcggcgagcgggtagttgagacatttcgctcactgctcgactcggtgtcgcaggcaaagccggcggcaatcggagaaaacgttgaataagcgcaaaagaacggggctgtcagtcagtcccgttctttatttatatcagccgcggtttatttatcagccgctacagccgccagatcgtcgtacacgaaatccggtctgtcctccggcttcgcgttcccgacgtccttcatagtcgtctcgc

SEQ ID NO: 3551 - DNA, 8932 bp, Unknown
  16S sequences of unknown bacteria
gtctcgttggtaacaaccgggaaaccaagtgcgattgcgcctgcaccgcaagctacaactacgtcatccagcggtttgaatgcgtttacgaatgccggtacacgctcgaaggtgtatttcatcagtgagcctgcatcaccaggttttacgttaccgaagatcagtgctgcacgaagtgcaacagatacaacgtgaataactgctgttacatccttacccagcggtacgatacgtacagcgttgcccatcttcaggcctgcctctacacactgatcgatcactccgcctaccagcgtaaccaggataccctgtgcctgatagctcttaaccagttcaactgcttcttctttgctcggagcacttccaaggataactgcaacgcccgggatatctccggttaccagcggcacacccagctcacggatgatagcatctgcaagatgtccgtaacacggctcgctgtacggttctgcaccgttgatatatttcagaacttcgataaactctgcacacagagctgttgcaacaccgctcatgaatgcatcattcagtcttttttctctggtcataagagtttttacaactccaagagcctcttttaattctccaagattggtaacttttgtaccagttacggcgtagtagcagggaaggctgtaagcagtgttcgggaaagctactgcctgatctgctccgtactgagcaattgctccatcgatggcagcctcagtcagtccatagactgcatcgttgccgccgaatactctatcaaataatgtcacggtattatacctccaaattttaattcgattgatcgaggatttccttgatctttcggatctcctcctttgcagactcgctgacgtcatatggtgacttgccctggcggtctgcgtctatcacttccgggttgtaatggataaatccaagtaaatcttccgccggaatcttcgagcggacaaattcttcatcctctgtgccacgaactttgtttgcgactacgcgaaccttcttcacacccaggtcctcagccagtcgcttgacattcttatatgtctgcacgcttctggcgcctggctcgatcacgacaacaaactgttccatggattcgcatgtaccgcggcccagatgctccagaccagcctccatgtccatgatcaccacatcattgctgcggaggatcagatgattaatgattcgtttcagcattacatgttccgggcaaacacatccgccgccgccggtctcaaccgtgccaagcagcagaagtttcacaccattatagactttactatatgtatcagggatgtcatccacctttgggttcagcttatacatctgattatccgggcccgcacctgtccgctcttcgatgagtcttctcatcttggagatcggagtgatcgaatccagaatctcttccggaaatccaagcgccagtcccagatttgcatctggatccacatcggctgccagaactgtgcgtccctcctctgcatataatcttgcaagggtggctgcaaaggtcgtctttccgactccgccctttccggtaattgctattttcactttctattccctccggtcatcaatttacttttttcatccggattagattccgattgcggttctcttctcttcgatacgctcgatcatcagatcacacagcttatcgatatcggtctcaacagtgtaagcagcctcaacccaatcacgaacgccattggtcagccactcgcccatctcgctggaaccagatacatacggatcaacaccaaggaaggtatcaataccagtagctactacatagtttccgatggaaactgctttctcagacatccactcaggagcacatcctacaaccggaagctgagagatcttaaggccagagtcttttgccagctcagatacaaggatcatcatacggctgatatctacgcaggatcccatatgaagtaccggcgggatatctgccagctcacatactctcttcagacctgcaccacagagatcttttgcagatttatccatcagacctgcttttgcagctgcctgtgcagaacatccggatgctacgactacgatatcgttagcgatcagtttcttcatcatctcgatatgtgcatagtccgggcggatcttcggattgttacatccaaccattgcaactgcaccacggataacaccagatgttacacactcaaggagcggtttggtggttccggttacatctacctggctgttggtaacaccgtcaagtactttcacaagtgcttccagagaatatccaacagttgctttctgcttcatatccgggatatatacaagatccggtttacggttcttgaagttctcacatgcagtcataacgatctgttttgctttctctgctgcggttcctacatcaaaacggatgtaatcggaatccggcatctgagcgatcggagaagttgtgatgaacttggtatggaaacatttgctcagaggtccaagtgccgggaagatacactgaacgtctactacgatagcctcacatgctccagtcaggactacattctcctgctgcaggaagttaccagccatcggaataccacgacgcattgctacttcgttggaagtacagcagacaccagatacggtgattcccttagcgcccatgctctttgcatatgcgatcatctccggatcatctgcatattcacagaccatctcggacagtgacggatcatgtccatgtactacgatgtttacgttctcagcattcataacgccaaggtttgcttcggtgtcaattggcttcggagttccgaacagtacgtcagagaattcagtaccacacatggaaccgccccatccatcagcaagacctgctcttaaggactgacgaaccagtgcttccggctttgatgaacatcccatatgcgtcatatgtaaggaagtagcaacctcacggtcaattgctctcggctcgatctctgcgtcatgccacagcttctgggtatgctccggagctctcttcagccatctctgaacaccaaacggtttaccatattccatcagagccagctctgctatctcatgagccagatcatagatatcttttccttctgtctctacgccccactcttttgcgatgcggatcagtttctcaggatcttttactttgtaagcgccattcggatctgctgcatgcagggtatgacagatctcacgtccatgatcagagtgagtagctgctccaccggcagtaaatttcagatagttacgtcctacgataccatgagcatcacatccgcagattcctctcggagccttcggagtaatacgacaaggtcccattgcacagatacgacagcagataccctgctctccgaatttacaatgcggggtctgattctttacacgaatctgccatgcgtcagcaccgactttcgcgccggtctcaagcagtcggttagtcgctgcttccatctcttcgactgttgttaatttaaagtctcccatataaatctccttttacgcggtcaggtcatctcctttttataattccagaccgtccatgattttgtataacgcctgtctgacaggattgtcttccggaagctgtgtggtcggtgttccggcactgtcaaactcatatacgccttcatcctggggaacgactcccagaagttccaggttttgtttctcaatttcttcccggacgccatcgttcagtactcccttaggagcacggtttacgatcaaaccgatcttcttcggttttaatccacattcaggaaccaaacgggcgatacgtccaaccgcctgaattcccctgcgtgagcaatcgctgaccagaatcaccgtgtcaacgccgggaaggatacctctgctgatatgttccattcctgcttcgttgtccacgaccacataattgtaattctgggcacgtttggcaacctgggcagataacagaccatttacaaaacaataacatccttttccctgtgtatgtcccatcactaacaggtcgtaatcatcttcctccaccagtgcggaatcaaacttaaattcagtatagtcctgtttggacattcctttcggaatcgggctttcattggaaagctctgcatttgacagctcatcgcggatatctcccagtgtcatctccacttctacaccgaggacttcgttcaagttggaatttgcgtctgcatccactgccaggattgggcctttcttctgctcggcaagacgctgaatcatcatgccggtcaatgtagtctttcctacaccgccttttccggctactgcaattgtatatggcataactgtcatctcctaaactagtttacttcttgataatttgttcgaaggcttatgtaccttctctttattaaataaagttatatgagcgggttaccacctccatatggtatattttatgttcacagacagaatcttgtcatccaggcatgctcaggatccagataactatctgcactaacaatcagactgtatacacagcctgattgttgtaacctttcatggagttcaattgtctgcacagttgatctttacaatcgagtttgccaggtccaccatggtaatggcgccttccacagtgatctccatgcccataatatctctgatgcggatggttgttccatctacatcgattctgcttgcatttttcagcaggatcgtttcgtcctcctgcttcttaccataaatcgttgcaagacacattggttcattcctcctctactgaacaagagaaagtgcaatggataatctcatattacccttttcgaaatcttcaacacccttttcaatctgggctgctgcatcatccttgccctgttcgcgcaggtgtttggcgatctctgccagttctcttgcatgatgcttattgtgatccagcatatatgccagaacagcggtgtcttcgtcttttggctgtgctccgtgatcatgaccgcatccgcagtgtgcatgttcgtgatcatgttctccctcatgggtatgtgcatgagtatgagtcacgccatcatgtgcatgttcatggctgtgctcatgatcgtgaccgccgcatccgcatccacaatgactatgttcttcattcgttacgtgcattcgacttgcctccttttttgtcaaatcctatatcaaaatttgcattctgttaattttttgacattattataatgtattataccccccagggggatttttagcaagctattttcaataaattcaacaaataaatctatagaaaatgcgccaaaaaggagccgcctgttttttcaggcagcccccataatagcttcaatattttttagatttcagctgctttcaacagatccgggatcttggattcccatccaagtgccatgatatgtacaccctggcagtatggcttacactctttgataatacgtgcagcgatctcaacacctgtgatacctgcttttgtcttttctttgtctgctttcagttcttcgatcatttcgtccggaacatgaatgccggcaacgttgttgttcatgaattttgccattccagcagacttcggaatgatgataccaacctgtacaggttttccgaactgttttgctttctccatgaatttgatgaatttctccggttcaaatactgcctgagtctggaagtaatctgcacctgcagcaacttttctttccatctttgcaagctgtgcatcaacagaatcgctgcacggagatacaactgctcccttagagaattttggcggctcgccaaccagttcatttccacccaggtctttgcctgactccagaagcttcacagtgtgaagaagagatacagaatccaggtcaaataccggttttgcctgcggatgatcacccatcttggtatgatcgccagtcagacagagaatgttctcaataccaaacatagcagcgctcagaagatcagactccagagcaatacggtttctgtcacgacatgcaagctggaaaatcggatccatgccagcatctttgagaactttacacattgcaagagatccaagacgcataacagaggactgattatctgttacattcactgcatgaacacctttaagataggtttttgcctcttctacaagctcgtctacatggattccttttggcggtcctacttctgcagaaactacaaattcaccacggtcgaataattctttcattttcatcgtatatttgctccaatccttttattttacatcatcatctgttgcgaagttatgaatctgtgtcggacatttcagtgcatccagccgtccgatctctttcagacgtctgtagatacgctcccatccgcattccatatcactgtctacttcacatttaccattcttggaaccaccacactgaccatttacaaggctcttggaacatgccgtgatcggacagattccacctgtcaggttcagatagcattcaccgcactggtcacatttgtactccagcggtgtcacgccctggaaaccaggtaccgggtatgtatcacaggctgcacagaccatcttgctatccagatattccgcaacggtctgtacacccacaccgcaggagaataccaaaaccaagtctgcttcctggatcttgctcatatgtttcttaagacgtaattccatgttttccgggttacagatataatccgttgtcatgattcctgtcacatttccttcagcggcaagttccttctgaagttcaacagcttctttttccggaaaacgaacttctttgcatccatgacagttgatgataaaaactttctttccagctgtcagggaagtgatcgtttcttttgcttttaactgggtaatcaacatattacttcatcccccttactgcaccttttccggctttgatactgttgatgatcggaatcttggaagaacagatatactgacagcatctgcactctacgcaatccatcacgttcatgtctttcattccctgccagttctcttcttttgcatatttaacaaaatacagaggagaaagctccatcgggcagacatctacacagcgaccgcacttgatacacggctgttcttttgtctcatccggttcaatagcaataataccattggagcctttcatcatcgggacttccagtgtattcagagggaatcccatcatcggtccgcccatcttaaccagaacatcatcatccgtaaatccaccacaatagtcgatcagatcttttacgctggtaccaatcttgataataaagttgcccgggttcttgatcttctcgcctgttatagttgtaacacgctcgatcagcggcatacctttctgaatcgcatcggaaattgcttttacggtactgatattatctacgataacaccaacatctgccggcagaccgccgcttggaacctttcttcccatcacgcgcttgatcagagtcttctcagcaccctgcggatacttggtttttgcaacaaatacttccatgttgccaatatttgcaactttttcctgcatcaattcaatggcatccggcttgttatcctcgatcacaatgatacccttctcggcacctgttgtcttgaggattgctttcagtccaaaaataatatcatccgcaaactcaaggagaaccttgtggtctgctgttaaataaggctcacattcacatccattgagaagaatcgtatcaactggtttggccggtttcagtttgacgcaggtcgggaaacctgcaccacccataccaacgattcctgcttctttgacaatctcaatgatctcatccggagtcaggccgtcaagatcaccatgcggctgaacggattcgtgcagagtatcttttccatccgattcaatcacaacagccattacttcgctgcctctggtaccatgcatacgcggctctactgcaacaacagttccgcttacgctggaatgtaccggtgcactgataaatccagcagcttcaccgatcttctgaccaactttaaccttatctccaacctgaacgatcggattggccggtgctccaagatgctgtgacatagagatcacaagagtcttcggttccgggaatctcttcagatcaatatgctcactgaattccttatgttctgacggatggacgcctccatagtatccattcagtctgtcttctctgatggacttcacatactcgttgattaccttgaagttcactttagagaaatcgcgcacctgtaccggctggttgaggaattcttccagacggccctgagcagccagtctctggtagatcttttcccatgcacagtctttgttgggatccacttcacattttccattctttgcgccaccgcactgtccattcacaagactcttggaacagtcgacgatcggacagacacctccggtcacattcagatagcactgtgcacatgcgtcacagttcttcttggtaagtgccataccgtgatgtcctctgtaattcagagtgttgcttgcagcaacaaccggctttccagccagatctgcaactgtctgaataccaaggccgcaggaaatcaccactacattctctgttccttccgggatcagatcctgtaattttctttctgtatgcatcttattgcataagaaatcaacttttgcactgcctgtaacggtctttccctgctcggcagcgaatttcagaaattcatcacaatccggttcgtcaactgtctcaaattctttgaaacatttgttgcaggcaatcacaaacaggttgtccttaccgtcaagcactgatgcaagttcatcactgcttttcagtttgtacttagtatagttttccaattgctcaccttcctcacgataaaattttatccttatgatatctgttcttatccgttccctccatctctgcactcaaaaaagggctaataaaaccagataaataagttcaatacatataccttatt

SEQ ID NO: 3552 - DNA, 23377 bp, Unknown
  16S sequences of unknown bacteria
gtttttctgaatctgcagtgcagattctgccacaaaaaaggctgtccgcatactttgaggtgacccctcaaagttagacttttacgaggcgacttcggtcgtctcgtttttctttatgcagctaaaagatggagcctgtattgaacaggactcatccatcccaacttttcttttatccgtttctcgttgtagtattttataaaacgttctatctctgattttaattcctcgtagctgtaataaacaacaccgtagtaaatttcttgtttgagcagtccaaagaaattttccattacggaattgtccagacagtttccttttctggacatactttgaaatatccgttcttcttttagtctatgggagtatgccttcatctggtaagcccatccctgatctgagtgaaaagttcttctgtatgggcagtccgcagtagtttcaattgctttatctaaagcatccattacgtttttagcagaaggtctctgatctatcccgtagctaagtatttcaccattacacatatccataaacggatcgagataaagcttatgcatagtcacatgccctttctcatcaatttcataatacttgaactcactggtatctgtagtaattttctgatgaggtatatgtgtatcaaaacgtctgcgaatcctattcggtgcaacggtgccaatcttacctctataagaactatactttctgcttttacgagtataggacatcacctgtaatccgagcttttgaacaatacgttgaattttctttttgtttatggaatatccttgattacgaagttctccgagaatcctacgatatccataatccttatgttctttacgaatctcgagtatcttttcctcaatttcctgatccggattttttctgtcaaaacgcttttgccaatacatatatgtggcttttggcattccagtatatgagagaaggtcttttaatttgaactgtcttcggaggctgctgatgattcttgccgttctctcatttttgcttcgtcctctaaacgcagtctcctcagttcttttaaaaacgcattctcaattcttagtttaagaagttcttcttctagttcttttacatgctctgcgcttgtatcaacagaagattcttcaacgggtttgttttgtgtattgtcaccagatgtgttcaatgttttctttcgtccttttttacgtggtctcagcgcatcaggccctgccactcgaaagcgattaacccaattgacaatcattgatggattagtaattccttcttgtagagccaaatcttgatacgagatttcacttgataaatataactctacaacagaaagcttcttttcgaaagagtagttttctttttttcgagaacgttttaatccttcatctccgaattctttatacgcagcaagccatttcctgagctgggaatttgatccaagcccatactttgtggaaagatactttgtgccaccttctccatttatgtattctagaactacttttttcttgaattcaaaagaatatttagccataaaaataccgacctccaatcgttagatttttaggtctaacttttgggggtcggtacatccatctgcatcagtctttttatggttattctattactcttcccaggcattaagcccacggctttgtttttcaattgcctgctcaagggtgattttttccggatctccctgcaggtattccataagctcagggattccttcttttgtcacattgttgacttcaaaaatcggatcacacccggaatttgccagccactgtcttaccatcggaatatttgcatatggcgaatcgatcttcgtaataatgccgatcaatgggcggttcacgaagcactgacaattagcctcaaatacactgaacggctcatctgcagccattacgattgcaataatatctgcctcaaatgaaaaacatgccaatgcaacaccgacatttttggattctgcatattctcccggggtatcaatagtatcttcagctgtattggtatactgcgtcttatgataatgcagctcttcacccttcaaagcctgtgtaagagaggtctttccggactcacttcgtcccatcaagaataatcttttcatttcctaattctccgtcagttcacaagctccaaacttcagggtgtttccaaaataatccaacacttcctgaagagcgatctttatattttctctttcaccagtcaggatcagagatccattaaaccgatccataaacccaatctcgacatttgccactttcgttgcgatgtcagcagctactaccgcaccttcccagggtgtaaactgcaataatccaaggctctctcctgtatgatcttcacctaaatgtacaccgatatgaagtcccagatttttatatacctccgaatccgacactccgatcagatgtgcaagcgatacctcgcttccaggaatacggatacgaaccagacgaagcttgtcaccttgtaatgcctcatagttctccgaaaatatatactccagaaattcttctctcgttaatctctgtttcatagggattccttaccgctgcgtgaccggacaggtgacatatccaagaacatcatggtaatagcgaacaacctcattgagagcgcttcttacatctgaaatatctccggtgatgatcaaagttccggtaaaacgatctgcaaatccaagatatacatttccgctttttattgcaatatcagaagcaataacggctgattccggtggagtcatattcatgatcccgatcgcagatgatccataatcaatagaaggattcagacccagcttctggtaaatgatcggagccggtccgcccatcacatgtgcaagtgtgatctctttacctgcaacggtctcctgtacaattctgatctgatctctatggtcaatcatctcttattcctcctggttacataataaactggatacagtcacctgatattccggcagtttgttatcaaaccactgtaatttaatacccagttcttcttccaaaagtctggtaaactgaaatcccagacaagtcatggaatatcgctgatcctccggatgcctgcatggcagatcatccaatcttgcgcatctcttacagagaagacatgtgctgatacttaagcttcccggatattgtttttccagctctaaaagaattacctgcaggtgaagctgaaccttctgaaagagatttcttctcacccaatccataccttccggtgtcttgatccgctcacgtagttcttctgaataatgaatctttacagcgatcagatacgcatcctggtatggcttcagatactcaaatggatctggctgaccaggcggacaggaccagtcattgttataattcgtacattttttgcacgcttcatttgaagttttgggatccagataagtcaccaaccgactcaccggtaatttttttacaatgacttctgtgcgataatctttcataagctttctctttataactcagcccagtttgccggatatacaaaataccagtattttgcataatttggtgtctggaagtgaatatggcttcctttcgggatataaatgatctcacctggttttgctgtcagaacatttccattgatctcgatctccagagttccctctacaacgcagtcatactcatcataagtaagtgtccattcaaatgatgtgccgtcttttaattccatgagacctgcacccattctcggtgcttcttccagggtcacaacatctttcagatataccccatcctgctcaaaacgctcagtctcgactttatcagtggtgatcttgatgattccactcggatctttttctttatacggctcagccggagctgcagtgccagctgattcagccagtactttttcaacaatagagcgaatcaattctttacttacatccatctttatacctcgcttattctaaaaggagctttgcgaaagccgctatttcactcactttgcaaagctccgtatttagattactcttctttttctgctgcttttacagatgcttcaacctttgaaagaagtttcggcgcaagaatattagcaacgatcagagctgtgataccagctgtcagcttaccaacgatcatcgggaagatcatctcgctgttaacacctgcagtaaatccaaggtgatcaccaaatacgaatgctgcagaaactgcaaatgcaacgttaaggagttttgccttcgggttcatatcgcccataatattaaatacagcgatattgtttgcaaggtttgctaccagacctgcagaaccttctttgttcataccaagttttgcaccaatagactccagcggtttaccaaaggtacgtgtaatccactctaccatcgggaatgcaccgatcaatacgcaggagatctgtccacaggtaagaagaccagactcaagtggaatagctccagaagcatccggctcaaccatgatgttcagaagcgggaatttaataccggtttcatactcaaatactgcaattgcagtaaagattgtgataacgatcgtaacgcctgaaccaaatttgtcaaagccacggatcatcttgtccgggatcacccacagacctacaacgataagaccagcaataatgataaccggaatcaggttcacgaggatcgttccgatacccatcttgtactgtgtcatgttcattgccagaccaccaacgatacatccgatcggaacagtgatcagaccagccagaacaccggcacccaggtacggtttatctgtttttttgataatggaaagtgctaccgggattgtaaatacaattgttggtcccatcatggttccaaggatcagacctgcaaaattaccaacactttcgtttgctgccatctgcatagccagcggataaccacccatgtcacatgcaagcagtgtcgttgcgaacatggaagggtcagcaccaaccagagtatagatcggagcgatgatcggttttaagataatacacagaaccggagctgctgctactactccagccatagctgctgccagaggtcccatagcattaaatccttcatcgaacttttcaccatatccacgcttgtttccagcaatcttatcaattgcaccaaccagcatgaagatcatcataataaatacgattgcgctgttaatagaaataccggatatccattcaccaaaactttcagtgaatacacctacatttgtaatgttagaaactaattcctgaaacatacaacctctcccttcgattattatcctttcctacggtaaggattataagagtgattcaagtacctgtttggaaggacgtggaatcacggtgcttccaatgtaaagctcactctgtttttcagctgctgcaactgctgcgcgaacagcacccacatcacctgtaagggtgaaataaccttttccacccacagcatagccggtcctcacttcaatcagtgttacctgagcggcttttgctgccgcatctgctgccttgatagccgatgcgattgaataaaactccacaacaccaatggcctgtgggtctactacttcctgtgttcctgcaattgcagggaacaattgctcatgtacatttggaataagaagagaatcaacaataaattcccctccttttgccaggccagcctctaaggctgctcttactgcaccagtttcgcccccaacgatgaccatatattttccaggacatactgttgtaccacgaagcaatgtaacctgggcagcttttatcatgtcatcactggtttcgataccacgtgcaatactggtaagttctaccatacagattgccattcccatgatttatgcctccttcttgctgattcgaatgcctgaagatccaatctctgtgacgattcccgcaaatccggtgtggatatttgcagagagcccctctgctgcttccgcaatgagatctcctgcatgtaccttatctccaaccttcaccaccggagtcgctggttttccaatgtgctgtccaagcggaacgatcacttccttcacatccagatctgtgatcagcttcggctccacatggaatacatagtctgaaagtcccagccttgcgatcaaccgttcggttggtatcctgcgctgctcgatggtggattttgctgtaggattctggttcttttcaggattgattcccagtcctctcaacagtcccttggtatagtcattcattttccgtggtgataagcccatcggacatgcaaacatttcgcatacaccacagctgctgcaatttgcagcacttccaaaagtagcttcaaactccttgacgtctgtgatctgatcctgacgccagagatttctcataatttgattgggttttacattatgaccaatctgttctcttggacacagatccgtacaaaaacgacactgaatacaggatgttcttgcctgacgaatcatagtctgtaccggcttcactgcccttcttaccagataatgatcttttggcaggatcagaaggttaccggttgtttttgttaccactgcatgatcgatcatggaatcactcgactgcatctttcccatcattggaccaccgatgatgactgcatagtcttttactctcaaatcaacctgattgatgatccttcgaatcggtgttccaagcggaactttaaacatcacaggttctctcactgcacctgtaacagataaatacttctccgtcacaggtttgtcttccagcgcatctgcaatggaaagaacggttccaacattctcgacaactgctcccacatttaatggaagtcctctttccggaacgcttcgccctgtcacctgctgaaccagcacctgctcatctcctgccggataaaatgtccgcattggaaaaatctcaactgcagcatgtttctcacggatcgctttctccaacgctgcaatctcagccttatattttgcttttaatccgatcacaatgtgctgtgcttctaaatgatgccccatgagcagtatcgtatcaatgatacggtctgcaaattcacggcacaggaacttatccgtctcgatcaacggttcgcattccgctgcattaataatcaaatattcagcttttgcatttaattttacgtgtgttggaaatccggcgccgccggcaccaacaacacctgcttttttaatcgcttctattagttccataaacttcagctccattaactcatcagatcagcgcgacatcaacatcatgtccgtccacgattccaactatagttgcatccaccggaatattacttcctccggctgccggacgagcagaactaccgccaacgtagatcaccgtttcaccgacacctgcgccgataatatctgctgcaatgatcggttccccgacaggatgcagatcgatcagattaatcggctgaatcacaagaagtttcagtccgtttaagttttcatcctttctggttgcccagatatttccgattacttttgctgtcttcaaatcagaaactcctttcttctagtttcgatttatcacttagcaatctactttttcaatcacaatgtgatactttttcgcataatcctttgccagatctgtaacgattgtctttccgttcacaagaatgcgagttactttgccctgatgggctatgatcatgtctctttctgagagtactcgcttttcaaaagcaaggtctttttcctctgcctttgcagaaacttctacctctgtactgcttgtacagcactcacttcccagaatagcaggtccgatctgttcattcggaaggatctccaccccgctctttttcaggagctcaagatttgcttcgagctttccataatattcccttggtgcagtcttacgatagtgatataattccacatcctcttccggaacatagattttcttaccacaaagcagagcctttccaaatgcttttgtataaggcgtatcaaaaataccatttacgatctttcccagcgcctcattggtcagtgtatatgcgatcacggcttcccaattttccacatcccatgtatcctcaagcaaagcacatctcatccgataatactctgccagttgtttacattcatagactttgtggcaaatctctccatgattctcagatatgataccaagcacaggtttatcttccgctcccacaactccaatatggttagcttccgcttccggctcagcttcacaggcggcaacacgctcttgtactcgacgatagatttcgttgactaatgcatctaaatccatgcgtattcctcctaactatttgcaattcattgcaattcccgtcggagtaaccaaaaatggattctccggcttgacggttttgatacccgtctctttttcaataattttttccataccggtgaggcagcaggtaccaccacaaaggtaaatggtatccgtctcgctgagatttacatactttttgataatacttgccatcttttctactaccggtttcaaaatcggaagaatctcgcgatgtttgctgtaatcctgcttaatcacctctgcctcatcaaaactgatatgataattacctgcaagtactaacgacagatgcgtaccacctgttggctcatcctgaatatcaaccaccttgccatctttcaggatagcaagtcctgtcgtaccgccaccaatatctacgatcacaccatctgagatctggtacacagcatttgcagcactgggctcatccaacactgcaactacttcaaatcctgcaccttctgccacatactgatgtgtctttgcactgctttcagtgcctgccggcatagcgatcgcacagtcaataagctctacttctctgccggttttttctgatatacggtcttccagttttttctttaactcttttaccactcggagggttccagaataatccacaactactccatctttcaggaagttatgcgcctgcttctcacatgcaatcggattgttttcttcatccaagactacgatcacgatatatgcagtaccaagatccaatcccactttaaatttgttgcctacaggctgaaaggtttcggtctcagactgttctacccttttcatatagctttcaattctttgaatatccatcccaattgctcctgtcgatatgtttctttttttaatgtctgataatctttcctaatgtaaagccgcttaccatagctgcattcgcttcatcaaaatcgatatgcatcttataccggtatttatcactgacacggatcaccacatcatcaaatgtcagcatacgctctgtgagcatctgaacactgacacgttctccgtccttcatattcattttacgggcaatgtccgttggaacatgaatatgattatgggctacgatcgctgccgggatgtcttttagtacacccttaggtccttcaatggtgatagttccggcaccttccagattgccggactcccgaaccggagcttctactcccagagttcgtttatcagtaatagaaacctctacctgagcagcacttctggccggtcccaaaacagatacctgtaaggttcctttttttcctaccagctttactttctcctcactcaggaactgccccggctgggacagcatacgcttcgggtgaagctgtgcaccttctccaaacaggatttctatctgttcctgggtcaggtgtacatgtcttgccgacacttccacttcgaccagaccagactttacaatagaatcaacgacttcgtctattattctattcattttgtctcctgattctgaagttttgccaactgtttacacatcaggatatgcattgcactggacatgcgatttaattcctcgatgatatcacctcggtcataactctttccgttatggaaagcggttgcagccgctacttctgtctcacgcactgcagtccgcatctgattcaataatgcatatgtcttacccagcttataacttggaagcaccatctgttttaccttataatatttcatcggataatgcgaatgctctctcagttcagcgtgggtcagcccgataatggtttctcttgtaaacggttcttccagcacatcacatctcatcatttcccggatacttgtcaacacatcttccaggtcttctacaatggacatatcctcgcccatctcgatcagtatagtctggttcagaacaaagagtgcttctaatgcatccagttttccacggaaaagaattctcttgtcgtccttggcaaccagtctgtttcctgccagttgtgtcatgtgttccggcttttcaaaataaaatgcgccagtcgtatcatctacatattttggtttcggcagattttccactttcttcggaacttctggttcctgtgcaggtggaacatctgtggctactacttcaatattacttttgcggagcggcttgtctttcgaactaacaatttttactttattctgctgcagatattctcttgcggccggggaaagaatctttccttccgggatcacataagtctctatctgtgtatctcgcagttcatcccgtaaaattgcttcggtaatgactttcatgtcgtgccacctcctaatatggtgttttataaactacctgcaccggagcctttacgctccgggcaggtcagtcacaaatcacttatttagaaagctgtggcagaattccttctacttcctcgtgcggtctcgggattacgtgtacggagatcagctcaccaacacgctcagctgctgctgcgccagcgtcaacagaagcttttactgcacctacatcaccacgtaccataacggttaccagtccgccgcctacatgctcttttccaacaagagtaacgtttgctgctttaaccattgcatctgctgcctcgatagatgctactaatccttttgtttcaatcattcctaatgcctgagtaactgccattgtaatgtcctccttaaattaattgtcttttattttttagatattttatattgcctgaaggcgctttacgatttcattgaccagcatatctacgtcaatatctgccgcctttgagccagtacagcaaggagctgcgatcaaagcttccgtatttttgcgaatctcatccatctccagcaatccttctgcaacaacacgaacattgatcaaatgctgcggtcctacgttttcagaagtagcacttcctccgatggcaccgcatccaagtgtcagtgccgggagcatgcctgtggaagcgccgatgccaccaagtgcacttggcgtatttaccataatacgggaagccggtattcttgctgcaaaataatctacgatcttaggatctttggtatgcatggagaatgtatgtcctgctccttcgtaatgaagaatcttctgtgcaagttcacagatctccacataattctctgcagtatagaatccaaggatcggagcaagcttctcattggaatatggatgtccaaatccaatgccggtctcttttgcaaccagaactcttgttccttccggaatctcaatctcagccagatctgcaatcacctgggcactcttaccaacgatctgcggattcatagttccgtttgctcgaaggatgaattttccaagttttgcgatctgctcatcattcaggaaataagctccctgtttttccatctcgacacgaacggccggttccatatcacagtcgcacataacagactgctcggatgcacagatcgttccattgtcaaaagtctttgaatccatgatacgtttaaccgccagggctacatctgctgtcttttcaatataagcaggtccatttccaggtcccacaccgatagccggtgttcctgaagaatatgcggcacgcaccattgcgctgcctcctgttgccaggatcatggcaacatccggatgtttcatcaacatatccgttgcctgaatcgtaggtatggtgattacagatacaagatcttcgtttccacctgcctcagcaatggctgtacgaatcaccttaaccgcttctacgatacagttctttgcatttggatgcggagaaaagataattgcatttccacccttcagcgcaatctctgatttataaaatgcagtagacgtaggatttgtagaaggaatcagacctgctacaataccaaccggaattgcgatctttttggtttttttctcctcatctacttcaagtactccgatcgtcttcatgtctttgattgcttcatagacaccgcgacttccgaatacattttttattaccttgtcagcctcgataccaaaccctgtctcttcatgagccatcttcgcaagtctttttgcatttctgactccggcttctgcaacgctctttacgattgcatctacctctttctgactcttctgtgcaaattcctgctgagcttttttggccttttcaacaagatctctcacttcctgaactgacaacaaatctttatcatacaactgcatattttatatctcccgtcctgtaaattctagtatgttctgaatcagttctgtctttttgccaaatcgaatctgttctcttgtcatattatcgacctgcaattctcttgcaatcgttctgagctttgaaacagacattttctccagcatttcttcggtataagattcagcttttacaggttcttcgatcattgcattgtctgaaacttcagcaatcggagtctcggaaacttccggcactgtttctgcttcaggttcaagcttcaattccggctcgggcttcggctccggatcagactccggagatttttccggagcaggaggcgtcgatggcttgagcatctcgcccactgactcgtgaggtcttgggatcacatgaacactgatcacctctccaactctttccgcagcacttgctgctgcatccatagaggcttttactgctcctacatctccctctaccatcactgttaccagtccgccgcctacctttgttgctccaagactgctgacatttgctgcttttaatgcactatcgagagcttccactgctgcaaggtaaccatataattcaatcattcctaatgctttcatatagtacctcagttgtgattacttataccagtgggtttgctgcaactgcctcaacggcttccgcaaatgcgttacatgctgctttacaagctgactggcttccagtcagaagacctccaccaaagttggtctcacttggcggattgtacagagcaacgatggttacatctgctgccttgattgctgcatccagagcgtacattgcttccagaggcggagcgatcaggtatgcaagagcttcaccttctttgattccattggtgctggacagataagaaccagtacgggaaatgcaatgtgcataatacggaatggaatcgtcatcatttgcagatacgaaatgagcttcattttcaataaagtctacagcagcttccaggccggctcttgcctctgccgggttcggtcctgccagaacaccaatgatctcacctgcgagcttggtgtttgcatttgctgctccagcatagaaggaatgtgcatagataacatctacatctgctttctttgttgcttcatcaagcgctgtataagttacatcatcacagtctgctgtcagcagtgccagtgaacgatgacgctgcggatcatattcaataattccaccagctgtgatcaaatcctgaaccattttctgtgttgcattcgggatatatctcgttgcaaggacagtcgcttttaacggatctcttttcattttgttattacctccatccagaatgattaaagtttaaggtctgttccacttgcttttgcttccagaatcttcttgatgatatctgcaatatgcgctcctgcctcagccgggatcgtaccatctttgtgaatattggaaacaactgttcttcttgcttccggcataccaactgttgccttgtaagcaatatatgcagacatggattctgctgtaataagacctggtctttcaccgatcagtacacaggtaacgtcagcgcctgtgatctcagaaatctgatccatgacaccaacgcgtccatattttacaaagaacggtgtacctgcttcaataccatagctcttaaggccctgaagaattgccggaagaacatcagcggtattggctgcaactgctgcggaactaagtccgtcagatacatagatctgtacagtcggatgcattttgcatttttctttgatcgtctgaacagcttcatcactgaggacacgaccaaggtccggtcttgtaagataggtatctttactgtcacattttgtctgaacagtgaacagtccaagtttctcaataacctctggatctacgtctgtaaatacggcatcctgtgctgcggaatgtgctgcacggaattccagtaccggtaaggtcttgtatctggcacctgctttgccgatacccagacgacaaggtgcatactgtttcagttcataataagcatctcctgcaaccggatgctctaccagatactgttttttaatatcaacttctgctacatcttcaacaaatccgtcttctgtagcagcagatgcggtatccgctttctgtgccggcgctgcggaagttgcagatgtggtatctgttacgttcatctcagaaaggacctgagcaataatatctcttaaatctttttcgttcaaaacttccacctccccttatttcaaaaatacagatgcatcgcctgcaaggtctgtaagttttccatcttttgagaagcccatcttttcaagccattcatcaaactctttgatcggacgaagaccgaatacttcacgaagagatgctgcctcatgataaccagtacactgatacatcagcatacagtcatcaccctgcggaacacccatgatatagttgcatcctgctgccacaagaagggttgccagattctcaatatcattctggtcagctttcatatggttggtatagcaggcatcgcatcccatcgggatacctgtcagtttacccatgaagtggtcctcaagacctgctctggtaacctgtttggaatcatacagatactccggtccgatgaaaccaactacggtattaacaaggaacggatgatatcttcttgcgaatccataacaacgagcttccatggttacctggtcccatccgttgtgtgcttcggaagaaagctcagaaccctgtccagtctcgaaatacatgtagttcggacctgcactggttcctttctcattcatcatctgatagccttcatccagcatggtagcggtcagaccgaaagcctcattacctttctgagatcctgcgatagactggaacagcaggtcgatcggtgcgccctgcttctcacatgcttccatctgagtggttacatgagcaagtacacagatctgagtcggaacttcccatttattcttaaattcatcaaagcttctcagtactcttgcaacgctctctacagaatcatctaccgggttcagaccgataacggcatcaccacatccaagagaaagaccttccataacagatgccatgattcctttcggatcatctgtagtatggttcggctgcagtcgtgaagagaaagttccttcaagaccgatggtagtgttacaatgtgcatgtactcggattttctttgctgcataaataaggtcaaggtttgtcatcagcttgcagacagctgcaatcatctcggaagtaagaccctgagctacggtcttgatcatttctcctgtggtattgatgtccaggatccactctcttaattctgccaccgtccagctctgaatactgcgatagatgatcgggtcaataccatcaatgatgattcttgtaacctcatctgtctcatagggaactgctgggttttcgaacaaatcctttaatgtgatgtgctgaaggactgcctttgctgcaactctctcttctgcggattcagcgctgactccggcgaggttatcaccagatttctcttcattggctttacccataacttcacgaagagatttgaattcgtaaacttttccgcgtaaatgtgtctttaaaatcaattttcttgtcctccttctcaagaattgaaaattaaagttttggtaacaaccggaacaactcgtcccatggcaactggttctccgatatcaatataatctccgtcattcgcatagattccatcaatacagataaaatcctttttgcgttccaggagtacattgatcgcattccccagtactttggcaatatcattttctaaaacaataatcaatggatacggtcccgagataaccgcttctgccccatggatgatcatttctgccagttcctgaacttttaaaaaactggtatgatatttaccggaaaccacaattgctacctgttccatatgaccttcattcatgaatagctgaagttttctctgaagagtcgtctggaacaatgccgggtcctgttcatcttcttcagacattcgcagaaccggaatgttttttatgggaagttttccatccgtatactgaatggtacttccactaacatttgttgtatgggtacctgcacctacgactgtggcacggatcgtctccgctgcctgataggttggtacggttttgagaaccggatgattcttgatcgctcttgcaagcaatacccctacatcatgataggcaaatacatctgctggctctccttcatagtaaacactggcaacaccgcctgaataagtaactgcgttgatcacaggttcttctttcagtcgctttccctgattggtatacattctgctgtgcatctcatctgcaggttccttattgatcgcctgtgccagctgatctgccatcagttcgcataccttcatgagggtttcttcctttgccgtatcaccaacattgatctcgatgccatgagcttttgcaagctcctttgttcccggaaaaatataatagatctttccgttctcatcgatcttgatcaatctgccgcccacatccaggcagctggtacctcttaaaattccattctggaatacggcaatgttgctggtgcctccgccaatgtccagatttgccacagtttctctgtgttcctttgacagcttatctgcacctgcacctctcgctgagagaacagattccagatccggtcctgccgttgcaacgacaaaatcgcctgcaaggttgcttaatgtatccagtactacattggcattctgttttcttgcagtctcaccggtaatgatcacagctcctgtggagagatcctccggtttcattcctgcatcctgatattctttttcaataatttcttttaccttctccgcatcaatggtcttctgatccagcagaggggtaaaatagatcttgcttctgtatgttactttcttatcaacaatgttgatcctcggcaccacataattgcttgcttcattttcaattgtcagttcgctgaaaatcagctgtgtagttgatgtgccgatatcaattcctacactttttatgatctcatgcatggctatccatctcctccatatactttagaaatgcgtcaaacccttctcctgtatagctgctggtaacaaatgtcttctttgctcctgcaagctccagatatttttttgcattttcgatctgctctttgcttccaagatcacattttgtcactacacccacacagggctttccaaacgtggttgcatatcccggaggaaacatggtgccgctttctgttgactgctgtaccagaacaatgcagtctacctcagctgctgtgactgacaaagcaccccagaaccgatgttcaaaatattcacctggtgtatcgaccatcgttttatttatcacctggatcgtctgggtcttcttatatctcagttcttcattagtcaaatactggcaaagtgttgtcttgcctgccatggatcttccaatcaggatgatcttggttttcatattgctgtcctctttctgactttataacggttgatcatcaggactgtgtgatctccggctttgcaaatcccatgtaatcacacaattttgcgattactccattcatcgctgcttccacggaagccacttcaccggtaatgatcagcgttccattaaaacgatccacaaatccgatcttgattccaccggctttacttgccacatctgcagcaatgatcgcaccttcgcttggcgtgatcgtaaagattccgatcgcaccatctccatctatcattcccatttttgaataaagatcactcaccggattgggaataatatgtgccagtgtaatctgcttgcctggaacaaattcctgaataattctttcctttgatgaatcaaatttttctatcatcagatctctcttcctctataagcttccatgaaaagctccttcagttcttcccttgtcggaactctcggattggttgccgtgcaggaatctgccattgctgcatccaccatctcatccagagcagccacaaactcattttccggaattccaagattcttaatacaggatggaatattcagctttctgatgagctgtttcgttgcacggatcgcaccaaatgcactctgcctgctacttccgctatcaagtgatagaaccgtagacatctttgcataacgttctgccgcaggtgtgagagaagtacggcatccacaattgtatgccatcacataggggagaagcactgcattggctcttccgtgtggaatatggaaatgtccgcccagggtatgtgccatactgtgattgatgccaagtcctgcattggaaaatgccattccagccagacaggatgcatgatgcatcttctgtcttgcatacagatcttctttcgtcagctcttctatattctttcctgctgctttgtacgcttccggaagatattcaaatacaagcttcatagacttctcagcagctgcatcggtaaaatcattggcctttgatgaaacatatgcttcatacgcatgtgtcagtacatcaatacccgtatcagcagtgatcgatgccggcactgtcttggtaagctctgcatccagaaccgccgcatccgggagcatattctcagagatcagcggatattttgctttcttatccggatcgctgatgaccgcaaaggtcgtcacttcacttccggtaccactggtcgtcgggattgcaacaaagtatgccttttccagcatgccttctcttgatgccagataattcatagcttttgccgcatcaatggaagatcctcctcccaaagcaaacagcacatccggttttatgtctaccatcatagaaattccttttgttacagttgcaatatccggatccggcttaatctctgaaaagatggtaacttccacacccattcttgcacagatatctgtaatataggagacctttccactttcatgcatgaaccggtctgtaacgataaatgcttttttacggccctgtaaaatctctgccagcccatcacgatccatatagatccttggcttcactaagtagctgtccattttctagtaacctccttacattcttcagaaaataaaaacagcaccatataattctacttatacggcgcgccttccgatatcaataaaagaaaccttttgacagtttaccatgattccgaattgatccgcttaacagcttcatccactgcggatgcagatcccagaatcgcaaggcaggtcagatgctgcggacaattgccgctgatctcaaacacttccacatctgatgctttctgagcaagatcacttgcatagatcagatcacatacgttcccattgagcaccgccaatgcagaatgctcctgaaacagcacgtcaagcccttccatccgtgctcgccgcataataatctgtctggttccttctgacaccgttttcataatatgaatcttcatcgatgtcattccttccctattcactttttcaatcaacaagtcaggtaactgatatatgcatatggcgctgcacatatcctttcgttcatttgatgattctgtcttttcatctgtctccgagctgagcagttgtacaaatcatcttttcaacacgtccttagtatacctcatttattgcagtttgtctattcattcacgaaattttttttaacagctatacaattgttacaatttttcttttttatgtccatttttaagcaaaaagaaggaagagtctcctcttccttctttttgcttaaaaatatgtataattctttggtttccggctccagccgatggcattctgtatatcctgcacataagcatgatcactgcattccatctgctcagaccacaggaatgcttccagaggaatcgcccccacaaccagtgaagacagatctgcgatctttgccttcagaaccacatctgctttctgagcatccgtctggcatacccgatccccctctatccgaagccggatcgtcttattgttggattccataaaatcatcctctacctggagctccaacgtaaatgctctgctcacaggcttgtcacaatgactttgctgtcgaaaatattcctccagatccagaatacggaacataaatcccatgatcttccttcccgtctcctgaattgctccatcatatgcccggttctcgccactgtccggattcgtaaataatatatggaaatattcttcatacgtatagatgcgtactctctcgatctgatcggtctgtgaagcaaaaaacgtcagaaactgcttcatggtctccatatcttcacagaccagttcacgcaccgccaggtcatgatacatatctgtataatgatccacttgcacaaaatcaaaggtcagatatcctgtaatctttccattttttctgcagattaccacatatggttcatcaaagatccgatgcttatccataaaaggatggatcgttgctccatgtgtttttctggcatattgccggtagaactccagtatttcttcctcatcctccggtcctgcataggataaaccggatttatctccataggaacggatatattgtggacgcggtgaatacattacctgttccgtacaatatccatatcccattttacgataaaaagccggattaaatggatgcagtgctccaactgccgtgcctgtctgtgcaaatacccccatctgaaccctgagaagatttcttgcaatatgttccttcttgtgcagaaaatttgtggatacataggcgggtgcacccattttcatcatcttcccacggacattcatctcaaaatccatcataagaagagaacctatcatggtgccgtcatcatcaaaacagccaagatatctcccttcctccggtctgacaagttcttctggcatattgtccagtaatgcctgcggtgtcttagatgggaacgctgtctgtacatttcttctgagctgctccacttctgctggttctacaaaacgtatttccatcttttttcttccccttacaattcaattttcagcgccatatcattcgattcatatgcacccattatatcactttcgtacaaaataatcatcacttaataaaaagtttatgcaaatcgctgaacagaatcacagccatcagtcccatcaacaatacaaatcctgtaaaatgcaccatactttctttttcctgtggaatagcctttccgcgaatagcctcaaggatcagaaataccagccgccccccgtccagtgccggtatgggcaggagattcatcactcccaggttcacactcagaagaattgcgatcatgatcatattcatagtcacataataccagccatctacccgggattccttgtaggtatcaccaatcgtgctgacgattcccaccggaccggacatttcctccagtcccacctgtccgccgatcagcatcttcagactctcaacggtagccttcagccagtagcggatctctgcacagctgtatccaactgtttccagtgcaccgcccttttcccgctgtacagttctggaaaatccatagagataagctccggtgtcgctttgcttcggggtcagcacaaccgtctgcttctctccattccgttcaaagactactgttgccgtctgtccctgatgaagactgctgtaaagacttacctcccggtagagccaagtacggcttccattgatgctgatgatctggtcaccatcttccatgccagcctctgctgccgcagaatctggaataatgtccaccattgtattgtcgtagcccacgcttcccacaatgatcaacgccagcacccatgccagaataaaattgaatacagggcctgccgccaccacagcgatccgtgcccagacagatttatttccaaaagcacctgcagaatcgctggcttcttcctctcctaccatctgacaggaaccaccgatcggcagaagtttcagcgaatatcgtgtatctccccacacatggcttaagagtcttggtcccatgccaagagaaaattcaatcacttcaataccattccattttgccagaagaaaatgtccaagctcatgaaatataacgatcgcactgaatatgatcagtgccagaatataactcaatctaccacctgctctcaatcatgtcataggttgcagcctctgtctgaaggatctgctctacagtcggagcctccacaaccttgtgggcagccatacactcactgataatctcaggaatatcgagaaaaccaatcttccgatccaggaatttggctactgcccgctcattggccgcattatagaccgtcggcatggagccgcctgcggctgccgcatcaaatgccagcttcagtcccgggaaattctccatatccggtttttcaaaagtaatctggttcaatgaccagaagtccagccggtctcccggcagatacttgcgatccggataatacagggcatactggatcggcagcttcatatctggtgtgccaagctgcgcaatcactgcgccatctacaaactccaccatggaatggatgatactcttaggctgcaccacgatctgaatatcttttggttccacaccgaagagccaacgtgcctccatcatctccagacctttgttgaccagcgttgcagagtcaatggtaatctttcttcccatggaccagttcggatgcttcagggcatcctccacctgtacatgtttcagttcttcctttttctttccgcggaacgggccaccagaagctgtcagaagaatcttcttcaactgacttctgtgctctccgttcagacactggaaaatcgcgctgtgctcactatccaccggaagaatctgtacgttgcactccttcgccagcggaataataatatgacctgccgttaccagtgtttctttattggcaagcgcaatatcctttccagctttcatagctgcgatagtcggacgaatgccgatcatacct

SEQ ID NO: 3553 - DNA, 32759 bp, Unknown
  16S sequences of unknown bacteria
gattatttaagaattcaaatcccaaaatatatacatatttcgggaatgaaatcattaaaatatgaaataattgtaatgtttcatcgatatcagtcgtaaattccgattcacttcgcattgttttcgtgcaaaggtggatttctgtaaatgggttctggggctgttgcgagaatatgaatcccgaataatttggaatacatcaaaagtaattcttctaaaattgaaattgtcttatctatgctttttcggcaaggcgcctcaactgttgaacaagtttgatgacaaacaattttatttctatattttctaaaaatttgaaataacgattcaatctttttcagattttcatcgtgttttatcctatcgaaatcggtctttattttatctgatatatcgatattaattactgtttgtgttggtatgcatatagcagacaaactactacgcatagaaaaaatttcaggttctttttgtttaaagagcattataaaaccgctaaaatttcgatcgtcattcttgggttgttcttatcttttttcagttgatttttatttggagtatcaagttgtttgcagagctctgtaatcatcgttttatagtagaggacatctacaaagtctgtaaaagagtctctataaaatttatttgatatgcaggatgcttgaaaatccttgtatattttttgtgcatacaaaattccagaaatgggtttaaaaacgtatttgtagaagtattcctttgtctcttcaaaaacagtattattttgcatttacctgtaatcctttagttcgattattctataatccttttagtgttattcggcgccgagggcgcggaagacggcttcggttgccgaggtgtaggggataatctggaaggctgctattaaatcggacggcacgtttgcgtattccgccattgaaattgacggcagcattatccgttttgctcccgcgtctttgcagacttgcagggcggaggcaagattttccgcctttataagcgatcccgtaattgaaatgtcacccaagacaacaagcgaagcctgtgtggagcgttcgagagctattgagcaaagtgcgataagcgttggcagtgccagcttattggtcataccaacgccctgcaagtcggcgtagtttacgatgtaatcctttgcgactgtgctgattgatgcgctgatttcctttgaatgcgctttcagatagttaaaacccgtatttgccgactctttacattccctgtccgagccgattcccaagcacgaaaactttccgttgccctgcgtcatttgggtttcgagcctgaaaacggcggcactcattccgtttttgctagccgaaactgtgtagacttgtcccgccgcgccgagtccttcggggataagctttcctcctccttgttcaggtacggaaacgtaccgttcttcaagcgtttcgccgtcgatatacgaaaaattcacgttgtagaattccattccgcctattcgtttcagctgttccttcacgcggcgacgcatttcgagcgcgattttcaggacttcttcaacttcgtctttcgtgaaaatgccgtcgggatagatgagtttcagaagtcccgaaactgtgtggcgaacggcgatggtatcgcgttgattgagagtcttgccgagcttgaaatatttctctatggcatcgccgcaagaggttttccgtaattcgcggacgaattcggcgaggtagtcgctgatgaatccgtagtcgtcggtaaaatgttcgggcgaaaatttcggaacttcccaccccggcagatagcagtggaatctgtcaagaaatgcggtgtccgttccgatttcgggcgggaacggaacgaagaggtttgacgttttcaaaagcgtgtcaacgctctggttgatgttgccgacaaataccatcgaagccgacgctgatttttcggacttgccgcgcgcaaacgagcccgacgccatatagtctttcataatctgaatgccgtctttgtccttaaattttatgccagcaacttcgtcaaaggcgacgcaatcccaaagccccacaagccccatcgtgcggttgctcatgttgtagaagaggtttgcaacggtcgtctgcccgccagaaacgagaatgctgtttggcgaaatttccttgtagaggtgcgattttcccgtgctgcgcggccctaattcgcaaaggttgtagttgttttcaaccaacggtatcattcgcaaaagcagcagccatttttggcgttcggtaagtgcttcgggttccattcctatcgagcgcaacagaacgtcaatccactcttcttttgtaaaattcttcctgcctgttttcagctcttcgatgtcgatctttggcatctgaatgggctttaatttcaggatttttatctcgccgcggtcgtcgttgtcgtaattgtattcgaggtttaccatgcaccagatgccgccgcacaaaaggcggtcgaactcctgcggatacgattcgtcgatttctatttttgtgagtcctaagttcgaaaacgccgcgtgatagacgtttttgcccgtgtcaaccgtaacggttatcatgtcgattaccgtgtgcgtgcggttcttcatcaacagcgaaagaatcttctgcgattcgtcggggcgcacaaagtttttctccaaaatgtccttcaccttttgcacgccgctttcgattattgcgggatcgtcggaagagcagaactgcccgagcagatattccaaaacatagacggggacatttgcgccttctttaatctttttggttaggtctttgcggacaatcttgccgacaaacgccgatttcagcttttggcgttcgatttccctttgcggaatttcgcgtcccgaggttgcgttaaaattttcttccatgtttgttgatgcttttggttaaaggtcgaagccgtcgtcggtgaatgctatatctattacaaaaggttcttttgcgggcgggacaatcttgttctcatcttctatcacgaggaaatacgcgtttcttgaattgtattgccccgactttaagttgaacgttcgcgtaaaggttctggcgttcgcgtccgaatcctttttgtcggcgattaccgtctgaatgtcgctgattagcgcgcccgattcgtcggtaaaatagagcctgtattttgccgccgacctgttttcgctaacggcgtcggtctggtaaaatttcagcgcgaagatgcggttcgatgtccgtttgtcgtcggcaattaggcggatttcaacggggcgcgaatcatatttttccctattgcttttgaacgccgcggagtcttcacgaacgctgttgaattcgagaacggggattatcatttcctgcaaacttgcgccgccgtggataaacttcgacgtgccgcccctacagctaattcttatgttttcgcgcggagtaaaggcgttgaactcgtcgggcgcgggcgtaaattttaccgacatcaacatatcgtcagccgccgattttccagcaataatgtatctgtcggaggattccaccgtttcggctttggatatggatttcgccactttgtcgctttcggcaagctcgctctgggtgtataaaaagccgtggtcggcggtgattacaatgcggacgccgcttagttcgtttttgattttgcggactatgcgtttaatctgctctattgcattttcacaggcggcgaatacgtcggtttcggagtgtccgctcttgtcaaccacgttgtggtaaatgtagattacctcctgcccgcgcacaaggtctacggcgtctcttcttaccataccaagcagggtttctgcctttacggcaatgctttgggggttggcggatttcagaattgcctcgcggcttccgctttcagtagactttccgtcggcaagcactttcagcccgtcgggcgtgcgctcaaccgacaattctttgtgcggcaacaatgccgccattccgaattttgtttccgtcgggaaaatcgcctgcattggctttaacacagccttggcggtgtgcgcctgcaacagttcctctcttagctgcacggcaagttcgtagcggaacgcgtcggaaattatcacaaacgtgcgcttgtagcttctgacaaattcttcgtaaaaattgtcctgctgcaaaacgttgcctattctgcccgatgctttcaacacgttttcgcaggcggttgtccagttggcggaaagctccgccaaaaaccagtttgtgtagagggcttgggctttgtctcgcaagacgctttttagtttgtcgcccaaagattcgaatcgctcggaattttcgcactcggcataggctacgcagaatttgcggtaaagagtgtccatcttgtagtagtcttttgcgtaggcttggcagatatcggctgggtttgtcagatggaagcctgactcgcggacgcggcggaactccaacatatcaagataggttgaaattgccgaatacaataccgcgcacttgccccaccaaaatttgcccttgcgaatgtccattattgagcggatttttagaatgtcaaaaacgccgctttcaagttccgaaaacgtgtgcgaaataatggcgtcatcaacgcatgggaagaatgtcgaatcggcaatgtcggcgggggttgccttttcgaagcggataattatttgaagctttctttcgacagcctccatgcacttggcgaaacttgccgagtcagtatgaagccagtcggaaagcagctcacggcagaacgccgcattttggggattttggcaaatgtgttcctccaagcccgaaagcacgctgccgccgaattcgtcaaccgaggcggaaagcgcaagatggtacatgagattttgcaaggcgttatcctgtccgtcgccccaaacaaaaccagtgtagcgcagaagaaattccttgaagaaatcgactatcccgaatttcctgaaagccgcaaatgctttggtctcttcggcagattctacgccgcaagccaataccgcacggattacggtttttaaatcagatacctttgcgccgcttgcaaccgcaagcattgcaaggcgcaggtgtgcagcttttttgtcaatgccgcccgcaaattcgcgcacttttttgcgcctttcagcagacttaaaaaacgacctgtggcgttctattacttcgcgcttttggagcaagtcgggcgtggcttgcatatccatttcgtttagccagatggaaaccttgtcggcacagaaagattcgctgtaaagctctacatttaaaagccagttgtcctcctcttcggcgaacttttcgggaacgtatattaggaaatttttcagcttttcgtcaaagcagacgcgcttttttgcaaagaatgcattgtgtgaggtaagcgttataaattcggcatttgtaatgtttgcaaacgcgccgctttcgacctcttcggcgaattcgcggttggggtctttccagaaaactattctgcgcttgtaatagtcgggcagcggtgcggcgaaaagcgaatttagctcttttaatattttttcggtgtccatcggttttttatttgagcttggcaagaacgtcggcaaatagcgcgtaattgtgctttacaccgtcgtccaagtctattgatatgcggatgtcggcatagtggtggattttttcttcaaagacgtgcatttcctcctgctttgctttcagggcggaaagttcctttttcatttgcgtttggttgccgccagtacccgcagttaacgccttttcaaggctctcggcatcggcggcgtattttgcctgaacctcgtgcagatagcccgttctaagccgcgcaatggtgtcgggcttgtagcggtgaatgtagacaagagctttgaaggcgttttttttgcccgagtcgaatagccagtagattgggcgtttctggtagattttgcagtggtcggcaaagaagtcttttatgaaatattcgcggattaccttgcgcgggttttcctcttttccgcccaacgcccgcgagatgaatttcaggttcttttcgagattttccgcgccgtagacggcttttacgaagtccgcaaaacgcgctacaatgtcgtcctcaaaatattccctgtcgcaaacgggaatgattgcgtctttgtcggcggggaaggttttatatttgctttcgtcccactcgccgcccgcgaacgccaagccgtcggcatcgagcgaatacctgccgaacatacaacctacggcataggagatgaaactttttatgtcgcgctccaaatccgccttgcggactgttacgtctttgtcttcaacgtcgggcgtaagctcgtcttgcaagccgtagatttctatgaagattctgttaagctcttcctcgtttgcctttaattggcggaaacgctcggcgcattctttttcccaagcaaggaacgccgcttcaatggtgtcaaccttgcgaataagcgggtgccgtttgaaatcccaagaagtctcaaacgcgtcccaatcttcgcgcgaaatggcaatgttggattgggctaatgttaatgttttattgtcgttttggggatatggtaatttttttactattgctggagtaacatttagagttggatttaatatggctaaaagaacttcaacaatcttagaattcaaaaatgctaataatatttgcaattcaacgatagaaagttggtttttacaaaacaatccaagtccagcagaatcgaacgtaaatgagttattataatatctaaaacttgattttgaagatgtaatttttgaccagcctatatgtggggtaaaataatattctttaccgtcatatctaaaccctacattttttgacatttccgatatatcgctcttgctgtattttaggaaataattttgattgccataccatttcctatactctcctcctttgttatgtggagtatatttaaactttttgttaaaaacactactttgggaaaaatctacttcagcccaatttagtataaatttttcattgtctccagtgcaaatacctgcttttacgcaaaaatactcgtttaatgatatttggttaaatagcgaataaacattctcgctaacccaatacgcaacgggtgagcctgggatttttgcgaagttgtcggagtcggctatgtagcggttttgaccagagagaaagctttctgctttttcctgttcgccgtttattccgataaggcggacatacgttcctttatagccagaaatctttgtttgtctttttacgaacgccgtagtttgcacaacctctccgccgatttcgtcaaaggcgcgcgctccgaggtgagccatgtttacggtttcctgtaaggacaattttttgcgcaggttttcgtagcttgaaaggaacatccacgcttgttgcgttatcattccgaaaaatccgcgttcgttggcaagtgttccgcaacgctcaataaaacaggcgaataaatcggcttttgagtctgggtagtttttctttacgaagtcggaaagagttttatccataccgctgcctcccatataaggcgggttggttacaacagcgtcgtattggcgcgaaagcagatcggcgcagcggactatcggcaggaggatttcgagtgcagagtcgcggttcaattcgccgccgttttcgatttcagcaaatcttgcatagagcggcgcaaagtcttttacggaaatttttatgagcgagccgtattcctttgcgtcggtcatttccgcaagaattgtatttattgccgattccaattcttcgttcccgtttgcgaaaaattccacaagatgggggtctacattgttgctttcgcggattgggtagatgtgcggctgaatgttgcgcgtaagaaagcgtttgtcgtatcggcaggcaaccatcattacggcaaagtatgaaagctgggcggcgcgttcgtccaaatcaagcccatagaggtttttttcaacaatgttgcggacggcgtcgcgcacagcgtatccgcacgactggtatatttgaagcaggacttcgaacatataaaccaggacgtgtccgctgcccgagcacgggtctatgcaggcgatttcttcgggcgaaatatcggcgtattgtttgcggatttcggcaagagcggcggcggtttcgggcgattgggtggcttcgtcaaggaagtatcgccagttgctttttatttcgtcgtgcgggtgcccttcgagccagaaacgcccgagactattttcgaccatatagcgaacaatccagtcgggtgtgaaaagctgggtggcggcgggaatatctgtttttgaaattttgatgttctttttgaggttttcaaaaaccgcgtctttgggctcgctgttgtaatattgatagagccagccgataatctgcacgccgtcgagccagtcggcttcgggaatttgcgcaagcattgtgtctattacactaccgtcgcgcaaaaggaagtcggggaagagaagttcggtgtagtcggctattttctggaagaggaacggcaaaacgccgtgaagggcgttgcactgggtgatgagcaggtatttaaaaagctcttcatcgttgcccgccgatttcaaagcgaagactttttgcttatccagaccgtccaattcgattgacgaggcttggcgcaaaatttcggggcggaagttgttttgctcgtcgctaaaaacgcggacatagcttggcagaaagccgtttacttccataaaccgaagcgcgataaagcggttgaaccaagtgtaggcaacttcctccacaacggcgttaaagccgtgttgcgatatgcgttcgataagggctgcgcgttgcgatttctctgtaggcgtatagattctgccgctgacgggggcggtgtcggggttgccgaaaccgctttcggtgattccgtattgttccgccttttggcgcacgcgcgagataagttcgcgccgcgcccatactgcaaatttagagattgcgtttttgttcatctaaaaatcctatttgatgtctattccgtcggcgtctttaagaagcgatttgagcgcggagcgaatgcgttcaacgtatgcgtctatttcggcttcgcttgtaaggcgcattgtggggaatgtggcggccttgggggctgaaacaaacttcttttgagcctcgtccttcaactgcgagacaagcgattccgccaaattgccaagctgggtgatggctgcgtcaaccatagcaatgcgttccgaatttttcgcgttttcgcccgcgcgcacaaaagcttcagcggctttggcgcggatttcgtcgcagttaatcttgccgatgcagttttgttcgacttccgtctgcgtatttttgaggacttcggcaaactgcgctttcttttcggagagcatatcgctgtggattctgcggactttttctgcgagttttggcagttcggggatttttgaataattgaaacttttgcctgcggtgtttgtgatttcgcggattgcttcaagtgcgccgcaagcttcgggcgaagtttcaaggtatggctggtcgtcgcggtatttttcgattgcaagcaagcccttatcgaacatttcgcgctgggtattgaaaaattcgtcaaccttttgtgcatcttcgcaggcgtcgcaaaggtaatttgcaacggtgtttatttgctctacaactgctgtgttgtcgccttcctgttcgcaaatcgactgtaaaagctttttcgcgttttcaagcacgggtttgtcgggatatgcgcgggtattgtagttcgagaggagtttgtcgaatgcttcgattttctctttgcaaagattgagcgcggcggcaacgcagttatcttcgtcggtgggaatgtcgcgcgtgaagatttcgcggattgtatcgcgcattttacgcagcttttgcggctcgatattttggcgcaacttgacggttgtggaggcgatttccgcgcgttttgtaagcgcactcacaagtgcgggattaccaaagtgcaggtttgtgcccgatttttttacagttatacgctgttgtttgagcaggcttgcgacaattagggcaacgtcaagctccgtccagccgtagggtttttttgtgaagtgctgttgaaggtcaaccacgcttacggtgtggttttgacgcagctggtcggagagaaagtccgccatttcagtaatggcgtatgtattgggttccgaacctacgaggcagtcgttaaaggcgataatgtcggattcgctcttggcgtgtttttcaatgaggtcgtattttgtgtagatgcccgaaatgagttgttccattgcgctatgcacaatctggtcttccgacaatcccgatttaggcgtaaaactggcgtcgcccaaaatgaagaatttgcccttacgaaccgccgtttttatgcgttccacaccgtctctgcgcagcgtgcgcgacttctcctgttgcgaggcaagaattttttgggtcatctccgattccccgcttcgattgcgttttaggaggtatttttttatcttcaaagatttctccaagctgtcgtagtagccagtgccgtcggcaagatttatgatggcgaacccgttggacgaaacggaggttaggctcaggctattgcgcttgttggggtcggtcgcctcgcttatgatttcaagcgtgatgtcggaaagcattgcgcccttgaacgagccgtcgcactttttgttgaacgggaaatcgcgctccataaagcggattttagagtccgtaaaaatctcgtcgaaaaatatatttttgatttcctcggaaacgtcggtcgtgctgacatcggtttttgcgatgtccttttgaatgtcctgctcttcgttggttagaaacttgtagatgccgccgacttgaccgatgtagttgtcgttttccagacgggcgagcgagccgcgaaggcggtctttgagtgcgcgggtgtcggtatctatgttgtccgccatcaggattgcgatgttgtcaaggtttgacggaacgtcgtcaaggtagtacatcaggtaaagaagcttgtaaacgtcaacgtcctgcgcttctatcttgcttttgccaacattgtcggcgcactttcgaattgcatcgcgaatggcgtcgtcaaggacattgtcgatggagtcatagaaactgtaaaacggcgcgagggctgtctggtctttttcgagcagttttttggcggcttcctgaaagcccgaaagcattgaacgcgccccgtcggaaaggtgtttgcctgaattgccgtgttgacgaacttcggtaaaaaccttctgcaaaagcgaaaactgatagggtacaaacgggaatatatcaacaaactcggctgaacttttgaagccgtgaatgtgcgattttgcgtctttgaaagtgaagagattgcgcaggctattttcgttgccctcgtaagttgcggcaagttccttcgccgcttcgggctttttctgcaatagacgcttttgaatgacctcgttgaccgacgtggaggaaagcgtaagacgtgtggaaaagcgcgcctgaattttggaaaattcgtcacttctgattttcagcgcgaggtcgtccaacgccgattgtcccgtgcatacaacccatactttcccgccgcacttcgtgccgagttcttctactacagattgcagattcaaaagcaaatcaccgtctgtgccgatatattgccctacttcgtcaatcataaacaacagacggaaatcggcgggttttgtggataggtattttttgaccttgtcaacaaaccccgaaatgctgcctacgctttcctgcccgcctatccattcgcgtgcggcttcgaccgaccagccgagaaccgatgtgaggcattttataacggcatcttttctgaacttcaaattggcgcggtcggcaacccattcgcggttggtggaggcttgatactgctttttgaagtcgtcgtatttgccttcgtcgctgaggaaaagctcgagctctgcggtttggaggttttcgccgtaaaaaccgcgatgtgagtagaacactttctggaatgtctttttgagggagtcggtatccttttttgtcccgctttcaatgtctatgttgaagaggattgtttcggtagggtggtttgccgccgactctatttcggcgaaggcaagcgggttgtctgcaaacttatccttgaaatatgccaccgtgcttttgccgtttgccgacttattttcaagcaggtaggaaagcatttttagaaagtgcgacttaccgcttccgaaaaagccctgtatccagacgccgatattctcaacaggcgcggaaaagcttttgttgtagtttgagaaaaacttttcaaaatgcccgcgaagctcgtttgtcacgacatactcgcgaacttcctgttctatgaccgattcttcgttctggtttaccttgatgacaccgtttatttctctttcgatgtcgtccttaaacattgtgggtattttcattaaaaatccttatttcttattataaaatcgaaaacgcccgatagtatccgtttcttgtgaggcggttgaagaggcgcagctcgtgcccgttgtaataccccgggtagaaaacgacgattgacttttcctgtgaaatcccaacggggagcgcgttcaaaagcgagtgaactctggcaaacgggaaggcgtctcccacgccgtagataagcagatgttccgctttcgattcgttgaacgctttgccgatgtcgtcggcaagtgttgtcgtgggaatgctttgggttaaggtctccaagagaagcttgtcgccgcttgtctgctcttcgtctaaaatgccgttgattatgtctttgctttcgcagattttcaggaagcgttcgtagaggttgcagaaaaagattttttcccctacgggctgtttcattagcatttcgataaaacactgaacctgcatttccgattgggcgtcgtaggcgaatacccaaatgttgtcttcgttgctaattgcatttccgtgcaaaaatccatcggtagaaaacctgtcaccgagttctttcaggcgttcgctgaggagtcgtggcttttccattattcaaaatcgttaaatgccgttaatatagctcggttgccgcgcgcaataatcgtttgacgcaaaacggcggggattaaaatcggctgaagtgccttggttttacggtcaaggattcctgcttcgcaaagggcattgcgcattgactttgccatcgcgcggattgtcaacgcagaccaacttatttgctgcggactttgttggcttattcggtttaaaaatttctcggcatcgccgctgaaatgcctgtcgaaggttcggtatttttcggcaacaacacaaagcataaagtccatcatcaccttgtttgtaagcatcattgagtagaggcatatctgttttgccgattcagaagatgcttcggcaaccgcggtaatgagctcacgcgtctccaacgcatgcagacgctgcaaggctcggcgaagcactttttgtgtatatgaactgcctaccttgaactggaagaggttttcggaaataacttctccgcgaatttcccgatcgttcttacccgccaaaatgagctttgcgacaatgcgcatctcgcgaaaacgtagagtttcgcttgtgagtgaagaagtgtaacttaattgactgttgcgaatagacataactgtgcattcgcacggaatttttcccgtttgcgaatacgttatgtctatatctgtcaaaattttcatgggagaacatacccccatgattaaagaaacggtcgtatttatttacatttgtaggcatcaataagaaagtaaagcggcggcttatactctattattttaaataacaaaaatcaacaaagctcccattggtaaatgacgcgggaaacgaccgtttttcaacacagttttttcaaaaagtttcggtatgctttggaggggacggctaaaaatagcaaccgaaacagacaaacagcaaacaaaggagaatatttatgactacagcctatctgagagttagcagcgacaagcaaaccacgcaaaaccagcggtttgagattgaagaatatgccaagcgcaacggcattttggttgacgagtgggttgaggaggtcataagcggcacaaagcaccattcgcacaggaagcttgggcggctgattaaacgacttcgcaaggatgatactctgattctctcagagcttagcaggctttcgcgcaatctaatggggattttttccgttctcaatgtttgtatggagcgcggggtgcgaattatcgcaatcaaggaacgctatgaactggggaattcgattgaagctaaggtacttgcgttcgcgttcgcgctggcggcggagatagagcgcaatcttatctcaatacgcacccgcgaggcattggcgcgcaagcgcgccgaaggggttttgctcggacgtccgaaaggaaaatttttgaagctcaacgggcgcgaagacgaaatccgccaaatgctaaccctcggggcaagtaaggcggacatctgccgccgcctgaggacaagtcgcacaacgctctacaattttatccgacgtaaagagatatgtgctcagttcattaaaattccataaagcatggcaatcagcaatgtgctaatgcgaaagagtgctcgagcgaaaaaacaaacgggcaaaaccttataagtataggaatttttttgagcgattttgtcaaaatcggcgatttttttcaaaaatgtgaaaaattttttccgtgagcgaagatttttaccccgtagattataataattaggttttgcctgttcgtttttgcgttcactttcgggggggggtagttaggcgcggacggaaaaatcaagtggcgttcctatcatttctgttatggaacacatatatgaagaagtaatcgcaaacgccatttccaaagctcttgcttccgttgaacaaagaatggacatgattatacaacatcttgacgcaataagccaaactttacaatcgcaggaatcgcagaacgcaacccccgcgcaggtatatgacgacccaagaggcgatgaaaatcttgggtgtctcgcgcaagacgctttacaaccttgcgcaaaaataccccgtcataaagtcgggcgggcgatacaaccgccactttgtacctgaggaaattgccaagttaaaacaaaagcggcaactgaatttagagtagcctccataaaaaagcaaatcgcgcaagtataatccttgcgcgattttttttgtgcacaaaaaaaaaggcgttccgcagaacgcccttgtgtaaagctatttatgattagggctgacattcaatacccgaaacacctacaaccgtcgcaaggtcttccgcccactgtaccgtgccgcctgttagagttttgaccgtgccgccgttgcatacagccttctggaattgttcgtatgtggggttagttccaccgttgataacgaggtatttattgattttattccaaccttcatctaccttaaggtctgtgattccaacctgcgaattcgccgtttcttgcgcgataacataacgtttgagagccgtgttgaactgcgagatgtatgcgcttactttggccttacgagcgtcagtcatggccgtgctgagagcgggaaccgcgaggacaacgaggatatcgatgatacccacaacgattagcatttcgataagcgtaaaaccgcgcttaactttcttatatagagtatgtttcatactgttttctttcttgtttttagtattcccaacggtatttagccgtggaagggaaagtgatttcaaggcttagttgcctcgggataaaatttataaacgccttatccgagcgtcttcggttttgtcccaaaataaacccgttttgcgcttcgttttgtttttgttgccgcttcctaaaatatatttatccgcagggctaattaccttttgcggaatcaacaacgccgcgttcgtttttcccaaaacgcagttctttggaagccgcaacccaaaaacacagagttccaacctgttggtttctgcctgcttgcattacccgaactacccaatttatctggtaatgtaagtttctattagcgtaaacttgcacaaaatgagaggttttacgctttagaggaatatcgtgacactagtacaccgttccatcctgtaaaattcttatgcaaatttgagctcagtaatttgcctggagaagaagaatttatagaagtttgcaaagaggaatataactccacaaaaaacaatattaacaaagaaatatgaaaatagacataataggtattccgaaacatatatttttgggaaatctgcataggatcctatcctagatggagtatctagttagggtatacttaatcatggcaaatgaaatatagacggataaatatatttggaggttcaggggtagggaagtccatatgtgctgcaaaactctttggcgacttaaagcttcacggatatctaatagagcaagtgtcggaatatgctaagacgtgggctcaccaaaagcgatcagtagatgtttatgcacagctatattttttggcaaagcaagtaaaggcagaacgcgagtgcctaactaatggatatgaattgatagttaccgattctcctttaggactatgcccactttataccagtgagaatttccctaaagaagctaaatgggcaacgacctcaatgtggaggtatatacgggcaatggatacggaatatcctccgttaaacattttaatccgtcgggatacgaatatagagtatgaaacaaatggtcgctatcaagacttatgtagcgcactcactatagatgagcgattacgcgaaatgtctaaagagtttggcggattcgaaagagctgagggatttactgtaagcgagtatgacaaattattggcgtatgtaatagaaaaattacatcaataataacgagtctttatagtcagaaaataaaccttatagagtttctggggaaaagagcaaaagttgcaggttacacgacctcaggaaattgagtcctcttttataggaagtaggaatatggaaattttttgcaatacacgcatatgcaaaaatgcctaaactggtattttaagtaatttaaaatatcgcatatgaagataataaaacgagatggtacagaagttggatttgatgcggcgaagatagtaactgcagtgaccaaagcaaacaatagggtggaagccgcacataaactgagtgaggctgagatagtgtccataggcgagtatgtgcggaaacttgcggaagagttaacgcgagcactaaccgttgaagaaatacaggatatagtagaaaaagaaataatgcgttttgggaagtatgagctagccaagcgctacataacatatcgctataatcgtagtttggcacgaaaatctaacactacagacggtagaatactaagtcttatcaactgtaataatgaggatataaaacaggagaattccaacaaaaatcctctaattaacagtgtacagcgcgattatatggctggagaggtatctaaagacatatcttccagaatccttttgcctcacaaagtagtagaggcacacgacgcgggtttactccacttccacgatatggattattttgcccagcggatgcataattgctgcttgttaaatctggaagatatgctgcaaaacggtactgtcatatcaggcacacagattgatagacccaaaagttttgctaccgcttgcaatattgcaacccaaattatagcgcaagtcgcaagcaatcaatatggcggacagagtatctcgcttgcgcatttagctccatttgtggaagtttcaagaaagaagattcgcgcggaggtggaagaggagttaaaagagttaattgtagacgtagaggaagcgcaaatatcccagatagttgagggacgtgtgcgaaaggaagtcgcgaggggagtgcaaataatacaataccaggttattacccttatgacgacaaatgggcaagcaccgtttgttacagtatttatgtatttgaacgaagtttcagatccgcagacaaaggcggacttagctatgataattgaagaaactctgaaacagagaattttaggcgtaaaaaatgaaaagggtgtatatattacacccgcctttccgaaactcatatacgtgcttgaagaagataacatcaagcccgatgggaagtattattacttaacggaactagctgcgaagtgcaccgcaaaacgaatggtgccagactacatttccgaaaaactaatgcttgcaaataaaatagacaaaaacggagaaggtcattgttatccctgcatggggtgcaggagctttttaacaccatatgtagatgcagatggtaatcccaaatactatgggcgttttaatcagggagtggtaacaatcaacttgcctgatgttggactatctgcaaatggcaatttagagaaattctgggaaattctggatgaccgattagagctatgtcacgacgcattacagtgcaggcataaaaggcttgaagacacatattccgatgctgcaccgatactgtggcaacatggagcattattgcgcttaaagaagggtgaaaccatagacaagtacctccacggtggttattcaacactatcccttggatatgcaggactatgggaatgtgtttacgcactcatagggaaaaagctcacagagtcggagggagaaacgcttggtttacagatcatgcgaaaactaaacgagtacacagcaaagtggaaagcggcggagaatatagattattctctctatgggacaccgctagaaagtacgacttataaattcgcaaaggcgctgcagcaccgcttcggcataatagcctgggtatcggacaaaaactatataacaaacagctatcatgtccacgttaccgagccgatagacgcatttgcaaaattagagctggaatccaaatttcaactattgtctcctggcggcgcaatcagctacgttgaagtacccaatatgcagaacaacatacccgcagtattaacaatgatacagtttatatacgacaaaatcatgtatgcggagcttaacaccaaaagcgattattgcatggaatgtgggtatgacggcgaaatatccatatacaccgatgaacacggtaaattaggctggaagtgtcctaattgtggaaacaccgaccaaagtaagatgtcggtagctcggcgcacgtgtggatatattggaacccaatactggaatcaaggccgtacgcaagaaataaaggagcgcgtactgcacatataatatgaactatgcggagataaagcctgtagacattgcaaatgggcccggaatacgagtttcattatttgtctcaggctgtacccaccactgtaagggatgctttaatgctataacgtgggattttaactacggaaaaccatatacaaaagcaacagaggattatgtatacgaattggttaagcgttcctatatttctgggttatcattattgggtggcgagccctttgaaccatgcaatcagagggctttactcccgctaatccgaagggtgaaggcattaggaaacaaaaccatttgggcatatagtggctatacctatgagacagacttactacacgggggacgtgcccattgcgaggttaccgatgaaattttaaccgccatagacgtattggtagatggcgaatttgtggaaagcctaaagaatatttcgttggaatttcgtggaagtgaaaaccaaagaattttaaacctcaaagaattatatggaagagacgcacaataaagaaaaattgacactaaatggttaccaatcggcagcaatgggtacggctctagcagcatccctaaacactgcgtatatggcatacggtctcgtaaacgagataggggagttacaggaaaagcttatctcagaaagcagcggaatggttagctcggaagatacgctgaaagagttaggtgacgtcctgtggtacatagccggcgtatcgcatatacgcgggtggaagctatcagaagttatgacaggaattgtcactgatataactataaacgagtatgaagccaaagaattcgcaaaaagttcagattccaattccaggcaggattcaaatgtaatactctccattaatttgagcctagcggcgggaagcctgtgtggcgcactaaagaaagaaataagggataatgcgcataagcccgatgtagaaaaggacgctttacgtaaaattttccaaatatccacagttcttgccaaaaaactgggcagtacgttggaacacgtagcaaccgcaaacatagcaaagttagccagcagaaaggctcgtggagtgataggtggcaacggagacaataggtaatctttatagatatgggggaagctacacaacaagtatgcaacacaaaaccgaaaagaataggcatgctacagcgactaaaggtatcgtcgttactataaacggcattgagatagagccggaagcaatcgaagaaatcttagaggagtggaataaaacgtatgctacgcctctaaaaagcctttcacaattaattaaagcgacaaaacataagatgcgttatctaatggggcgcgcgaagttatcgccttttaggacactgtctgaaacaactactaagcccataatttggggtactgaacattacagcgaggagttgtcgtttaaatttgaagagaattcagaaaaaactttatttcaaatccgatgctattttagaaacgaagtccaattaggggtttggtttggggaatcggaagagtccacagtatccaaggcgcaaaaatggcttaatggatttgtgagcggatgtgccgcaaagagcgacgctatactggaggagacacgggaaatcgaacctaagacatgcgactgctgctggcttgggcgcgattttggcaaatacattccagccggttattgcgcagacagatgcgccaaaatttacaatgctttaaaagatgtgtagggataaactacagcgatggacagaacataggtttcatacctttgggaattttgcgacacatatgacaaagatacccgtttggagatacacgatgcaaatatggaaagtttgtatgcagaccaaaccaagatattaaggatttcttagactcagttccaaatattaaccaatctgaacgcatagaactcaagaaatatattcacagttttatggaatatgtgaatgtagagcgaggagattcaaatggagtaatataagttcaaatacccgatttgtagcaaatgaaatgagatattttacaatggacttttagaattatagaattatcaaaacgtctaaacattgaagttgccggagtatctattgcgaaatcttaaaataaacacgtaatgaagtaatagaaagcggagaagtacagaaaattggttgagaatgtggctattacgccacatttctctcttaatgaaaggatgaaggaatccgtaatatagcgtaatgatgcaaatgttcagttaccacatcattaccgagtgatacagtcaaggcgtgttgctaattggctatatttctgcaatttgcattatttgtcataactgtctgtaactcactataaattaattttgtaaccataaaaaagtgagttatgcgaagtacctttaaagtattattctacgtaaagaaaggcagcgcgaagcctaatggcaacctgcctttgatgtgccgccttacggtggacggagaaatcaagcagttcagttgtaagatggatgtacctttgcgtctgtgggacgtgaaaaacaatagggcctcgagcaagagcatcgaagcacagaaaatcaacattgccgttgataaaatccgggtggaagtaaacctccgttatcaagagctgatgcagactgatgggtatgtcactgccgccaagttaaaagatgcctatctcggtatcggtatcaagcaggagactttattgaaactttttgaccagcataacagcgagtttgccaagaaagtaggatacagcagggcaaaaggaacattccagcgttatgtgaccgtctgcaaacatatccgtgagttcctgcctcatacctacaaacgtgaggatattcctctgaaagagttgaacctctctttcattaacgacttcgagtatttcctgcgcactgaaaagaaatgccgtaccaatactatatggggctacatgattgtgctgaaacacatcgtttccatcacgcggaatgacggacgtcttcctttcaatccctttgcagggtatatcaactctcccgaaagtgtggacagaggatatgtcacgaaagaggaaatacacacaatgatggacaccgagatgcccgataagacacatgaacttgtcagggacttgttcctgttttccacgttcactggcttgtcttattccgatgtcaagaacctgaccaatgacaacttgcagacactctttgacggaaacctttggattatcacccgaagaaagaagaccaacacggaatctaatatccgtctgttagatgtacccagacgtatcatagagaagtacaaaggcatgacaaaagacaacaaggtattccctatgccaagtaatacgacttgcaacaagaagttgaaaaccattgctgaattgtgcggtataaaagcccatctgacctatcatgttgcaagacattcagcggcgaccaccattttattatccaacggagtgccaattgaaaccgtaagcagactgttggggcacaccaacattaaaacgactcaaatctatgcaaaaataacagcccaaaagataagtcagggcatggaacaactctctgaaaaattggaagatatggagaaaagcatttgtgggtcgatatgaaaattacagaccgtcagtcgcctgtttccttgctcgtccattaagttagtacagactttattgaaagtgaaaaggtcaggcggctgtgccgtttcgggcagaatcttcctcttccagagcgtattcagcccgaaaaccttttccctttcacgtctgtacaatgtacgatgacggctacggaaacaaacgactgacggaaaagaatcgtcaaagacaaaacaattaacagcatatacggaacaagtatatatgtcctttttagaatttcattcaaaaaccgagtgaggtgtttttataggacacaataaaattgtggcaaacgggaaactgcactccctccagaaaataatttctttcctttcggtactactcccgttgagttgtttctgcttcacctgccttctcaaatattcttgcttttggagtgctccgaagtttgacgcttcggcttattctgccatcggcctttgtttgcctttgttcccgtagtagatgtttccgactgactgatttaatgaatgcaagaatggctgactgactgattggattgtcatgtggttggatgattggttgggttattgaactgttggtcatatgcaaccaatcatccaatatcaaatggtttttggctacacttaaaattccgataaatttcacctgtttttcctatcttatttttatgttcaaacgaacatagcaagttgtgttttggggcacccgaaatatttccggtgccccaaaactacttgccaaaatctttccctccaaagtcgggaatggttatcttaaaaatgacgtgatatgaaatttgataatatcttatcacactaaatctttatcataatgcgataaaactttcaagtattttgcgtacctttgtagcaaatttagttagatatggcaagtcaatatataaaccgcataagagttgctttggcggagcaaaataagaccaatcgctggttagccgaacaaatgggaaaatctgaaattacaattagcagatgggtacaaaataagactcaaccatctttggagtaattagtggtagttgcaaaagtcttatctgtaagccctaaagacttgataaatgaagtcgaatgtgacaaaacagacgttaatgtaaagacactgatttagtagatgtagaaatatgtttagatatattgaaaatcaagataggacatttctcttcggtgcatatcgtggagaaaaatctcagttggaatggattcttggaaagcatcctcataggtatgaaaagctttacaatatccgttccaataaagatttgttttcacagcgaagaggaggcgttatctcgatcctgaaaacaagaaaaaggggctaatggaaatcaaagccttcaactataaaggcagtcccggtttcgatattgctgatttccggatgtatgatcgagaaatttcagaaaagccttggatgctcaatgtaacatatttgatttttggatatgatatgtcggatgacggcattgtcacgataaaacaggtatggcagaagaaagtatgggaaatgtcaagaccaatgaaatctggtaacaacaaaactatatggccgataaatctgcgaataaaagaaggtaccgtacacaaaatgcgtcctgcaaaatggtgtggaaaagccacaagtttctcaatcttcgaaaacatggaagacttcctggctgcgatggaagaaactatgtataagaacaaagatactcgtgatgatgctcccgactggcttcagaaagttctcgacagttatgaaaagcattatggtgtaagacttcaaattccaagatggagcgaaatcgcctcaaagtatgtgaatagataagaagtttaacgaaaatgaataataattttaacggcatattttactttatggaatggatatttgatggtattggtacagagataatttcattgctgatagggcttgcaggaggtggtgctattggttatcgaataggaataagaaacaaaatttcccaacatcaaaaagggagagaccaggcaaaacaagtacaaattggaaacattatcaatgatggaaattcaaaaagcaggcgataatgcacaacaattccaaattcaaaatctcacaattggaattgatgaaaaacgggctagagaaatatacgatgaaaagtatagcatagcaaaaaaagatttcacagaggaagctttgcgtatagccaatgaacgagtaagagaacttgaaaataggcttatacccaaaatggaagctgtaaatgatggattgaaggcttttgcggatccgagttttcagttattgttggtagacgctcaaaaaacggcagcagcaactgaacgatctgttgattatgatttactatcagaattgttggttcatagaatagagaaaggtaacgacagacatgttaggacagggatacatcgagcagtagaaatcgttgaagatatttctaatgaagcattattaggtctaacaatcatacattctttaaattcttttatccctgtatcaccagaatgtgttggggcattgaatacattgaatgatttatatggcagattaatatatgctaaattaccagatgggatagactggatagaagacttggaaatacttgacgctattcgaataaatccatttggcaaatttaaaactataaaagaatattgttcagaagctttaaatggtattataacaatcggtattaaaaaagattcggaagaatatcaaaatgccattacgatattgcgaaataataaacttttgttgcctaatttgttggttgagaattatttgttaccaggttatgtcagagtcaatataggaaatttagatgctgtaaatacgctttccattattcacacaatggggaatactatacctatgtctgaacaacaaaaatccgcgattaaaactgtaattgaattatattcaaaagatactcaattaaaaacggatgtagaagaaaagtttttatcagagtggaatagcagacgtaatttgtcattattaaaagactggattgaaaaaatcccaaactcgtttagtgttacatctgtcgggaaagcactagcccatgctaatgcacaaagatgtgataacaaattaccgccattaaagtagttaatcattaaatctactaagctatttgtataacgaatgattttgactacttttgcattaagagttatttgacactaaagcaacgcaaaacgcagagaatcgcacggttgccaagtcgttaccattacttttcagatactccgttaaatgtttattcgtcaaacggttatgtaaaaccgttcacaatctaaaataaactaacccctcctgccaaaacaatttcaagaagagaagtgagaagagcagataatttagaacaatacaaatgaaagactggtttttatacataataaccgtttgtatcctacttcttactcttggagtgatgcagtatttagagtcatcctcggaatattatcaagcgatggtcgaaaaggtaaaaagcgagaacaaaagcgaagtgaagtaagtcacttatgtacagaagtaacaaagatgaaggcacttactatacgacaaccttgggctagtttaatcgttttaggacacaaagatgtggagaaccgaacatggaagaccgctatacgaggtcaaatagctatacattccgggcaatctaagtctatagcggattggcatagtgcgatagaaaccgtagccgttgtgaggcgctgtagtcatatggttgcagaaacatggttaagggaaaacatcggatgttttgaagacctgccgaggggacaggtacttggtacagtccatatggatttttgcagtcaaaaggcaacctcactctggcattttccgagatattggggcttttacttatcaaatcctatagtatttgacgtacctatcccccaaaagggcagactgggattttgggaagtggaattggaaagttgacagggataatcttcctaaaattatctcatgagcgaaaagatatcagcgacttcaaaggatggtagcaagtttatacctccgcaaacgtgggctgaagtgttaccgggtgtatacgacgtagacggtaacgtattcgcatctgacattccaaatttaatagatgcatcaggtgctattagagtgaaatttcgtcatgtgacaggggacttttcggtaacggggagtggtttaaaaacattatctggttgtccgcaaacggtcggggataattttcattgtgcatggaatgccttgcaggatttacggggcgggcccacatatgttggtggcaactatgaatgccactgtaaccaacttaggactctaaacggcgtccccacaaagatattgggtgattttacgtgtgcaaacaatgagttgaccacattgaaaggtgcacctgaaatagttaaaggtaggttcgtttgtgcaaagaataatctgcacacattggagggtggtccacaaatagtaggcggagcattttattgtgaccacaaccaactctcaaatttaaacggtgcgccatacgaggtggggggcgaattcagctgcacacacaatagattaaggaatttagacgggtatcccaaaataacaaggggtagcataatctgttcttataaccagataacagacttagaatttgttcgcgagtcagacgatatagtcaactacggaataggtgaaaatcctggaatagcgcgctcgccacaagagggtgggggatatataataagtgcaaaagtcttgccgggctgttggcagttaattgaggatggaaagttaaacaatgcgccaatatctatagattggcaggggtttaaacgccctttatatcaatatacacattggattccaaggaataccacagttaaacatttaaatctatcctcgttacagaagcaggaattagataacttattatcccgtcacgacgtagattttctagaagaatataaagaaaataaaacaaagttacgtgataattcatctttggaaatagatttttaacttaataaaattataatgacttaagactacgtagtatgaaagaaataaatcgttttggcaggggtgaaatttataaaattgaggaaatcttagaagatcttagaaataaagaaaatgcaaaaatatactgtgagtgctgcgcttgtatgagcgtatactcagatttcttaagttggattgcggcttctaatcataggcagtatatgaccacagatccgtcagaagcttcagtaataataattcttggatgtcaagtgacggatcttgccatacacaatgatatatcacgtgcagaaaagctccgcaatatctatcccggaaagacctattatatggggggttgtttagcaaagagatacgatattaaactacctcagtggctaaagcgcttggatgttgtgagaagtgaataccagtgcataggacgtgacgatatagaatttgctcaaattaaggcaaagatggtctggcaaaagcctttttgggtgaagaattggaatgaaacagataatgaattaaccgaggggcatttattccgtgatatgtatccgctaaaaataggcgctagatgccacggtaaatgtaaatactgcacaattcgggatactcgcggaaggacttatcttaccatagcgcagaaacagaaagcagaattcctatcgcatgcgaatgtggttttgatttccgacagtcccagtgtgaggcaaataaaaggctggtgtgaaattgccataaagcatgccaaggaaatatccatacggaatgtggagccacatgttgcgatagcctgtagggagggattgcgcgaactctcgcagaaggggttattgagaatattccactcgcccatacaaagcaacgatccggaactcttgcaagctatgtcgcgcgatgccaaagccacgctggattacgtaaaatttgcccaggagctcagaaagaccggcactatcgtcggaaccaatataataatagattaccgcataggtgacagggtagtgcataattgcgacaaggtttggctggatggtcactttgactattgggcatggaacccatattttgacggcgtatgggatagagaaaaagccaaagagcgcatgaaactctatatcgggcgcgaattaagctagcgtaagaaatgttgcaggaaaaatgaccaaatccgttaggttctttttttttcgaaaaaaaaagaaaaaaaaacttcctataattacatagttatgaagctagaaaacataacactgggaagtaaaaggatatgtatactccttttgggcataagttgcaatatagcactagccgatgaatcaatagatcggttaagtgtttataaaagtaataagttattgcctaatgaagtagaactccagagcttagaaactgcgggaaccacccttaagtttaccaaaagtagcctaacttgggtaaaatccccaattgcaacaggtaatttctcggaagacgcgatatccgcacgcagggacaaatggagcggcatactatggtactggtccggcgctataaaggctatagacagtgaaacaggcgaggagttatgggatgtagatggcgatgacatctatctctacctatacgatatcgccaatgggaatagccccgagtcaaacggtataaccaaagaaatcgcggaatattatctatcggtagcattggatcccagcggaaacacatacaatggggatatagggacaccacgatttgaaggcataaacgtaccggataccatagatgtggcaggtatggatttaactggtaaaagtgttagcggggatttagcacgactaacgaatttaactccggaacaattgtcaaccacaagctggggatacgcatcttatgttaattataaatttcctgtaggatttgatgtaagtagcttagattttacagggaaatatatctacaattgtgggctagagtcgtgtaaaggattaactacagaacaattaaattccgtttcttcggatcactatcaatattggtccgaaggaataaaacttccatccggaatggacttgacgggattaaacaaattatttcccaaaacagattacacaaatacggtgggattgacggtagatatgcttaacaacaatacaggttctttatatggagctatactacctgcgatggatatatccggatttaccggaggcaggggggaatggtcttatgcagatttcacaaagacaaccggtttaaaggcctccgtaatagctgctcaatatggcaacaacctcatgggtcccgtcacaatatcgcaagcgacgtgggacagttataccactgaagagcaggaacagataaaaaattatgtaacggttaaaccgaataggaaccatacgggaggttaatttctcccgtaagatactattctatgagagcgctcctaaatttagaattaggagcgcttttttgggactaaatgttgaacaatctcctaaactacaaagatgcgtgctatacagaaagggtttacgttagtagaattattggcagtcgcaataattataggcatattaagctcgcttgcgttgtctgcatattccaagcacaaggaaaatgcgataagggcgcggatatttgcagcagtggaaggctggaaccaagtgcacagcgcatatttgtccagaaacttaatgccgcccggcagcaggctgtccaacctagagtcaccctcggaagccgcatcggaagtatttttagttttaaaaccctatattcccagtgtgcggaactacacatctctttctgactttgagtattcggtagccgaggatatagggcttgaagtgaatccatataaaataatttacgccaaaaaaaacaatagagtttggcagtttatggctgcaggcagggatgaggcggaaacgccgaatgaggctgagcctcccgaagttgcgccggaaataccaccgtataatgactacataccgtctataacagatccggttgcacagctgccggatattgttttacctcccgcagaggagccttccgagccaattactcccccagatgaggacgaagaggaaccggaaccagaaaaggagcatacggcggtttcgctatatgcgggaacatatacggtagatattcacgtaaatcccaataatacgcaattgagcgatttgacaaagaccatcaatttgggcatagtaggctcctgcgaattatgtcctgcttctaaatacgtttggaggtgcgaaagcaatggaggatctgcttctgtatccctatccggcgggggaaacggcgtgactgctacaatatcgttctccgcattgccggaggattccgacaccggtagttttacagtatactgcaaaataggagacggacacccttgtgaatttggaaacgagttattcgcaacaatatcttacaatataattatcggagatatggcggaaaacgagggtggggtggatctggatacggaatacacggtaacatgcgatatagcgctgatgccgcctatcgaatatactaatgtaatttccgacacatatgcccccggggatttgacgacatcaaacatatgggcgggggttactactaccgaatttgaatatgcgcgaccgttactgcgcataaaattggcatcggaaaatacagagacgcccgtaagggacagctttcccgaattttacaaactgatgggacggtccatagacctcagctggttaaactatacgggcaaaatctacggcagagaatggacaggggtgagcaacgaactttcttcaaagacttcccaaatattttcaataggaacggcgcctgttacatatagaaattcctcaaacaaagagactgccatagccgaagtgaaatacggacagatagtgggtttgagtgaaaactgcgtatatatattgccgtccgatcctgccggagacggtaacgtttggagttggggggactacgatgaaatgcttagagatattccggagtggtctgtttatcgtattagggataatatagatctctccggatataatccgcaaacaacgacctacctgatcgtggagggcgagagtactggaacacaaatcgcgcaccgctggtggtccactaccacaactagcgaaattacaaatcagaacctaggcactgcggaatacttcaagttcatacgcgcattgaatccctacatgtatcaattcctattttggggagaagagcaatttgcgatttttagtgaaaatggtgacccattcggtttcgccacgcaaatatccggcgtaggctatgacttgggatatgctgtggattatcttatgtcgtatatttcgggaaccgtacaaaatcacagaggattgacggaagatgccgcggccgaattcctaaatgactatctgtcatttatagatgcctatttcaacgggactgtccctctaccttatctaattaccctttatggggcttattcttgggatactacgcaaaggcaaatagctatgttaaaagaaaaaatacttaactacatagaaacacatgcgctttattgaatagcgccatagaagattccgtgtgtttgagacataagattttgactatactaaaatcctatggaagagaaaaaaatacacgaaacacctgccgaaaagactgcacagagtgtggagtcccagccgatttctgcggaattgaaggcgaggcaggaaagagtgaacgcaatatcacaagacttattgtctaaattcccgaaagacgagaagggtaagattcctccagaagtagggcaggtggtaacagcagccgcttgggctatcgaaaggggcgaactaaagaaggaggatattgcagaaattaccgatgcagccgaattaaaggctcgcgtggagtccg

SEQ ID NO: 3554 - DNA, 1672 bp, Unknown
  16S sequences of unknown bacteria
ggctgaccgtgtgcttttccatgaattccgacatatccagacggataagcgggtcgaccgtatcgaacagctgcagcgcgagctgcttgacaagctctgttttgcccacacccgtggggccgacgaagataaagctggccggacggcggcgcgctgagatgtctgcgcggctgcgtttgacagcgcttgccaccagatgcacggcctcgggctggccgatgatgaccctgttcaggttttcttccagatgcgcaagctttgtatactcggtttcctttacttttgcggccggaatccccgtccaaagctcaatgacttttgccacatcctccatcgtcacctggatgccgtccacggcctcccgctgcgcgggcagctctgcctccaggcggatgatctcggatttgatctgcgccagcttctcgtagtccggcccctccttggcctgttcctgctcagcctcctgctctttcaggcccgcaaggtgcttttcgttttccacccattcggtgatttccgggtggcgcaggctgcagcaggcacaggcctcatccaacaggtcgatggccttatccggcaggaaacggtcggtgatatagcgctcggacagcgtgaccgtgctgcgcacgatggcttcactcacctttacatggtggtacgcctcataatactggcggatgcccgcgataacagccgtagcatcgtcgatggacggctcctcgatcttcaccggctggaaacggcgctccagcgcctggtctttctcaatgtatttgcggtattctgcaaacgtcgtcgcgccgatgacctgaatctccccccgggagagcgcaggcttaaggatgttggctgcgttcatcgcgccctcggaatcccccgccccggtgatgttgtggatctcatcaataaataaaataacattgcccgccgctttcacttcgccaatgagccctttcacacggctttcaaactggccgcggaactgggttcccgccaccaggcttgtcaggtccagcagataaatttccttgtcacgcaggcgcgccggaacgttcccctctgcgatatgcagcgctatgccctcggcgatggccgtcttgcccacgcccgcctcaccgatgaggcagggattgttcttctggcggcgggaaaggatctggacggtgcggtaaatttccctgtcgcggcccacgatgcggtccagctttccgtcccgcgccttgcgggtgaggttctcgcagtaattgtccagaaacttgcgtttcttgccgcggtcgttcttgctctttacttccttctccggcgcttcttccgttttcctgcggccgccgaaaataccgaaggggaacgttgcgttgccgccgggcgtaaaatcgccgtcgccgccttcgtccgtatcgtcgtccggcgcttcatccccgtccgcatcgtcctgcggcgccatcatcccaagctgctgcatcatggcggcggggtccatatctccgttttccatcatgccggcgaagcgttcttccatagcctccagatcctgatcggagataccgaactgtttcataatatcgtccacgggcttgatgccaagctcccgcgcacacgaaaggcagtagccctcgcttttcgcctcgcccgcctccagcttctgtacaaaaacaatggcggggggtttttt

SEQ ID NO: 3555 - DNA, 32759 bp, Unknown
  16S sequences of unknown bacteria
gatctgaaggcatcagaggaaaatgccagtgaatgcgagtcgtgggcctatccgttcccgcgttccatgctgccggagcatatttcctttgcgatggattatctgtcggagcaggagagagaagcgctctgggacagtgcgcggaatgcggacatggagtatgtgccgggggagacttataccgtgactctggacggatttttgatttctgataatattgagtgccgctcttatgaaaatgtaaatacgggataccgctattcagaccatgatccggtcgtgattaaattccggctgaaggatgcaagatgacagatgctatgctatgagaaatccgacaaagaggaggaaacgaatgctggataaagagatcagggagccgttgtttgactttctggaggaattttacgggaaaatccgtatttttgaagaaaaaatcactgggctgtcccgtacagatgcgctcggagttattgatggacagttgataggatttgagatcaagagtgaccatgatacatatgcacgtctgcagaggcagacggcagattatgatgagctgtgtgatgtgaattatctggtaatcggaaggagccatcgaaaacaggcggatcagcacatcccgaagcactggggaattatttgtgtatatgaagagaacacctgtggcaataaaaagattgtggtagagattgatcagatccccggtgtaaacccgaatgtaaagctggcacggcagctggatttgctgtggcggccggagctggccctcttgcaggaatggaatggaatgcccaaatacaagtggcagagcaaggcatttgtccgggagaaaatcctggagcggattccggaagaaactctgaagcatcagatcaccgggcttttatttgaacgggactatgaggagctgctggcgcagatccgtgaagtacagaaaactacgcgaccacggcgtcgcaatatgagtgagcagcgaagaacgattaaagcagtgcggaaaaagcgaagcgctgcaaaaaagcgtgcaggcagctgaacacggcagacaggaagaggaatgacgatggcccttcagtttatttttggaaattcagggagtgggaaatcccgttatttatatgaacagatcatccgggagtcgcaggtacacccggagaaaaattatattgtgctcgtgccggagcagtttacgatgcagacgcagcgggagctggtacatctgcatcccagcaaaggcatcttaaatattgatgtgctcagctttggaagactggcgcatcgggtttttgaggaggtcggaacggatcggcggacggtgctcacagagaccggtaaaaacctgatgctgcgaaaagtggccattgagcaaaaggaaaatctgcaggtgcttggaagcaggatggaccgcccgggctatgtctcagaagtgaagtctgttctctcggagctgatgcagtatgaggtaggggaggaagcgcttgaggaaatggagcgcttttctgcaaaacgaccgcttctgcaggcaaagctgcatgatcttcgctgtctgtatcaggcgtttcttgcgtatcagagggaacggtttttaaagcccgaggagctgctggatgtgttgtgcaacgcaattccgcgttcaaaacagctgtcgaagaccgtgcttgccttggatggctttgcaggatttacgcccgcgcagatcaaggtgatcgaggagctgctcatccagtgtgagaaggtgcttctgacagtaacgatcgatgcgaaggagtcggcattcggtgcgattcacgagcatgagctgtttgcaccgggacgcaggctggtacagggcgtgtgccgtgcggcacagcaggccggacgacgcagcccgggagccgggcagatggaggagccggtcgtgcttggaaagacggagctgccgcgcttccggaaagacggggcgctccggcacttggagcagaatttgttccgaagccaaagagagccgttttgtggatctcttgaggagctgtcgatgcatgtctcccagacaccggtctcggaagtacactttgcagcgcagacgattgcgcagctggtaagggaaaatgggctgagatatcgcgacattgcaatcatcaccggcgatctctcttcttataataattatgtgcggaaaatttttccgcaataccatattccggcatttatcgatgagacgagacgaatcctgctgaatccatgtctggaatttgtccggggtgccctggagatgtgcgagcgggactttgcatgcattccggtattccgtttcctgcgcacacagatggcagggattacgcgggagcagatcgatcggctggaaaattacgtgctcgcgacaggaattcgcggcaggcgcaggtgggaacaggactgggattaccgggtcggcggcatcagcgaggaggagctggaggcacggaaccaggaccgccgtaccgtcatggaattgctgggagactttccggcacagatggcagtgcggaaccggacacttcgggagtatgcaaatgcgctggtcgatctgatggagcgatgtgatctggaagagaagctgcgaaaccgggcggaggcactgcagaaggccggaaatcaggaggaagcggaggagtatgaacaggtctatggcattctgatccggctgttggacgagatggttgagctgctcggggaggagccgatggagatcagggaatttacggaaatcctggatgcaggactttcagaggcgcgcattggaattgtcccgccgggaatcgaccaggtgcagatcggagacatccgtcggacaaggctttcgaatatccgggttctgttttttctcggactgaatgacggctgggttccggcgcatggagatgggggcggaattgtcaccgatatggagcgggagcttttaaaatcgaccggaattgagctggcaccgtcggcgagagagaacagttatattcagcgtttttatctctatcagaacctgactaagccgcgggagcatctctatctttcctggtgccttggcagcagcgacgggaaggaaatgcgcccttcgtatctcgtgtctgtgatccggcggctgtttccggcattgcaggtatgtgagactctgccggtaggctcgaagcttacgcagattacttcaaaagagagcggaatggattattttctgaatggattgcagcaaagccgggagggagagaccgatccggagtgggagactctgtattccttttaccggcaggatccgaagtaccgaagtcgggtgcaggcgctcatgcgggcagcgcttcaagatggagtggcagccccgctttcttatcatacgtcccgggagctgtatggcgatgtgatggcgaacagtgtcacgaggctagagcagtttgcggcctgtgcatttgcgcattttgcaatatatggattgcgcctgaaagaaagagatctctatggagtgaagccgacggatctggggattttgtttcaccgttccctggagcttttttcaaaacggctgcttggaagtaatacagactggacggaactgacggagcaggagcagaatgcgctgatggagcgctgtgtcgatgatgtgaccgcggaatatggcgggaatgtgctgcacgatacggccagagatgcctatacgatcatccgcctgaagcgaattttatgcagatctgcgtgggcgttgcatgaacagctggcggccggaagcttccgaccgagcggtattgaactgtcgtttgatgatattccggagctggatgcggtgaatgtccgccttgccgagaagagccggatccggcttcaggggcggatcgaccgggtggatactgccagaacagatgaagcggtctatgtgaagatcgtggactataagtccggcatgactgaatttaatccggtctcactttactatggtctgcagctgcagctcgtcgtttatctgaatgcagcgctggagatggaggaaaagcaggaacggcagcgcaaggttattccggccggaattttttattatcatatgcaggatccggtacttgaaaaggaggcaggcatggataatgaacaggcgcggcagaagctgcttcggaagctgcgaccggatggaatactgaacagtgatgaacaggtgctgagcatgcttgaccggaatctgaccggggattctcttgtgatcccggctggacgtaaaaaggatggaggattgaaagctgcttcgagcacagcgacgacggagcagttccgtattttatcaaaatacgtgaaccggaagatggcgtcgatgggagaagagatgctgcagggaaaaatagcaccggagccatatacggatggcgtaagatcagcctgtgactactgtggatatgcggcagtgtgcggatttgaccggaagctgcccggcatgtgtcgtcggaagcttccgtctttatcaaaaagcgaggtatggcagaagctggaggaaacatgcaaagaggaggaggacgaccgtgaagtggacagaggaacaacagaaggtcattgatacgagagaccggaatattctcgtatccgccgcagccggttccggaaagacggctgtgctggtggcacggattctggcgcttgtgacagatcctgcccatccggtggacattgatcggcttctcatcgtgacgtttacgaatgcggcagccggtgagatgcgtcagagaattcgggatgccctggaggcacgtgcggaggaggcaccggagaatgcgcacctgcagcgtcagcttgtcctgatccataatgcgcagatcacgacgatccacagcttctgtctccaggtattgcgaagccatttccacatgatcggccttgatccgggcttccggatcgctgatgagggagaaatgctgctgcttcggcaggatgtgctgaaagaaacgcttgaggaagcgtatgagcttggcgccggagaggtgcacacggcggaaacagaggaattccgccagttgttagagcagcttgcgccgggaaaggatgaccaggcggtacagaacgcacttttgcaggtgtatcagttttcacttggacagccttggccggatgagtggctggccggatgccggatggcatactgcagaccggatggagaggagacgacgccggaaccggactgggtacgctttgcggtgaaggatacgaagcgtgtactggctgatgtacgggaagagattctttatgcgattacgctgtgtcaggcagagcatgggccgtatatgtatgaaaaagcgatgcaggatgacctggcgatggtggaggtgttgcaggcggcagacggctaccgggaactcgcaaaggcgtttgccgtatccgggacttatacaagactgagtacgaagaaggatgagagtgtttcaaaagaacaaaaagagcaggtacaggagctgcgcgccgggatcaaagacgcgcttgcttctgtgcggatgcagtatttttatgaccgtccggaggtgcttgaggagacattttatgcaagcggtgtggtcgtgcgtgccctaaccaggctggttgaacgttttatggaaaagctgacggagaaaaaacgggaaaaaaatatactcgatttttcagatttggagcatctggcgcttgagattctggtggtacacgatgaaaccggtacacaggcgagtccggctgcactggaatatgcggagcagttcgaagagattatgatcgatgaatatcaggacagcaatctcgtgcaggagctgatcttaaacagtgtcgcagggcgtgggcgcggcgaagcaaaccggtttatggtaggtgatgtgaagcagagtatttatcggtttcgcctcgcctgtccggagctgtttctggaaaaatatcagacctatcgggagcgggagaatgcctgccgaatcgatcttcataaaaatttccgcagccggagcgaggtacttgacggagtaaatgagatcttccgccagattatgacagaaaatttaggcgggattgtgtatgataaggatgcgatgctttatccgggggcggtctttgcaccggattcgggtgaagtgaggcggctgccggaatttttacttctggatccggaggaccaggataagcaagaggcggaagcacggcttgtcggcatgcggattcagcagatggtcggaagctttccggtctgggatgcgaagctctcggcatatcggccgatgaaataccgggatattgtgattttgctgcgcacggtgagcggatgggcagagacgtttggcgaggtactgggtgatatggggataccgtgctttaccggttcgcagaagggctatttttctgcggtcgaggtgcggacggtgcttgcctatctcgaagtgttggacaatccggtacaggatattccgctcgcggcggttatgcgcagtccgatcggtggattttccgatgaggcacttgcgaagctgaggagcgcgtcagaagagcgacgattttatgactgctgtatagcctaccgtgacaatggggaagatgcaggcttgcggctggcgcttgatacgtttttccagcagatggagtattttcgggagaaagcggcctatacgccaatacacctgcttttgtgggagattctggatgtcacaggctacggtgcctatgcggctgcgcttcctgccggacggcagcggaaagccaatctggatatgctcgttgaaaaggcgattgcgtatgaagcgaccagctaccgtggattgtatcatttcatccgctatattgagagtctgaagcgctatgaggtcgattacggagaagccagccttgggacagaatcagatgataccgtgcgtattatgagtattcacaagagcaaaggtctggaatttccggttgtatttgtgagcgggcttggcaagcagtttaatgagacagagctgcgtggacgccttgccttgcattcatcgtttggtattggctgtgattatgtcgatacaacactgcgtctgcgtcagccttcgctgctgaaaaaagtgattcagaagacatcggctctggaaaatctcggtgaggagctgcggatcctgtatgtggcgatgacgcgtgcgaaggaaaagctgatcctgaccggggcagtaccgaatgccagtcagaagctggaaacagggcagaccttaaatatcagagcgatggaaacgctgtcgtattcgaccctgactaaagcatcctcttacctggactgggtactgcctgcgcttttgcagcattccggggaggactgctttttgctccgggtactttcggcagaagatcttctggaggaaagcagggaagcaaagacatcggatctctggcgcgtactggagcatccgaaggaggaaccggaggcgagacgttatctggaacgggtgttttctgcgggatatccgtatgagcaggaacaggcgatctccggaaaggtatccgttactgagctgaaaaaacagacacagcttccggaggagcacgaaggcctggagctgtatccggtgaaggagagcaaagggacagtaccgcgtttccgcgccgcagagacgacgatgccgggaagcatgcgcggcacaatttaccatgcgttcatggaaaatttggattttcataagaaagatgtgctggaaacacagttggaagaatggataaagtgtggtaaaatgacgcgtgatgaggcggctgccgtgcgtatttcggatatccggcgttttctggaaagtgatatcggacttcggatggaacgggcagaagaaggcgggcgtctgcatcgggaacagccatttgtgcttggcgttccggcacatgagattcgcagctgctggcagtcggaagaacttgtgctggtgcagggaatcattgatgcatggtttgaagaggacgatggcattgtgattgtggattataagacggacagggtgcggacaatgcaaatgctggccgggcgctatcatatacagctggaggcttatgcaaaggccgtggcgcgtctgaccgggaaaaaagtaaaggaatgcggaatctattccttttgcctcggacgctacgagattctgccgcagatccacagtggaaatgagcaggagtgagaattatcaatgtggaagaaacaaaaaatggaagtggcaaaagaacagtgtatacatgaacaggcggcaaaggcacagggctggaggttctttctggcaggttttttcctgacagtactgatcacagggatcgggtttgcgtgcctgacggtgtggccatttggcgataagacggtattgattatcgattcgctgcaccagtacctgccgttttatacggatatgcacaacaagcttgtaaatggaggatcgctgttgtattccttttccggcggacttggttacaatttctggtcaacgtatgcgtattatctggcgagtcctctgaattttctgatggtattgatcccgaccgcaaatgtctgcgattttatggatctgatgatccttttgaaaatcggtctgtgcggaggatgctttgcctggtatctgcacagacgggatccgaagcggcgttatcttccggtcgtatttggtgtgatgtttgccctgagcaattttgtgatcgggtattattttaatctgatgtggctggacagcattgcaatgcttccgattatgatgtacggaattgagcagattgtgaaagggaagagcggacggacattttgcctgtcattgttttacgcactctggtgtaattattatattggatttatgctctgcctttttgcctgcctgtattacctcatccgttggatttcagcggaacagatcacatggggcaggatctggaggagcgcgctttgctttacgtggtatgcattactggcaggcggtatggcgtcattggtgctgcttccggcatttatgggactttcctcttcagaatccatgcagggcaatacattcccgaccgtgatcaagttttacacaagccttctggacatgctgaaaaatcacatggcatttcttgagccggttaatatttccaatacacaggtggggttaaatgtatattgcggaatttttacggtcctgcttgccattttgtatctgtttgaccggaagattcgtctgcgggagcggattgcccattatggactgtgtgcatttttactgctgagcttttctttaaatattctgaactatatctggcatggtttccatatacagaacgggcttccgaaccgattcgcctttttgtatatcgcgctgctgctttgcatggcttatgatgcaatcggccatattcgcagttactggctgccggagctgtttttcgcatggctcgtaccggcggcatttgtcgcatactgctatctgcatccggatgcggaacaggagctggagccgtggatctactacatctcctttgggctgatggctttctactttggtctgatgctcatcgggcgtctggcgaagaaaatgaggatagagctttatagcgcacttatctcagcggtactgctggtcgaggtggcggcgaatgcgatttatggtatcagctgcaatggcggtgtgacaaggagcatttacattgcagatcagatttcctatcagaatatgatggcagatcagaaagatgggagctttttcagaagtgagatcgatcggcagcgcatgcggaatgtgacgatgtatgcgggaggaaatgcacttgtcatgttcaattcgacgatgcttgagtcggtgatccggctgtgtgacagccttggcattgaggcacggacgaacaaaaacggctatctcggtgtgacaaagctgatgaatgatgtattcggcattaagtatctggcatcgccgtcaaaattggcagagacgatgtaccagtttacgcgcgtcgacgaagatggggaactggcgctttataaaaatgacaatgccctttcgcttggctttatggtgaaggacgccattcgtgactgggatatcgaggcgggtgagccactgctggtgcagaacagctttgtcgagctggcgaccggtctggatccgatctatgtgctggaccgttatattgatatggcagacggacagaattatgggatcaagattccggaaaacaagcaggtatatctgtgtttggatacgagagtcgcaggcatcgaactgaatacgccggagtatacaaaatcattttctgattatacggatcatctttatgtgatcaaccggacgaatgagagtgatatggcggactttaccgttacgttaaaagagacacagaaaaattcaaccgtgcgcgcagaggtatatacgtgcgcgaatgacgcctaccagaaagtaattgataagctttcagagagccagctgactgatgtgcaggtaaatggcagtcatgttgccggcaaggtggatgtgaaggaagcaggtacgttgctgcttacgattccgtatgatacgggctggacaattcaggttgatggaaaagaagtggagagctattccgtcggcaaggcgctcacaggcgtgcatctggagaagggagcacatacagttgcaatgcgttatatcccgcagggcttttgcgggggtgcggtactgagcatgctcagtctggttcttttcctgatttcagtcctgatcggcaggaagcgggagaagaagctgctcagtcagacggtacaggaggatctgaccgagccggcatctgttttgcaggatgagccggcagatgacgggcagccggaagcgatacagacgcgaagcgccggtataggaacaatgataaatcagatatcagataacagataacaggatatttggaaataccgtgacggcttatagaacggaggagtatgaaaaaatggacatgaaattttcagagaaagcagaacagcttgatgcaggtatctttgcagtgctcaatgagaagaaaaacgaactcgtaaagcagggacggacgatttataatctgtccgtcggcacaccggattttccgccgatgcctcatatcatggaggcggtcagcgaggcggcaaggcgcccggagaattacaaatacgcgctctcagagcttccggagctgcttgatgccgtgcagagcttttatcagaagcggtttggcgtgcagcttgaggcagacgagatcatgacgatgtatggctcgcaggagggaatggcacatatcgcatgggcgctgtgcaatccgggagagctcgtactcgtgcccaatccgggatatcagattttcagtgcgggcccgcggctctgcgatgcggaggtgtgggagtatccgcttttggaggagcatcagttcctgccgcagctggatgagattccggaggaaatcgcgagacgggcgcgctatatggtcgtcagctatccggcaaatccgatttgccgcacggctccggagtccttttaccgggatctgatcgcatttgcaaaaaaatacgagatcatcatcctgcacgataacgcttattcagacattatttatgatggaaggaggggcggctcctttctggagtacgagggagcaaaggaggtcggaattgaattttattccctttccaaatccttcaattacaccggcgcacgcctgtcctttgcagtaggcaaccgtgcggtgattcagaaattcaaggcgcttcggacacagtttgactatgggatttttcttccggtgcagtatggggcgatcgcagcactgaccggcccgtttgacggagtgaaggagcagtgccggaactatgaggagcgtaaccgcgtactctgcggtgggctgcgcagtatcggctggaatgttccggatagcgaggggacaatgttcgtatgggcgccgttaccggagggctacacgaattctgcggacttttgtatggagctgatggaaaagtccggcgtgatctgtgtgccgggaagcagcttcggtacgctaggcgagggctatgtgcgtatggctcttgttctgccgccggagaagctgaaggaagcggtcgagagcatccggatgagtggaatattacatagacaggaaggaacaaaataaatgcagaataaaaatgaatggatcaggaagcttggagaacaggtcgagatccttgtagcagagccgatgaagaatcacacgaccttccggatcggagggccggcagatgcgctggcgcttccgaagacaccggaggaggtggcagaggtggtgcacttctgccatgagcatgctcagccttattacgtgcttggcaatggaagcaacctgcttgtttcggatgaaggatatcgcggccttgtgctgcagctctatcggaacttcaacgacattcaggtgaacggggagacgattaccgtacagtccggcgcaatgctggcggcggtcgcacggacggcgtatcagaccggtctgaccggcctggaatttgcctctggcattccgggaacgatcggaggcgcagtcgtcatgaatgcgggtgcttatggcggagagatgaaaaatgtgctaaaagaagtgaccgtgctcacaaaagaaggggaggtgcttgtgattcctgcaaaagctttggagctgggatatcgtacaagcgtaattccgaaaaacgggtggatcgtactcggggcggttctccagctgaaaaagggcgatcaggagcagattcttgcacggatggaggagctgaaagagcagcgcatcacaaagcagccacttgatctgccgagcgcaggcagtacatttaaacgtccagagggctattttgcaggtaagctgatcatggatgccgggctgcgcggatttacggtcggcggcgctcaggtatcggagaagcactgtggttttgtcgtgaaccgcgggaatgcgacggcggcagatgtgtgggaactgatctgcgaggtaaaacgccgcgtaaaggaaatgaccggtgtggagctggagccggaggtgaagctgttgggtgatttcccacagcggtaaatccggcatcataatcacacaaaggatgagacagaagggttgaaacgatgagatttgtaattgtgacaggaatgtcgggtgccgggaagagtactgctttgaaaatactggaggatgtcgggtatttctgcgcggataatctgccgctgccacttcttgaaaagtttgcggagctggcctgtacgccggagagcgaatataataaagtagcgcttggtgtggacatccgtaccgggaaggagatcgaaagtcttccgggagtgctggaaaaactggcaatgcggggcttttcctatgagattctctacctggatgcgggcgatcaggcactgctgaagcggtttaaggagacgcggcgcagccatccgctggcgagggacggccgcctggctgagggcatcagaagagagcgtgaggcgttatcatttctgaaaaagcagtccgattatatcattgatacgtctgcgttgctcacaagggagctgcgcagtgagatggaaaaaatttttgtggacagccgggaattccggaacatttttgtgacggtactgtcttttggatttaaaaatggcattccggcggatgcggatctggtctttgatgtacgcttcctgccgaacccgtactatgtagagaatttaaagcaaaagacagggttggatccggaggtgcaggagtatgtcatgggctatgatgtggcacatgcgtttctggcaaagctggaagatatggtagaatttctgctgccaaactatgtggcagaaggcaaaaatcagctggtgatcgcaatcggctgtaccggaggccatcatcgctccgtcacgttggcggagcagctctatgtttacttgaaagggcatgaggaatatggtctgcggatcgagcaccgcgatatccgaagatagccttacatcagcaaaaagagaggaggggaggcacgtgtcattttcgtctgaggtaaaggaggagctttccagacaggatacgtcggcgcggcactgccgtttagcagagctggctgcgattatcggtatgtgcggagatgtctgcatctcggccatggagcgctaccggctccgaatccatacggaaaatgaagcagtcgcaagaaaatgctttactttattgcgaaaaacatttagtataaatagtgatgtgtccgttcatctacataagcgaaacggaaagggcagccagatctatacacttttgatccgggatcatgcagaagtgcttcgtgtgctgcaggcacttaagctggtagatgctgcaggtgagattcaggaacaggtctccccggccaatcagctgcttgtacagaaatcctgctgcaggcgggcgtttatccgcggcgcatttctggcagccggttcgatcagcaatccggagaagtcctatcactttgagattgtctgtgtctcaccggagcgagccgaacagctgcaggcactgatccgcacgttcggattggatgcgaagaccgtacagcggaaaaagcattatattgtgtatattaaagaaggtgctcagattgtcgatatgttgaacatcatggaagcgcatgtctctttgatgaatctggagaatatccggatcgtccgcgagatgcgcaatgatgtgaaccgaaaggtgaactgtgaagcggcgaatatcaataagaccgtgagcgcatcggtaaaacagatggaagacatccgatatctggaaacaaggcaggtattggatcatttgcccccgaatctggtacagattgcaaggctcaggctggaaaaccaggatgcctctctgaaggagcttggagagatgctggtgcctcctgtgggtaaatcgggtgtaaatcacagactgaggaagctgagccgtctggcggaggagttaaggcaaaacaaggagggatactattatgactaagaaggaaatcaccattcgactttcaagtggtctggaggccagaccggtagcaatgctggtacaggtggcaagccagtttgaaagcgagattcatgtgatcagcggagagcgtaatgtcaacgcgaagagcatcatgggaatgatgacgcttggactttctgccggtgagaagatcgtggtgacagcgaatggcgttgatgaagaagacgcaattcagaatatagaaaagtatttaagcgcggcaaagtaaaagtgttgttgattaaaattaaaaaagcatttttgcggggcatacttactgcagaatgctttttttctttgatttggtgaggaaccaccggtactacaaaggaagaaaagaggagtgtgtgatggaactgagcaatgcaggcagtctggatctgaaatatatacgggacctctaccggatctcctttccggatgtggagcgtaagccattctcgctgattgagcgcaaggcggcaatggggacaatggaaattctgatgatgtcagaaggaggagagcgaatgggactggcgattaccgcttcagatggggagctggtgctgctggactactttgcggtggatccgtctaagcgcggccagggagccggctcagaggcgctgcagctgcttttggctctgtacaatgatcgacagttcttccttgagatcgagcgaccggtagacgatgcaccaaacctggaagagcgtatcctgcgtaagcagttttatctgaaaaacgggatgctggagaccggtattaagattcggctcttcggcattccaatggagcttcttacctcccgcccggggctgacctttgaggcctgccgtgggatgtaccgggagctgtatggaccgatgtatcagaaagtagtaagtttggaaagtcaggagtgatcattatggaaaaaaagaaaccggttctggtagtaatggcggcaggaatgggaagccgctatggcggaatgaaacagatcgacccggtcgatgagtacggtcatattattatcgatttttcgatctatgacgcggtgcgtgccggattcgagaaagtggtttttattataaagaaggaaaatgaggagctgttccgcgaagggatcggtgcgcgtatctcgaagaaggtggaggttgcgtatgtttaccaggatctgaatgcgcttccggatggattttctgttccggacggacgcgtaaagccatgggggacagggcatgcagtgctgagctgccgtggcgtggtagacggtccatttgcggtcatcaatgcggatgattattatggcagccatgcattttccatggcttatcagtacctgacttctgaggacgaacagacagaggatggaaaatatcactatatgatggttggctatcagattgagaatacgctgactgaaaatggctatgtatcccgcggcatctgcgagacggatacagacgattatctgcaggatatcaatgagcggacgcacatcgaaaagcgtggagaggagacagcctacacagaggacgatgggaagacatgggtgacaattccggaaggaagcattgcttctatgaatatgtggggatttacggagagtattctcactgagctggagcagcgctttacagctttccttacgaagaatcttccggtcaacccgctgaaatgtgaatatttccttccgtttgtagtcgatgaactgctcaaggagcacaaagcctccgtcaaggtgctgcgctctgctgacaagtggtatggagtgacctacaaagaggataagccgcaggtcatggcagcgattcgtgcgctgaaggcacagggactgtatccggaaaagctgtgggaggataaataagtgaaaatgaacagagaactgtcggaggttatcgggatgtttgcgttccccggcacatttgtggaagcgatcccatatgggaatggccacatcaacgatacttatcgcctgacttttgaacagggtggcagactggtacattatattttgcagcagatgaaccgcaaggtattccggaagccggaggagctgatggaaaatatcgaaggggtgactgcgtggctgaaaaagaagattcaggaaaatggcggcgatatttaccgggagacgttaaatgtaattccgtcagcagaaggaaaagcgtggtgcgtagatgacaccggtgagtactggagagcttattattttatcgagaatgcgctttgtctggatcaggcagccggtactcaggatttttatgagagcgcggtggcattcgggcattttcagcggttgctttcagactatccggcggataccctgcatgagacgattccggatttccacaacacaccggaccgtttccggaaattccgggcagccgtggaggcagatgtctacggacgtgctgcagctgtgcaggatgagatccggtttgtaatggagcgggaggcgtttacccatacgctgatggaccgtctggccgagggaaagcttccgcttcgtgtaacacataatgatacgaagctgaacaatatcatgctggatgaaaagacccggaagggcatctgcgtcattgatctggataccgtcatgccgggactttccgttaatgattttggcgattcgattcggttcggtgcaagtacaggagcggaggatgagccggatctgacgaagatttcctgtgatctggatctgtttgaagcttacacgaagggctttatcgaaggatgcgcgggagccctgaccgaagaagagttgaatcagcttgtgaatggtgcaaagatgatgacgctggaatgcggcatccgcttcctgacggattatctggagggggatcattacttcaagatccacagagacggacagaatctggaccgttgccgtacccagttcaagctggtagcagacatggaacagaaagagatggaaatgcaggaaatcgtaaataaatatcgataagctggcgagaaaagagtcggagatatcactcgtgatttcgggtggatcgttccgactttttttattttatgcggtcctgtaaagtaaaaccgtcaagcatcgggatgcaaaacgtccgggcttccgcactacctccggtcccttgcaagtgcctgtcgaatccggtcataatggcgaagaatatgaaagaaaacgttttaggaaaaaacgaaaaaagtcgaaagtaaggcacgatatggtacgccggaaaccagtgtgtttttcgcagaacgaaacaacataaagtaaaaatgcataaaatagcagtgataaaacatataaaaacgacgaaacgacggaaaataataaaatcatattgacaaaatcggtagattgctgtttaatatgaatcagaaaacgattaagaaaagacacgttacacaagttaaaggagaaacgtatggtttccatgaaggatgttgcggcagcctgcggagtatcagtagcgactgtcagtaaagcattaagcaatcaccgggacatcggtgagaggaccagaaagctggtgaaagagacggcagagcagatgggatatctcccaaatcagtctgccagatatttaaagacaaatcgaagctacaacattggcgtactgttcgaggatgcagccgggagcggtctgacacatgatttcttttccggagtactgcagagcctcaaaaagacagcggaggcaaggggatatgatgtatcatttctgaacagtacgagcttggatatgtcctatgtggatcgggcaaggtaccgtgggtttgacggagtggcaattgtctgttgcctcgattataacaacccgaaggtagcggagctgcttcgcagcagcatcaaggtagtcacaatcgactatctcgcgaacaaccgcacggcgatcctctccgggaacacggaagggatgcactgcctgatggattatctcttttctatgggacatacgaagatcgcatatatctgcggcgacagcaacagcgtcacgagacaaaggctggccgcctactacaggagcatggaggagcatgggattaccgttccggatgaatacgtccggccggcactttaccgggatctgaccaaagcctatgagctgacggaggagctgttaaagctaaaggatccgccgacctgcatcctctatccggatgatgtagcctgcttcggaggaatcaatgcgatcagggcaaacggacttgcgataccagaggatatatcggtagtcggatatgacggggtaaaggcagcacagtatgaagagccaaggctgaccacctatggtcagaacatcgaagagatgggaagagaggcggcacttcggctgatcgaggaaatcgagcaccccatgacgacggtaccggggattcataccgtatccggacatctgatggaaggacagaccgtgaaacggctgtcaccatttgcctaacaggatttgttattgcaggttttctgcatgacagatagacaggaacgaacttatttaattattaaaaggaggatacacaatgaaaaagaaacaggttttgagcacagtacttgcaacggcaatgatcgcttccttaggcgtaacggcaagcgcagctaccgatgtagcagccaatgagctggcctataagggagagcttgagattatgcattactctacgtctgaggaatcagaaggaaacggcggctctgatggattccgtaccgtactcgctgcatgggatgaggcacatccggatatcacgctgaaccagaacgtacttgcaaacgcagagtacaagacccagatcgcaacactggcagcagccggtgacctcccggatgtattcctgcttcagggtatgaatacgaaggactgggctaagcagggactgatcatggatctgaccgatacgattaaggcttctccgtattataatgattacgtacagaattatttcacaccgtttacagacggcgattccatttatggatatccggtactgacaggcggtacctgcaccgttgtgatctatgacaaggcaatgtggaaggaagccggatacgatgcattcccgacgacctgggaagatgttgagaaggcagcagagtacttcaacggacagggcatcacgaccgtagcattcggtaacggcggaaagtggcaggcgaactcagacttcctgtcaaccttaggaaaccgctacaccggaccggactggttcctgagcctgatcaacaaggatggcgcagcatttacagatgaagcatttgtaaaagctctgaaggagacacagcatctctttaatgagactgacattttcaatgaagacttcaacgcagttacaaacgaagatgctcgtgagtactatatctcaggtgatgcagcagcattcatcggcggtaactgggatgagtcttacatctgggctactttgaaggaaagcgatgaagagaaatggaataacatgggctttgcagttcttccgcagccggcagatgcaaccgaggctccgaattctcagaacatcggtcttggatatgcagtagcaattaattctaagctcgctgatgatccggataagctcgcagcagcaatcgatctggcacaggaagttaccggaccggcatttgcaagctatgtagcagagaattatgcacttggcggactgaccaaggttggcgatgttgacctttcccagtttgaccagatcactcaggacttctacaactattcctatgttgatacagagccgtgcgagatctatgattcctacatcacaaacgctgtttgggacgttctgaataccgatctgcagagcatgatgaacggtgaaatcgcaccggaggatgtagcggcaaatgcacagaaggcatacgaggagaactattaattccggtataaagacgggaaagactccggtcttcggcaaagaagaggataaataaagcagctgctctaagaggagcgtcataaagacatgaggccgttctgcctgcggcagcgggcagagcggccttgtatcatatctggaagaaccaggagtcgggacttccatctggctgccgacagcaggaaggagagagaatatgttaaatgcaatcaaaccaaagacaagaacggttgttttgtatctgatggttcctgtagcaatgttcatatttacggtatttgtgccgctgattacggcatttgtttacagctttttcgagtggaagggcggacctcagaagaccttcatcggaatcgagaattacacaaagctttttgcggacggtaccttctgggaagcgttcggacataatatttatctggttatcgcatgtattatcggacagatcggaattgcctttgtccttgttatgatggtaaattccaaactggtatactgcaagacaattcaccgtaccttcggattttttccgagcacgatctctgcagtatgtatcggattgatctggaacatgatttatcacaacaaatatggaatactcaactggttcctgaccgcaatcggacgaaaagatctgtgtcaggtatggttaaacaatacaaagatcgttatgctgcttgttacgatcccgctgatctggcagtatatcggatattatatggttattatcctttctgcgatcgcatcgatctccacagatatctttgagagtgctgagattgatggtgcaaacggatttcagaaggcagtatacattacacttccgctgatcaagaatacaatgttggtatgtatcacgctctgtatcgcgggtaacatgaaggcctttgataatatcttcgttatgacaaagggcggacccggtacggcatccatggttatggcgatgtatggataccagatttccttcaaccaaagcaacatgggctacggcagctgtatttccgttggaatcttcgttctgtcgctgctcgtaatcggcggttcacaggcgctgatcaagtatgtcacaagagaaaaggaggcgaagtaaaatggctaagacgaagagtgccggtgcacacaaagcaaaaaagggtctgcttggcttttttatgaatctgatcctctggattttctcgctttcctgtatttttccgatcgtgtggatgctttattcctcactgaaggaaaagcgggcatttaacgcagacattgtcggactgccgaagagcccgacgcttatcaactacacgagaatcctgaccaatccggattatcaccttccggaatctatgttcaacagcttccggacgacagcgttatcgattctgctgatcgttgcattcagctttatcgtaggctacatcctcgcgcgggtgcgctttaagctgaaccgtgtcctgtatgttatgttcctgatgggcatgctgatcccgattcactctctgctcgttccgatctatgttgtatttaaaaagtgcaatatttccaaccagtggtttactctgcttctgccgtatgtttccttcggacttccgatgggaattttcctggtagaaggatttgtcaagactgttccggttgacctggaggaggcggccgccatcgacggcagcaatttcacacacacgctctggacgatcattttcccgatctgccgtccgatcctcgtgacggtggcaatcattcaggtattcagctgctggaatgaattctccttcgcactcgttctgattaaggacgtcgggctgcagaccgtgccgcttgcgctgacacagttcaagggacagtttgcatcagactatccaaagcagatggcggcaatgctgctgaccatggcgccgatcgtggttctgtactttgcattcagcagacagatcatcaagggtatggtcgcaggagcggtcaaaggctgatattacaatgaaaagagcgggttctgtaccgcggttcgcgttgtcgtctgagctgcggatgcaggatccgttttttgcggtataagatgatgatgtttgcagaattgcgggagctgctttgcagcggagcaattcgtaggcatcagttgtgggcaaaacaccgaaaagcagccatttttcgcagaaaaatgagcggaaatatgcaaaaaaaacatagacacgaagaacggaacatggtacaaaagagatagataaatactgcattatttcagcggaagcagcttgtataaaggaaaaaaattacaggcaaaacaggctgaaggattgcggaatatgaatagaaaaaggagggctttacgaatgaaatttacagaaggatactggctgcgcagtgagcgtgcgaatggcctgtttgcgacacaggcttatgcggtggataagattccgggtggtatgcggatcgtagcgccgacaggtgcgatcaatcacagaggtgataccttaaatatgccgacgattacgatcgaattcaaggcatgcgctgccgggacgatttccgtgcgggcatggcattatgagggatacgacaatcatcttccacagtatgaaaagcatgaagagctgatcgagccggaggtacagatctcggacgacgaggcatttctggatgcaggcgcggtgcaggtacgcgtggaccgcaaaaatttccgatattcctttgaggcagacggaaaggtgctgacgagctgcggattccggaatctgggctatatgcgctgggaccgccagccgtccacaatgcttccggaggccaattatctgaccgagcgtcatgagccgtatatggtgacggagctgtcacttggtgtcggcgaatgcgtctatggactgggagaacgctttactgcgtttgtgaaaaacggacagagtgtcgatacgtggaatgaggacggcggtactgcgtcccagatcgcctataaaagtattccgttttatatgacaaacagaggatatggtgtatttgtagacagttctgataatgtatcctttgaggtggcgagcgaaaaggttgagtatgtaggattttctgtgccgggtgagcagctgtcctattatttcttctatggaccgacaccgaagcagatcttaaagaactatacagcactgaccggacttccggcacttccgccggcatggtcgtttggtctgtggctgtccacctcctttacgacaaattatgatgaggagacgacgagctcctttatcaatggaatgatcgaccgcggcattccgctcagtgtctttcattttgactgcttctggatgaagggcttccactggtgcgattttgagtgggacaaggactgtttcccggatatcaaaggcacattgcaacgttatcatgagaaaggcctgaaaatctgtgcgtggatcaatccgtacattgcgcagggaacgtcgttctttaaagagggtgccaaacacggatatctgttgcagcgcgcggatggaaagggcgtatggcagactgataactggcaggccggaatgggactggttgattttacgaatccgaatgcagtaaagtggtatacagataagctgcgtaccgttctggacagcggtgtggactgcttcaagacggattttggcgagcgtattccggtgaatgttgtttattatgatggcagtgatccacatgcgatgcacaattattatacttatctttacaataaggcagtgttcaatcttctgaaagaagtaaagggagagaaggaagcggtattgttcgcgcggagtgcgacggcaggcggacagcagttcccggtacactggggtggtgactgttttgcaaattatccgtcgatggcagagaccttacgtggcggactctcctttgcgatgagcggattctccttctggagccatgatatttccggatttgagagtacggccacaccggatctgtacaagcgctgggctgcattcggacttttgtctacacacagccgcctgcatggttcggcaagctaccgggtaccgtggctgtttgatgaggaggcatgcgatgtcgtggccttctttacaaagctgaagtgccgcctgatgccgtatctgtatgcgaaggcgatcgaggctcatatagaaggtacaccggtgatgcggccgatggtctttgagtttaccggtgatccggctgtgaattatctggatactcagtatatgctcggtgaggctctgctcgtatccccgatcttccgggaggatggcgtgagcgaatattatctgccgcagggaaaatggacccatctgctgagcggagaagtgcgtgagggtggtcgctggcaaaaggatacatacgattatttctctatgccgctttatgtaaaagaaaacacactgcttccggttggatgcgaggatatgcgaccggactatgattatgaaaaggggctgtcgctgtatctgtaccagccggtggatggtgtcgtggcgacctgtcagattccgtccacagatggcagaattgtcaatacgatcacagcagaaaagacagccggagctgttacggtccatctggaaaaggagctgggtgaggttacgatcacagtacatattggtgatgagaaggtgaaacaggtgatcccggcgggcgtgaaggagttttcggtcgtattatagatcattattatagaaaggacagaatgcagacatggaaagacagagcttaaatggcagatggcagatgcgcagggtcggcgatccggtattttcagaggccattgtgccgggcagtgtttatacggatctgctgcgcaacggacagatggaggatccgttttttaaggataatgagctgaaggcgttaaggcttatggacgaggattatgagtacgttaccagctttgactgtgcaaaatccgtttaccgttcggatcgcaaggtgcttcgctttgacggaatcgacacgatcgcggacgtctatctgaacggagagatgatcggaagtccggacaatatgcatcgcacctgggagtacgatgtgaccgaggaagtacaagagaaaggcaatgagcttcgcatcgtatttcattcaccgaacaaatacatcgcagaggcgtttcaggtgagcaaaacgcatggcagcgaagatgcgatggatggttttgtaaatatccgtaaagcgcactgcatgttcggatgggactggggtgcacatctgccggatgcgggactgttccgtccggtgacactgcttggcgtggatgaggcaagaatcgacagcgtttatgtgacgcaggagcatacaaatggcaaggtaacactgcactttgcagttgatgtggactgctgcccggagatggaagatccgtccggaatgtggaatgcagagacagaggaagtatctgagaatgaagcagatccgcaggagagcggattgtactatacggtaaaggtgacagcgccggatggcacacaggtgcatgccaccggcagtccggaacagcttgtgatcgagaatccgcagctgtggtggccgaacggctatggcaggcaggatctgtatacggtagaagtgaccctttgttttgaaggaaaagagctggattgctggaagcgccgcatcggacttcgtacaatgacagtggatcgatcgaaaaatgagtggggcgagaattttgcgatctgtgtcaatggcgtggatatctttgcaatgggtgccgactatattccggaggaccatctgctcggacgggtgacgccggagacgacgcgggcactgctcgaaaagtcaaaatgggcgaattttaatgcaattcgtgtctggggtggtggctattatccggaggactggttctatgacctctgcgatgagcttggatttgtcgtatggcaggatttcatgtttgcatgtgcggtttatgatctgacgccggagtttgaggcgaatatccgtgcggagtttattgacaatatcaagcgtctgcgccatcatgcaagccttggcctgtggtgcggcaacaatgagatggaagagtttgtctatgcaaagaacagctggctgacgaaaccgcaggaggtgcgggattactatctgatgtatgagcgcatcattccggagatcgtgaaagaatatgatccgcagacattctactggccatccagcccgtcatcgggcgggtgcctggacgagccacaggatccggaacgcggcgatgtacactattgggatgtatggcatggcaataagccgtttacggagtaccggaaattctatttccgtttcctgtccgagttcggcttccagtcgttcccatcgatcaagacgatcgagacctttacagatgatccggatgacatgaatattttctcctatgtcatggaacgtcatcagagaaatggaagtgcaaatggaaagatcatgaactatatgcagcagacctaccggtatccatcggatttccgcacggtactgtatgcatcgcagcttctgcaggcggacggtatccgctatggtgtcgagcatttccgccgcaaccggggacgctgtatgggcgcggtatactggcagctcaatgattgctggccggtagcatcgtggtcatccattgactactgcgggcgattgaaagcgttgcattactatgcaaagcggttctttgcgccgctgatgctctcctgtgaggagcggggtatgatgtcgaatgcacagccgctgaactggcagcattctggcgagtttgaaaaatcgatccgcttaaatgtggcaaacgagacgagagaggatgcgaaggtgattgttcactgggcattgcgtaaggcaagcgccgaggtgctccaatccggtgaggagacagttgccgtaccggcgttgacgagtgtatggctggagaagatcgagttcccaaaggcagatccatattcagagtatatcagctatgagctggaaaaggatggcgagatcatttcggcaggaagtgtcaacttctcttatccgaaatatttccgctacgaagatccgcagctgacctgtcgcgtcatcggtgacgagattgaggtgacggcatctgcttatgcgaaaagtgtggagattttgaatgagaatgaagatctcatcctttctgacaactactttgacatgaacgccgggacgaagcgcgtgaagatcgagcacggtgatgcgggcaagttgcggctgagaagtgtgtacgatatccggtaggaagcagctcccgcaattctgcaaacatttgaatacgtaaatcgctactgtgaaaatggtgccaggttataaagcggttgtcattgacggcaagaaatatctgagtggaaaatgaaggaaaccggaaggacggggcggcaggaggagtaagatgcaggaaaaaacaatacagttaagatctggccaggcgcttctgctgcggcaggtacatccggaagatgccagggctatgctgaattatctggaatgcacctcggcggagacgcattttatggtgcgcctgccggaagaagtgacgttttcgctggaggaggagcaggcgcttctggcagactgtctgtcatcagatcgcagaatcatgcttgcagcctttgccggagactgcatcgttggaaatgtggcgatcgccccggtaggagaacgatataaggtgcggcacagggcaaatcttgggattgcgatcgtgcaggagtactgcaactgcggacttgggaccatcctgatgcaggaaggaatcgcatttgccagggaagctggctatgagcaggcagagcttggagtatttgccgataatgcgcctgcaatccacctgtatcacaagtgcggttttcgggacactggaagaattccgcgggctttccatctgccagatggcagctgcatcgatgaaatccagatggtgaagtttctggtgccaccggatatcgcatgcagtgtgaatgaataaggattgttgtattgtttggtaaaatggtgataaaggggacagctatcgctttagggtaacggtagctgttcctttttatacagcttattatttgatataaactgatgactacgaattgctccgctgcgaagcagcttccacaattttacaaacattcgaaatccgctgagttactacgtagatcgctacgttctcatgtttggcggatcacaaggtcaaaagccttatcaagcaagcatgaaacgcatgaccttttgacccctatgatacacggattgcttcgcatttcatgctctcgcaatcctaaaacacctcaaatccgctcatcggatagcggcagcctctttggcaaatgcagttgtcacaagtgcgtcatatggcacgcacgattccagctctcccgcatctgtcagtatatcctgtagcagctcgaagctttcctgctcaaagatcagattttccttccacgtatcctgagccgcatagcgtgcgacgatcatcgtgatcgtttcaagatccgattccgggaactgtggcgcgatcactgcggcgatttcttccggcgtgtgtgaatgtacatattccattccacgttgcagtgcgtttgtgaatgcctgaatgattttcgggtgctctgagagataaccggattttgtacaataggcggtgtatggcacatagcctgaatcggtaccgagcgaggcgaccacggttccgacgccttcctgctccagtgttgttgcacccggctcgaactctacggtgaagtcgccctttccgctggaaaatgcggcggcagtagagccaaaatcaatgctctgatcgatctgtacctctgatggatcaatgtcattttgtcggagaatatattcaaaaaccatttgaggcataccacccttgcggcctccgagcacatcttttccgatcagatccgcccatgtaaagtccggcatttcctctcttgcaaccagaaagtttcctgctcgctgagtcagctgcgcaaaattgacaggggcatcgcctgcaccgccgctgtacgtgtagatggaagcttccgaacccatgaatccaatttctgcctcaccggagagcagggcggtcatcaccttgtcagcgccaaaaccggtgacgagcgtcaggtcgattccttcttccgcaaaatagccctcttcaatcgccacatactgcggtgcataaaaaatcgaatgcgccacctcatttaatgtgatttccgtaagctcttttacgcttttcgccgttgcctcttttaccgtttccgttgcggcctcttctgcaaacgccatagtcggcagcgccgtcacgctaagcagggcggacaccgccagaaaaatccattttctatttttcatatcgttactcctttacagacatctactgttacagtatgccgtaaaatgcagaggtgttctcgcgcaatatttatttgtgtttctggtgtcactgcaattcttggcaagggcaattctgtaaagcgctgcagccggatgatatgtcaccgaacaagtagcagcgctccctgccatactgtgcgcggaattgttgaggggtcaggccagttgtttttttaaattgcttatgaaaataagagctgtttgaaaatccggttttttcgctgatttcatttaaagaaagggaggaatgcagcaaaagatctttggcacggtcaatacgtgcggtattgagataggagctgagtgtttggtgaaatttcgtatgaaacagacaagaaagataatctggattcatatgaacgaaagcggcaatagagttccggttcaggccgtcagattctagatgttcggtgatatattgctgcacattttgtacaaatttatcggtttcttgatctgtgtatgacgggagggacgtgataacagctgcaggagaggattcagggagtgtttttatagctttgagcagttctttttccagagcagctggatttacaggctttaaaatataactgaagcagtgcattttgatggcttcctgcgcataatcaaaacgctggtgtccggataaaattaaagtgacaatagtgtaatgctgttcctgaatccagttgataagagaaagaccgttttcacgggacatttcgatgtcggtaattagaatatccacctgtttttttgcgataatctgccgtgcttgttcgcagctgtatgcggcaaaaatggaatcaattccgagtacatcacagcgaattgaagatataattccctgaacaatgtaatattcatcatcaacaactaataaattcatatggtcacctcgtagtatgtaagtggtttgtctgttctgcatctgttttcagatcagaaataaatggaatatcaatgtcaatgcgggcaccaagtcccggctcattagagaagaaaatagaagccatatcaccaaacatcaggcgaagccgcatgactgtattgtaaattccgatgccatatccgtttttttgcacttccgtatagtcggtaatatgattgtataatgcgaggctttgttcatcaaagccggttccagaatcaatgtgactgagatgaatccttggctgcccatctttttcataccagtgtccctgaatataaatatggaagggttctcccatcacgacattagctttgattgaattttctgtaagcatgagcagaagcattggaaatacttgggcatctatcatggacgattcaacttggatttgatatgtgagtgtatttggaaaacgcagctgtgtcagctgaagatagttttttgtatagtacagttcttccttgagagaagcactatttctggtgacaagtgtgtaacgaagatgttcagagagcgtctcaataaactttcgggttgtttttgtattttttggatcctgagaaagtacaaaaataatatttagacaattaatcaggaagtggggggcaagctgagctttcaaatattgaagatcggctcttttttttgcgagctgttcttcataaatagaaatacgcagattctggatttcattgatcatattattaaaaacatctgtaataataagaatctcttgaaaggaacagggcgttgcaatttttgattcgaattttccactctgcagagaggaaataactggattgaggattcttgagggagtgtcaaaaaagtaattcatggaagaaatcgtgatggtacaaaagaaaagcaacaaaagaaggataaaaagcatcagacggtacaatggagtcagctttttatggatatagtgaaaaggaatcagtgccataatgtaataatcacagctgctcagccggacagaggcagtaaagtatttctgtagggaatgatcctcgtagcaggaaatctgatttaaagatgcagcagggtcaagatggatatcatggtaggaaggattcccgatgcagtttcctttgtcatctgcaaacagaatcgtcgcaccaatatcctcaaagggtttgaaagaggcagaaagtctgtccagttcaatccatgcaccggcatatacattccttgtccggattacacgggtaagaaaatagtggtcgttttcggagagcagaaaccagctgtttagattcagcttgctgccggattcgccctgggtatagtttcgcatcatgttttgaattaacaaggaacattttatattattctgcttgctatcgcagaaattgctgatctgaggaatgtaaatatcagaatcagagaaatacataaaaagaccagcaagcgtagaaaaggaacaggtgccggttgacagtgtttttttaaggcgggcaattcttacatagcgttcatttaagtcgctggtagtattcataattgcaatatcggtattttgcagacagttttcagacaaataggttagtgtttcctgaaagcgctgttgaagctgctcattgtaaaggttcatggtttccttcatagtctcatatacctgcctacgcataatagaggaaaaataaaaggaacttcctataaaaagaatgcagaaaagtagaatgagaaagagaaagcttttgaaaaacagttttttaattgacttcggatgaaaaatatgagtgatgaaattgatgtaattactaataaaaaaagaaataaagttatacatttt

SEQ ID NO: 3556 - DNA, 7625 bp, Unknown
  16S sequences of unknown bacteria
ctgtatttaatgaaaaaatagagtcatttttatgtaagcatgcggaagaataaacgtttatttttataaacagcaacaaaatatgcctattctaacagttagaataggcatattctatggaaaattcatgtgaggggttcagaaaaaagtgaaattaagaaaatcttaattttttctaaagaaagtaattagaatttttaatatcaattttgatacgataacagaaaggggagaaaatgaatatgagtgagaaaattttgattgtagatgatgaacctgaaattgccgatttggtttccttatatctgcaaaatgaaaattttaccgtttacaaattttattctgccatagaagcgcttaactgtattggacatgaaaaattggatatggctattttggatgtaatgatgcctgagatgaatggatttgagctgtgtaaaaaaataagggaacattatcattatcctattattatgttaacggcaaaaggggaggaaattgacaagataacaggtcttactttgggggcagatgattatattgtcaaaccgtttcagcctctggagttggtggcacgtgtcaaagcgcagctgaggagatataaacggtataatacgggtgtggaaaaagaggatgatgtgatgattcactcagggctggtaatgaatattaaaacgcacgaatgtacattaaatgaaaagccgctttccctgactcccacagaattttcaattttacgtattttatgccagcaaaaaggaaatgtggtaagtgcggaagaattgtttcaccaaatatggggagatgaatatttcagtaagagtaacaataccattacagttcatatccgtcacttacgtgaaaaaatgggagattctttcgaagatcccaaatacattaaaaccatttgggggtgcggatataaaattgaaagctaattatagtaaaccaattaaaatggcggttacttttatcattggaattgccatatgttttggcctcttttttttgatagatgttatttggaatggagcatttgtagattggtttgtacgttcatacatgattgaagatcagtatactttgcctgacggaacttgggtggaacgtactacattcgcttggacagacttaaaatattttttattatggactgcaattattgccataatcgttgtaattaccactgtaatcgtagttgcgcatttttatgcaaaaaagaaagtaagtaaaaccataaccagtaccagcgaaatgattcatacctacatgaatggttcgaaagaggtaacagaagtatttccaaaacaatattcggaaatttctgcttgtatggcacaaatcaaatccaccatgcaacagcatgaacatatattaaaagaagaaggcatacgaaaaaatgatttgattacgtatttggcacatgatttaaaaacaccccttacttctgtgattgggtatttgagccttttggatgaagtgccggatatgccgcaagcgcaaaaggaaaaatatattcacattaccttggataaagcaaatcgtttggaaaaattaatcaatgaattttttgaaattacccgatataacttacagcagattattttggaaaaagaaatggtagacttatattatatgctgatacaaatgagtgatgagttttatccaattttagcatcacacggaaataccattacacttcatgcacaagaagatttaacagtatatgccgacccaacaaaactggcaagagtatttaataatattttaaaaaacgcaattgcttacagctatcctaatacagatattcaaatcactgcagtaaaaacagaagaggaaattcgtatttctgtttgtaatcatggaaaaaccattcctcaacagagattggaatctatttttgaaaagttcttccgcttggatgatgcgcgtactaccaatacgggaggagctggtttgggtttggccattgccaaagaaatcgtaacgctgcatggaggaaccatttcggcaaacagtgaacacgaacttactactttttgtgttacgcttccgatttcttaaatttataaaatatcaagattctctttattttttcttaggaaatcaacaattgaatattaaagttaaaaacgcctttgtttcgtataatgataagcgaaacaaaggcgttttatattatgttcaaggagaaatcatggaatatggaaaaaaagaaattagcaaccaggcaaacacaaaaaagaacaaaaagacctttagaaaccatacgtttttatactattatcattgtatcttttattatatttatcctgttactgttttttatagggaaacaatatttgtcgtttgatgttcaggtaggttcgggaaatttattgaatgcaggaacacaagcagaaaataaaattgatttgaatgtattaaatagcccgtacgctatcttgatagatgcagatacaggcacagtaattgcacagcgcaacggtgatgaaagaatctatcctgcttctcttacaaaaattatgactgctctgatagctatagagcatacggataatttaaatcaaagtgtaactgtaccatatgatttttttcagcaattatatgaagaagaggcctcgatggccggatttgaaccgggagaacgcgtaaaagcaaaagatttgttgtatggtgtattacttccttcgggagcagaatgctgcaggacctttgcagagaacatttcaggctcagagtctgcgtttgtcaaattaatgaatgaaaaagcaaatcaaataggtctgaaaaacactcattttaccaattgtaccggccttcatgacagaaatcatacttcttctgtaaaagacattgctgtattgttacagtatgctttaaaaaatcaagcgttttatcaggcctttacaagcagttactacagcgttcctccaacaaatcaacatccggaaggatttactttctacagtaccgtatttcaaaatcaagctgttgaaacaattcacaacggtgaattgttggggggaaagacgggttatacagaacaggcgggccaatgtttagccagcttggctaccataaacggaaaacaatatcttttggtaactgcaggagcaaatggttctcctcaaacggaaccactgcatattttggatgcagtgaatgtttataatcaattgggaagtttaacttaaacccagttcttcctttgtcagttcacgcaagatacggcatggattacccacagcaattacgttggcaggaatatcttttgttacaacacttccggcgccgataatgctgttttctccaatggtaactccgggtagaacagtggaattgcctccaatccaaacgtggtctttaatcgttatcggtttggtatattcgtagtcggcatcgcgctgctctaaatgaatgggatggttgactgtatacagttgaacatgaggtgctaaaaatacatggtttccaattgtaattttgccgcagtctaacataacacatcccgtattggcgtagaagtgagaaccaatatgaatgttataaccgtagtcacaataaaatggctgtccaatggaaaattcctgtccgatagaacccagcaattttttcatcaaggtttcttttttatccgtttcatcgggacgcaaatgattgtagtcgtataataattcttttgcgcgtaaacgttcttctttcaattgttcatcgggagaataaaataattctcccgccagcatcttttctttttcagtcatgtaacggtactcctttgtggtttttacttgattataaaaaagcgaatatggtttgtcaacggagtaacggcagcagaagattttactccaaacagttttttgtaaattgtgataaaacatgcttttcctagatgcatttattttataaaagtatgtgtattttacaattgccttttgataggtaattgtgtataatttaagtacacaatagaaatgaaagaggtacggagacatgtatcaagatattatggataccatcggttttgtagagaagtatgattctgaagtcggtcaagcaatggacaaagaattaaaacgtcaacaacgtaatttagagctgattgcttccgaaaacattgtttctcctgcagttatggctgcaatgggaagtattttaaccaataaatatgcagaaggttatcccggcaaacgctattatggcggctgtgagtttgtagatattgtagaagacattgctcgcaaacgtgcttgcgaattatttggagcagagcatgcaaatgtgcagcctcattcgggtgcacaggcaaatatggctgtttattttgcatttttaaaaccgggcgatacagtaatgggtatgaatttgtcagaaggcggacatttaacccatggctcacctgtgaatatgtcaggcagttattataactttgtagaatatggcgtagatgcagaaacacaccgtattgattatgataaattacaggcacaagcaaaagaagtaaaaccaaaaatgattgttgcaggtgcaagtgcatatgcaagaatcattgattttaaacgtttgcgtgaaattgcagatgaagtaggcgctatgcttatggtagatatggcgcatattgcaggtttggttgcagcaggcgttcatccaaatcctgtggagtgggcggacattgtaacaacaacaacccacaaaacattgcgcggccccagaggcggattgattctttgtaaagaagaatatgcaaaagccattgacaaagcaatttttccgggtattcaaggtggtcccttgatgcatgtgattgcaggtaaagcagtttgcttgggtgaagctttgaaacctgaatttaaagagtacggaaaaaaagtagtggaaaacgcgcaggctttggcaaacggtttgaccaaacgcggcgtaaaattggtatccggcggaacagataatcaccttatgttaatcgacttaagcggaactgaacttacaggtaaagagttagaacgccgtttggatgaagtatatatcaccgcaaataaaaacacagtaccaaatgagcaaagaagtccgtttgtaacaagtggtgttcgtttaggtacacccgctgttactactcgcggtttgacagtggaagatatggatcaggtagctgagtgcattagcctagccatccatgattttgatgcaaatgcagacaaaatccgcagcatggtgcaagcaatctgtgagaagcatcctttatatgaataattgtactttgtgtacattatcgggaatgggttttgacccattctttttttatattataattttgtggaacatatagtcgaattttactttttatgatacaataacaatacaactgagtaatttgatattgggggaagggaggaatagatatgagcgcaccattggcagatcgtttgcggcctcaaacgctggatgatgtggtaggacagcggcacttgttggcagaagggaaggcgctgcgccgtattattgattccggccaaatacctaacatggtgttttacggtccttccggtgtgggaaaaacaacgcttgctaccatgattgccaagaccaccaaccgtaagctggtcaaaatgaacggaactactgcctctacctccgatatcaaagatgttatttccaatttaaacacattcgagacaatgaatggtgttttgttgtatttggacgagatacaatattttaataaaaaacaacagcaaattttgttggagtttattgaaaacgggcagattacgttaattgcttctactacggaaaatccttatttttatgtttataatgctgttttaagccgatgcacggtatttgaatttaaatctgttcctaaaaaagaaatcgaacgtgcggtgcaaagaggtttttcaattgtagagcaggagctgaaacaaaccattcagctggaagatggtgttgcggcgtacatcgcaactgcttgcggcggagatgtacgcaaagcaatgaatgcagtggaattgtgcagcttatcagcagacaaaacagaagatggaagatatgtcacattggaattagccaaagaattgacgcaacgcagtgcaatgcgctatgataaagacggcgatgaacattatgatttgctatcggcttttcaaaagtctatgagaggttctgacccggatgctgccatttactatttggcacgcctgctatctgctggagatttaccatcggtatgccgcagacttatggtgtgtgcctgcgaagatgtagggcttgcatggccgcagattattcctattgtaaaagcaagtgtagatgcagccttacaagtaggacttcctgaagccagaattccgttggctgacgcagtgattatggtatgcaatgcaccaaaatccaatacggcatatatggccattaaccgtgctatggcagatgtggaaaaaggaaatgtaggcagtattccaaggcatttgcaaaataaacactttgacggagaagatcaagaagtaaaaggtcagttttatatttatactcaggattgccccaaccattggacagaacagcagtacttgcccgataccttgaaagacgttcggtactatgaatttggagataataaaaacgaacaggcattccgccaatattgggagaatataaaagggaaaaaattgtaaatactattatggtatcgccatataaaaggagcgtttcacatatgaattctatgattttaagaaatttatcttacggtatgtacgcaatcggcgtaaaaggaaaagaaagaccttcggcttgtattgtaaatacagtggtgcaaattacatcgcagcatccgccaatcattgctgtcagtatgaatcattataattatagtcatcagtgcattgaagaaaacggaatttttacagtttctgtcttgtcagaagatacttcaggtacggtaattggtacgctgggctttaactctggaaaagacgttgataaactgcaaaatgtacgacataaagtattgcaggaaggcgttcctgttctcaaagaaaatacttgttgttggtttttatgcaaagtagtcaataaagtagaatctcctactcataccgtatttttggcagaagttatcgccggaagtgataaatccagaggtactcccatgacttacagttactatcataatgttattaaaggtactgcacccaaaaatgcacctacgtatcagcctcccgaagtagagcgtgacggaaatgatggagaaagctggatttgtacagtgtgcgggtatatttataatgatcctgatgtttcttttgaagaactgccggatgattggatttgtcccatttgcggtatgccgaaaaaagcgtttcaaagaaaataatagaataaaaagcggtgtaattcacaccgctttttatttttataaatttatgttgcttatagtgatagaattctaaatatgatagagcgctatcataaagccacgggattttaagagaataaaaacgagacatcgaacatgttttttagataaaataagggggaatatttcgacggtaaaatttttattttctgtttaaactataaaatgctgtctgtattcccgtaaatctgcaataatcaagagcacccat

SEQ ID NO: 3557 - DNA, 3407 bp, Unknown
  16S sequences of unknown bacteria
agtaattttatcttacatcagtttggaggtttacacaaactttgggatactcccgcaataaactgcgctgtatgacttggagcgaacatacgtgagctccgtgtatcggctggtgcgtacactgaaagtgtacgtattcagccgatgcacagagattgctttgtccgatacacgtcatacgagcttttatgctgtcatcctgggctgccatagacttataagtatcacatttttatggctcaaacttatatcccattccccagatggttttgataagttctcctttttcgcccagtttgcttctcagtttctttacatgggtgtcaatggttctggcatcaccgaaataatcataattccacacattattaaggattttctcgcgggaaagagcgatgccctgattttccataaaataagccagcagttcgaattccttgaagctcagttcaatgtccttaccatcaatcttcacctgatgggcagatttattcagttcaatgccgccggcagagatgatatcttcattggtgagcagattggaacggcgcaggatcgcttctacgcgggcaaccagaatcttaggactgaacggctttgtaatgtattcgtctacaccaagatcaaatccctggagttcatctcgctcatcactcttagcagtcagcatgatgatcggcaccttggaataggcgcggatctcacggcatacctgccagccgtccatcttcggcatcatgacatccagaatgatcagtgcaatatctttttcgcggaagaaaatgtccaccgcctcttcaccgtctccggcttccagtacatcaaaattctgttttacaagaaagtctctgaccagcttgcgcatgcgactttcatcatcaactacaaggatcttcagtttatccatgacagacactcctcccggtctttttgctttattgtagcaagggaatatgtttattttgtgaaaatgagacaacgatgtaaggttttgtttataaaaaaagagccccgattctaaaaatcagaactcctcgtccgtatggacctggcgggaatcgaacccgcgtccgaaagcccattcattgcggtatctcccatcacagtcacttgtttgacattccctccgctgcacgccaaatgacaggcttacagttttagtagcttcatgatacgcccgcacgcgcaaagcttagcgtgtgtcgtttcctacatagtcgatgcctgggtcacaaagtgtaggtgctctgagtcagacagctgccattaggcagcgattgctaaattatcttcagcgtttatatttagatttgcaccttacgcggtgccttcggatggctgccacaacttcaaaacccccgtcgaaacctttacaagcccgaaaacatgtaaagcttacgccaaagtgaaattgcatctttgatacatgatagaggatggaaagtacgatgtcaagtagtttttgtaatataaaagacagaagatacatcatttgtataaagcacatttataaaaactaactgctgaatttgtcaaaatgcacagtaaaaaactgtttatttcgtatattgtgcataataccagaaaatgataatatatattcatagggttatgtgcgaactgcacaaaataaatatatgggacaaggaggaataaggaatgctggaccagtcttattatcgtaagacagacgagatcatcgagcactacggcaagaaagccggttcgctgattccaattatgcaggatattcaggcggagtaccgctacctgccgggggaactgttaacttatgtagccgaacagatcggaatcacagaggcaaaagcttacagcgtcgctactttctatgagaatttttcttttgaagccaagggaaaatatgtgatcaaagtgtgtgacggaacggcctgtcatgtacgtaaatctatgccggtgttagaagcactttggaaagaacttggactgagcaggaaaaagcatacgactgacgacatgatgttcaccgtagagaccgtatcctgtctgggtgcctgtggacttgcgcctaccatgatggtcaatgaagaggtgcatccttccatgacaccggagaaagcgctggcagtgattgaagaattgagaggtattggctgatgatcaaaaacagagaagatttaatgcaggtgcggacggcggccaaagcgcatatagaagactgtgactgccgcattcttgtctgttccggcaccggctgtattgcaaccggttcaacaaagatttatgaggagtttctggaacttgtaagagatacgccaaatgtctgtctggattttgcaccacatgatgagggagagcatgtgggggtaaagaagacaggatgtcagggcttctgtgagttaggccccctggtcagaattcagagaggcggagagactatccagtacgtaaaagtgcagaaagaggactgccaggagatttttgaacagactgttctacatggagaagtggtagaacgccttctttattcaaagaaagacgtacattatcgtcatccggaagatattccgtttatggcaaagcagaccagaatcgttctggaaaactgtggtcgtgtggatgcggaatccttggacgaatacattgcagcaggaggttttgaagctctgtcaaaagccatgtttgagatgtccagagaggatgtaatcaatgaagttgaccattccggacttcgtggacgtggaggcggaggattcccctgtggtaagaaatggaaacaggtggcacgtcaggctgagaagacccgttatgtagtatgtaatggtgatgagggtgacccgggagcgttcatggatggttccgttatggaaggcgatccgttcaaactgatcgaaggcatgatgatcgccgcttacgcagtagaatcttcagatggatatatttatgtacgtgcggaatatccgatgtctgtagcaagacttcgtcatgctattgcacagctggaagagagaggacttttgggagaccatattctgggaacagatttttctttccgcttacatattaacagaggagcaggtgcatttgtctgtggagaaggttctgcactgactgcttctattgaaggcaagcgtggtatgccgcgtgtgaaaccgccaagaaccgtagaaaaaggtctgtgggagaagccgaccgtattaaataacgtagagacttatgccaatgtgccgaagatcattctgcaaggagcagactggtatcgtactatcggtacagagggcagcccgggaaccaagaccttctcattgactggatctattgaaaatacaggtctgatcgaggtgcctatgggaagtacccttcgccagatcatctttgatattggtggcggtctcaaaaatggtgctcagttcaaagcagttcagatc

SEQ ID NO: 3558 - DNA, 4437 bp, Unknown
  16S sequences of unknown bacteria
ataggaccgggcctttctgtggggagcgtcttaatttccgcagcctctggcgcaatttttactttttgcagtccgcgcaggcctgcgcgccatattctttcatcagcgctacataggcgcggtaattttccagcggcgtgcccgggggcgtctgatggtccatcgccggcaggtatttgcctttgcggatcgttggcagcaggcgctccagctccgcgcggatctctgccggagtgtggaacatacacatcttgtcaaagctgccaatcatgaggaaatcggggtacagatcacggatcttggccacatccacgccggactggcgctccagaggcaggataccgtcgatacccgcctcgatgaaccagggcaccgcgctggtaatatcgccgtcggaatcaatgaacacacgggtgccgtgtttcttgatttccggaatcaggcggcggtaatatggcagaagaaattcatcaaaaagcgctttggagagcatgggcccgtggttgtagctcatgtcctccgcgatggtcatgaaatcaggcttcacatattgcgccatttcgtccaccatccgtatctgccactccacaagctcgtcacagatgcggtggtacagttccgggtagtcataaaaggaataaaaatgctgttcgatgccgaacaggacgcgcggccaccagaaggcgccgtccagcgtataccatacaagcgtgtcgccgctttcgtgcggagcgcgcagcgcattcagctgggacgcaaggcgggatactgcattttcaggcagcagataggggcgtacggcgtcatagtctgattcatccgtgatgatgccgctgccgtgcgaagcatccttggggcagccctctgccttgtgggccagccagaactgtttgtggtgtgccaggccgaaatagtcctgcatctgacggtcatccagccccttcggcaatccttcgccgtaccagccgtccaacgttttatcccaccagtacgcccactccaagacgggcatcccatccaccggcgctccgtccataatggcatggaattgttctctaacattcataatgctacctctttgtctcaagttgatatctgtgcggcagaagaatactgcggcagccagtgaaaacggcggtgctccggcagaaaatgtccccgcttccaaaaggaggcggggaattttctgtaaatgctgtttacaggccggccgtttttcagctgttcgcagctttgtaagcgttcatggtttcgatataagccgcctcggcgtctgcaacagaggggaagtatacgtcattcaggaaggcttccagatcttctttggaaatctcgcccaccacgtagctgacttccatctgctctttctgggaggcgatatcggggttttctgcagcccagttgtcaatctcggggcatttcacaacagggatgtcgatctgttcgacagcagcctggaacgccgtcaggctgttcatggcgaactcgttcagttcaggcgtattggcaagggaaagagcctgtccctggtaagcattggcgaagttcatataagtgcttacatcggcggtgcggttctcctgctgctcagcagtaacgatcagctcgcgcttcgacagatcgtaggactcatagtcggtgccctgcacgccggcggcgatggtgacaaagccctcttcgctgttggcccagtccaggaaggacaggatacgcggcagcttttcggggtccacatcagcgttgatcatccagccgccccaggtcgcggcagcggcttcattccggggcttttcgtcgttttcgcccttgagcgcgggatggaagctgtagatctccgcggcattgggaacgtccttcgcggcaaattcaggaatattggtaatgccgccatgcagcagcgcaacgcggccctgcttgaacttggtctggtcgtcgtaatatttgttggtgaagaattcagggtcaatgatgccttcagcatacattttgcgcatgaaatccagatagggcatgtagccgtccattttttccttgatcttgtattcgccgtcgcggtcgggcaggtaggacgcggcgtgctgcagggagaacggcaggaaggggaagatcatccagcagtccgcccacaggccgtacggggaatacaggaacgtatcgttcttgccgtttccatccgggtcctgtgtagcgaccagcttgccgtattcataggcttcctccggtgtggtgggcatgtccacgccgagtttctccagccattcgtcattggagatcacgccccaggaggcgctgccggtgggacggggcacggcatagatctggccgtcggcgccgccgacacgggccttgccccactggccttcgctgatgttggccatcaggttgggatagtcttcaatgtactcgtccagcgggaggatcaggccgtcattggcccatttttcgtagttctggtcgaattcccaggtgtaaatgatgtcgggcagatcgccggaggccattacaagctgcaggcggtcggtatagttgctgatcggcggtgcttcgatctccagcgtgacgccggtcttttcagccacggccgccagcatggggttgtcgtcaagaacgatttcagcgtttacgcggttcaatacggtgatcgtgatgggagaattatccggctccgcggaagccgtggagctgctgcccgtgccggccgcagacgcggaggcggcgggtgtggaagaagagcttgacgaacatgcggtgaagggtaccatcagcatgatcgcggcaagagccagggctaaaatgcgctttttcatggaacatcctcactttctttcatttgggtttctattatttctgcactgcccggtgcagaataatacaggaagaatatacaggcggactcagccttttacagagcccatgagcatccctttcatgaaatacttctgcacgaaaggatatacgcacaggatagggatgatcgtaaaaatgatgattgccatttgcagtgtgaacggctgcgccagatcttctatcgcagtggcggactgatgcaccatgctggtgccgctttccgcaaccatctcgcggacgatcagcatcaagggccatttgtcacggctgttgatatacatggtggcattgaaatatccgttccagtgtcccacagcgtggaacagcgtaaaggtggccagcgcgggcttgcacagggggacgatcaccttccacaggatctgcagctcgttggcaccgtcgatgtaggcggcttcttccaggctgggagggatggccgccacaaagttgcgcatcagaatcaggttatatgcgctgatggcgcccggcaggatcagcgcccagtaagtgtccagcagcttgagattccgaatcagcatatagttggggatcataccgccgttgaagaacatggtaaaggtgatcagggccatgataacattgcgccccttaagattgcgcttggagagcgggtaggcggtgatgcagagcaaaaagatgttgagcgcggtccccacaacggtgacaaagatggtggagaaatatcccgttttcatcaggggaaaggtgaacagttctttgtaagcggtgaatgtgacctccggcggaaaaagacgcagagggtcagccagataatcttcatagggggtgatggaatacatgaatacataaaacaggggaaatatgcagactgctgcgcagaaaccgaggaaaaggtggttgaagatggaaaatgtcctgtctccaaacgaccgtttgattttgttggaacgttttgccaaagcaagcatgccggggcgcctcctctcaaattagaaaatcgtttcttcacccatttttttggagatgaagtttgtcgtcaacaggaatatcatgctgataacagacgcgaacaacccgacggtggtggcgaaggagaaccggccgcccagcaagccaacacggtaggtgtatgtttcaaatacctcggacacggcaaggttttgcgtgttctgcagcgtatagatctgttcaaagccgttggacatgatgctgcccatgcgcaggatcagcatcaggataacagtggtctttatgttgggcagcgtaatatggatcaggcgctgccagcggtttgcaccgtcaactgtggcggcttcatactgttccacgtcaatgcctgtaatggccgcaaggtagatgatggtgccccagcctgcttctttccagatggaggagattaccgcggtggtgcggaaatatttggggtcgcccaggaaaaagatggggtcaaatcccaattgctggatgatctggttcaccacaccccacgtgggggaaaggaagtttaccagaatgccgccaatcaccgcccaagaaagaaaatggggaagataaatggcggtctgcgttatttttttgaaccgtttcccgctaatctcgttcaaaagc

SEQ ID NO: 3559 - DNA, 32759 bp, Unknown
  16S sequences of unknown bacteria
cccaccatgtatattttttggatttattcccggttttgggaaggtatgggagggggacgctcaggttaagatgctcgcaggaaaaacaccttgaattgcataggatacttgcaaagtgccttgaaagcggagactttgtgccgtacgaaattgcgataaaagcagaatgccccgcaagtcacagacgcaatcgcaaaagtttatgcccaaagaatagcaactctcccttcgccgttttctttcaaaataaggggttatttgagtcgaattggcgctatttggcacagatagagagggattgtataacacccatttaaaaaatgatagaaagtgctggtaaaaagcggcgttttttaaggcacttttcaggcctgttttgaggctaaaaatgaaggctttttaagggcaaaaattgccggaaattgtctaacacattttcccaaaattggccttttttagagaaaagcttgggttttaaattcaaaaagatgggcattttttgctgcaatggtgttagacaataaaaaagccgcaatcgctcatttttagcgcattgcagctttctcattaaaactgtctaacacccttgcagtgtgaaagttataaacgcggagagagagggattcgaacccccggaacccttgcgggctcaacggttttcaagaccgccgcaatcgaccactctgccatctctcctttttatcctttctagacaatattatatttctcttcttggcaacttttttatctaatctttttcattttatttttttccttccatatttctcaaaatatattatctttttctccatattttttattttaatctatcttggactttttattattatgaatacttattgcaatattctaaatgcagaaatattaaaaaatatcgttaaatatactctgtctattccattcgcttccgctatatttttcctctatgcctgcgataataacgacaccaacgtcatttccgattcgcacgattcagaaaaaaaatacccagcacaagtacttcaagaagtaaattctcttgcaaatacctactttaaggatccttcgtcgcccgcaaaaaaatcatggattgatatccaacttaaatctttcgacgccatcaattctattgtcccggacatcccaatccaaacatttgactccattaaatcaaatgccgtagcaaaaaataagggcgattggaaggccgctcataagcaaatcactgcacaaaccgacgcatttaaacgcattgctcttatatcaaattccatgaagccggatgccgctgacttcgcaaaacaagtagcagcatctatatatccccatgactatatcgcgcaagctgccgaattgcgcaattggggcaggctctataacgccattgtttcaaacgtaaatttattctcgcaatcggaaattgattctatcaaacagcgcgttctttctgaaatttcaaaactcggctatccggcatctgtaaaatggctggctgcacaatctaccgcaaaacgcaggatactgcaattcttggattccgctgacgaaagcattcgggataatttgaaagaattagaacagtcttatccggcggattttgaaaaacagctttctgcaatcgaaaatattgcagccgcggctcacgaagatcagcaagttcaagccaaccatgacagcaaacaaacccgggcatctcgcaattcgcaagaaaagcaaaatcccgataatctcgcatcgcgcgatgacgaaattaaagaattaaataaatatagattctcaatatttaccaataggggcattgacggaaaaatgtccactgccgttttggtcaaactaaacggacagaaagtagttttgtgcacaaaagattttttcgacggttctttgccttacacaatcacaaacagcctcgggaagattaaatgttcgcgcgctttcatttcctccgattatccccttgtaatgcttatgccagacagcgttccggatactttcgtcccttttgaagttgtctctccccaggaaatggtatctatcattgacaaaaaacttaccatgattgcgccgtctaaggctggattttcaaaattcccggtgcgcattttttcggaggaccaaaaatacctaaacctcacctcggatactgctccggaaatccgcaaatcgacaaatattaagaggctcgatagaaggggtgaaaaatttctcctttcaacaaagatttctgtcgatgcgggaaacaactcgattgttatcgacccggattcggggaagctcgtatctatggcgtttcgcaaatacaacccgggagttctctcttggacggggaaaaccggatctattgtcggaaacgaaaatatggcaatcccggacatcaacaattttatacgccagtttgacggcgtcacaaaatcaattgaatctcccgacagttcgattcagtttatacgcatgacggggctcgaaaattggatgcgtttggacccgtcagttgctgccgagcagaaaacccagctgcgccgattcactgatgataacaacgatttcctaatgttttttaagcgcaacttatacggcgacatgttgcgttcccgcaggctcggacagattgccgagcgctatcgcaagcctttcctaaacgagcgcatggacagaatttcctacgaaagaaactataaaaaatacatgctcgacgtaatgtatgccatgcgccgagaattgagccagttccccaatgccaattctttttatccgatttatagagacgagatggaataccagattgctttgcgcagagccatgcatgactatctcgcagaagttataaaaaacggcgatattacaaatgtcctccatgtggatttgcgtgcaagatattctgaccccatggtaatcccggaagggcagattgctcccactacttttggcggatcaaagggcgggggattttgattccacgcaaagtgtatatctttcccacgtcttttgcctgagagggtagggcgaattatgcctttatatttaggcttaaattttattggtaagaatttctacggttctacgttctaaaatttttcggttaaagtggattcatcagaagcttagattgcgcgttgtattggacatttgcaggggcggtgtttgcaagtccataattggcgcagcgcctacttgtctttatatgggcaagtttgctattttcttgcggataacccgagaatttttgcagacttttacggtattttccccgttttttctgtttacccaatgtgtgcgtatctcttagaattgggctatccgttgtagaatcgggcatatgaagctcaatatctatgtaaagttttttcaggaaagaggcgaatgcattcattgcccaaatatagtttccccgcgctctctttatattttgtcgagtatcttttgaccttaaacttaagttatattattgtgctcttgaacagttatactcttattaggcggttatattttcgcatttttttattttgtaaaaataacgcgatgggggccgcaagttgaataccataatttaaaaataaaaaaggcgaatcagttcagattcgccttcgttcagttaacgcccacccattttattatggttccattcgggcggggtgggggtattatttcataatttcgtcgtagaattctacgatcttgccttttttcccggattcgttgaattctattgcacttttcgggtgcctgttcaggaaaccggtcaccatgtacgggtagtcgaatccccagccgagtttggcgcgcttgggctcaatgtatttttcaatgcattgcagcagcgggcgcactctgtactttgggttgtgcaggaaaccggtcagcagttcgagttggcaatttccggcgccgcgaccgagtccggcgagagtcccgtctatcatatttgcgccggcgactatcgcttcaatcgtatttgcaaacgcgagctgcaagttgttgtgggcgtgtatgccaatctccttgccaaattcgtgcgccaccctcatgtatttcgccatcatgtaacggatttgttcgctgtatagcgagccgaaactatctacgaggtatatcgcctccgcctcgctttgcccgagcatttcaagcccttcgtcgagttcgctctcgcgcacggtggagactgccattatgtttacggttgtctcgtagcccttgtccttggcgtcttttatcatgtcgagggcgagggggatttggtgtatgtaggttgcgactcttacgaggtctatctggctcttttccttggggagaatgtcggtcttgtagtcagatttttcggcgtccgccatgacggagatttttatgtcgcgtttattatccccaattatgcggtttatatcgtcttcgtcgcagaagcgccacgggccaaattcggacgaggaaaatattttgtggctgtttttgtagcctatttccatgtaatctataccggcgtcggcgcaggcgtcgtacacggcgcgaacctcttcgtctgtaaacttgctcgagttcatcagaccgccgtctcttattgtgcagtcgagcacttttagttctttcctgaaccctatccatcttccggaggaggtcgaggagccattcattgttttgtgattcattttgatttcctttttggtgagaaaaattaagacataaaaaaaaccggacgctctttcgcgttcggttttcaacttcgacaacaggcaaaagccgcccgccgaacgctaattatatacgccggtataataaaagtaataaaacttttcgctgtgcggattcatctgttaaagttgattgtgtcggattagatattctttttttttaatttcaagaaaaattttcaatttttatgaatttttttcaacgagcttgtaaaagtcgtcaaatagcggcagggcgtcgtttggccccggggccgcttccgggtggtattgcacggagaatagcggatagtctttgtgcctcaatccctcaactgtattgtcgtttagatttatttccgtcactatcccgccgcagttttcgacgctttccttatcggcggcaaacccgtggttttgcgaggttatcgacactttgccggtctcgagattttttaccggctggttgccgccgcggtgcccaaatttaagcttgtatgtttttgcgcctatcgcgtgcgttattacctggtggccgaagcatatcccgaatgtgggcagctttttgattagctttgaaacagtttcgtgcgcgtattcaacggcggacgggtcgccggggccgtttgaaaggaagagtccctgcggcgcgaaatcgaggatttcctcggcggagacggatgcgggaaatactgtgacgtcaaagccgtggaatgaaagtttgcggaatatcgacgcctttgctccgaaatctatggcggcgcattttaaaagcggatattttctctggctgttgtagaggcttgtgccttttacagtgaagggctttaaattggcttcggagacgtcgtagtggtacggctttttgcatgtgacttgctttacgtagtcaactccaacaagcccctcccagccgcgggcttttgccaatgcttcttcgggggatatcccttcggtggaaaggcaggctttcaacgcgcctgcgtcgcggattctgcgggtgattgcgcgcgtatcgacaccgcttattgcgggtatcgaattgctttccaaatagtcttggagcgacatctcgctcctccaactgctggcaactgggctcgcttccctcacgacaaagccggcgacttttattccgtccgactcctcatcctccttattgactccgtaattgcctatctctacagccgtcattgtcactatttgtccgaagtacgacgggtcggttaaaacttcctgatagccggtcattgaggtgttgaataccgcctctccgacgactgttttttttgcgccgaaagcgcgtccagtgaagacgcttccgtcttccaatgcgagtattgccgtagctttgtgagtcataagtggattttcccgaaaacaatggactttcccgctttttttacaagtctaatttagcgcaagcttcggccggtatttacattttttattttaattcccgctgcgcactatttcacgcgccaagaaaaggcggccgaatgccgcctttctctgggttgccgccgctttttagccgccgaaaagcggaaattgccgcgcctttttatgtgggctgcgcacttctaaaatttaaaccatttcactaaggtaaaaacttccgaaggcgccgccgcccggaaatcaatggctgccgcgcgaagatccgaacgtcttctttgatattccgaggtgcttttcgaggtcttttaccctgtcgaatagttcggcgagatggcctattagaatttccgtcttgtgggctttgaggtatgggcggggcggggtgccgcgcatatacgacttgggcggtatgtcgccgtttactccgctctggccgcctatcattgcgccgtcgccaatatgcaagtgcccggcgactccgacttgaccgccgagaactgcataatttccgatttttgtgcttccggaaatgccgacttgcgaaacgagcagcgcccctttgccgatttcgacattgtgcgcaatctgcacgaggttgtcaacttttgtcccttcgccgactatcgtcttgtcgaagcgcgccctgtcaatgcaagtgttcgccccgatttcaacattgtcgccgacgacaactttgccaacttgcggaattttgacgtgcacgccgtttacaaattcgtacccgtacccgtccgagcctatcacagcgccgggttgcaggcgggcgttttcgcctatttcgcaatagtccataactacggaatttggcataagaaaggctttgcggcctatctttacgaaccgcccaacatagttgttgccctgtatcactgcgccgtctgcaatttgcgcgccttcgcacaccgtgacattcggtccgataaatacgttttcgccgatttttgccgtttcggaaattacggcggatgggtgaattgagggctttatttccggccacaaaactttttctaccattgccccgattttcgcgagttccgcggaagggttgtcgacccgcacgacaacggagttctttgggagttctccggtgtagttacgcggaagcagtattgcgccggcattggttgacgagacgagatgcgcgtactttttattcccgaggaaagtgaggtctgagggggttgctttgtcgatggcggctatggcggacagctctaccgagtcgtctccgcagacttcggggttgtcgaaaagtttcaggatttctttcagtggatatttcatattatttttttgcgttgttgtattccacgcgcgtatgcagcatgttcatcattgtaaagacgaagctttgtttgatttttgaaatctgttttatggtaatggggcaggagtcgagctggccgtcgtctatctttgattttactatcgcgttgacgagctccgtaattccgtgctgtgtcacgcgctttaacgagcgcgaagcggcttcgcaagagtctgcgagcattatgattgcgttttcaaccgtttgcggcttgaccccttcgtgcctgtatgtgctttcgtcgatgcctgcgtcgcgcagcgcttggagagggtccgagacgttttgggctttggcgagcttgacggccttgttgtaaaaataggagattatggacgttccgtggtgctgcttgattgcgtcgattacctgcgggggcatttttgcgattctcgcgagctctacgccctcctttatatggtttttaattatcagcgcactcatagacgggttttggtcgtcgtgcggatttttgccgccgccctggttttcggaaaagaattccggcttaatgattttcccgatatcgtggtagagcgcgcctattctgcaaaccatcggatttgccgatacggcagccgccgcgtgttctgcgaggaacgacaccattacgctgtggtggtaggttccgggggcctctatttgaaggcgccttagcaggggattattgaagtctgtgtactctatgagcgcgatattcgagtatctgccgaaaatcttttccactatcggcaatatcactgttgcgaatacgcccgtcaagcttcctgctatgacagcaagcagcgcttgcctccaagttatgcttattggaacgccgtttgccgtgcttattatgaaagagaagaacgcgaggaacattccgtatataacgccgccgaaaattacgcgcgagcggctgtgcgcgccgtcgcagaagtagattgcaacgagcgccgccgcgaggaagaggacgaatatcacaatgctttcgccaatcatcattgtcgttagggcggctatgagaatcgccatcacaaaccccgtgtacgagccgaacagcaaaacctgtataatcggtccgagcataattggggttccgtacgcaaaaatttgcaggaatgtcgtgtttgtgtcgaagtattctgcgttgcttaggtggattataaaccgctccatcgcgaggttgagaatcagcagggcggagaatattaagacggtgcgcggctttttatttttttgggttttgctgattacaaaaaacagggcggcggccgacacgagcaacagcgagacaatgtagtcgatgtacctgaaagcgtttgcctgcgcccctgaatcgcggcgctttgcaagctcgcttttatacgccctaagtttttcctgcataatcggggtgggcgttgaggaggcgtcgaggagggtttcgccctcgcggacttttacgactaccggctggattgcgtttctcgccttttcccgaaggtctttcgtcttttgttcgtcaaatgttatattggggtttatctcctggacaaacgtgcggtacacggcaagcgccattgcttcggatacccccatatttttaagtttgtctaacagctctgcgcgcgcggtggtttcgctggcggcctgcggggtatttgtaggcgatactccttgaatgccagcgggctgggcgtcgacttttatttctccggaaaaaatcttgtcgccgtcggcgtaaataccctgtttcaggacgactttaacggcgaaggcgacgtggctgaaaatatttttgcagttttttgcggtggtgtttgcaaaaaatacttttatgtcgtcaggatttaccgtgagttttgccacattttttagctgggaggagaggctttcgcaaatttcgtcggcctcctcgggcgagctttcttcaaattcgtcgcgccgctcatttagcagcgaaactaatgtgtctatggcactctgcgccctctctatcgaatcggcgtctattttgtagaagggcggtattctctctgcgatttggttgcgcttggcctgtgtctggtattcgcttacgtacgagaactcgaacggcgacacgagatatacctgcgcgactttgtttgagaacacttgcgggacgaccggagacttatatgcaaagcatatgaaatagactgcaaacgacatcgcaaacactgctgcgacagtcgcccaaagtttccatttcttccggccgttggatattttgtccggttcttccagctttcttctggcgcgttccgtcctatattttttaatatggttgaacatctgaaatattttttcggtttgtttcgtaggcgttcactatttttgtgacgagcggatgcctcacaacgtctgaggaatcgaatctaaactgggagatgccgtctatgtctcttaaaatttttacggcctcgcgcaggcccgattttttatggcgcggcaggtctgtctgcgtgatgtcgccggtgacggccattcgggagccttccccgaggcgcgtcaggaacatcatcatttgctcgggcgtagtgttttgggcttcgtcgagtatcacaaaggcgttttgaagggtgcgcccgcgcatgtatgcaaggggcgcgatttctataattctgcgctccgtcagcttttgggattcctccgcgccgagcatatcgtatattgcgtcgtatagcgggcggaggtagggaaggagcttttcctgcaagtcgccgggcaggaagccgagagcctccccggcctcgactgcggggcgggttaggactatcctctcaacttttttgtcttgcagcattttaagcgcccaggctgttgccaaatacgtcttgccggtccccgccgggccaatcccgaaaactatttccgagcttttaaagaggtcgaggtattttttttggcttacgtttttgggaacaatgcttttgcgcttgaggtttacgacaacgggattttcaaagacggctgtaatttcgccaagctttccgtcggcgactctcgcaagcatatttctaaaatcgaaggaattgattcttatgccctgcgagcgggccgaaccgaggattttaaagaattcaaaagctgtatctaccttctttttcgggccttcgattttcatccagccctcgcgcgatacgatttgaactgacagcttttcctccgcgagcgcgagattttctgggcggtttccgtaagtttcggcgagcttttgtgcgctttcaaaagtcagaattttttcgacggacggcattgttatattttatcggcaaattttttcagctttatccacagagtgtcgagcgattgcggaagcacgcgcgtgtcggatatgacgggcataaagtttgtgtcgccgtcccacctcggcaccacatggcagtgcaagtgctgcggaatgcctgcgcccgccttcgcgccaagattgaagcctatgttgaaggcatccgggttgagggcttcgcgcagaatgcgtttggcgcgtattatggagtcaaaaaactccgttttttcgtcgccttcaagcaattctatgtcgcctatttcccgcagcggaagaacgagcagatgcccgcagttgtacggaaatttattcatcactataaaagagtacttgcctttccagagtatatggaatttggcgaagtcgtcggacttcgccatttcgataaagggatttcctccgctcttgccggtgtcgtcgcgcggtttgggcgcctctatatacggcatgcgccaatatgaatgtagcctctgcatattattcacactctataaagaaccatatcggcgggtttttgtcaactgtttgaatttgacgctattttggggaatcttgcggttttgccaaagggggagtcgaagacttcgcatcggtgggaataagcggccgacagattttcgccggagagcgcgtcttcggtcttgcctgaggcgtatattttgccctgctttaagagtatcgtgcgcccgcaatagtcgaatgcgaggttcgggtcgtggagaacggcaacgacgcatgcgcctttatcggcggcggaggctgcagctttcatcgcagagtgagctgcgcgcgggtcgagcgaggcggcgggctcgtcgagcagaagcgccttgccttgcggggcgttcccaagctggcaaagggcgcgcgcaagctgggctctacgcttttcgcctccggaaagccgggagtatatcctgttttcaaatccctctaagtcggctgccgcgagggcttcgcttaccgtttcgggtcgggcttgcgcgccgaataggccccctgaaaatccgcccattccaactatttgcccgacagtatattcaaaatcgagcgtgcattcctgttctagcaccgcgcgctttgtggcaagctcgcgcgcgccaaaattttttatgttttggccgccgtaagtaatttcgccaaagcacggggcgagccatccgctgagcagttttaaaagagtcgatttccccgcgccgtttgcgccgagaatcgcggtgaattctccgtcgccaaattttgcgcagatttccgacagcgcttggcggccgccgtacgaaaaggaaatgttttttgcctcaatcattgtcggattccccacggcgcttcaacagcgcaagaaaaaacggagcgcccaaaaatgccgtcacgacgcctatcggaacagggtcggcgggcgaccacaggcgggcggcagtgtcggcgagcacgagaagcgtagctcccccaatcgccgatagcggcagcagtatccggttgtctgggccggcggcggaccttattatgtgtgggacgacaagccctacaaacccaataattccgcaaattgctacgctcgcggacgtcgcgagagccgcggctccccctgcggcgagccaaattgcgcggatatttgcgcccgagtggaaagcctgctggcgtccgagcgccatcaaatttagcgcgtttgcgaaaattgccattgcagcgcacgcggcagccattgcgcaagcggcggcggcaatctcgccccagccgcacctgtcgagcgagccgagcgaccagaatacatatcctctaagtcccacgtcgcgcgcggagtacataaaaaatccgacgagcgccccgcaaaaggcgtttaccgcaattcccgacaaaagcgtagaaaacgcggagacccttccgccgaatgagccgagtttgtacacggcaaacgccgctgcgagccccccgataagcgcgcacgattcgagcgcgaacgggtacgcgaaaaacgacatcgcaacaaccgctccgagcgccgcccccgaggacacgccgagtatggatgggtcggcgagcggatttctaaaaaggctctgcatgcagcagcccgccattgcaaggcacgcaccggatagaatgccggcggcgaggcggggcaggcgtatttgcaacaatatcagctttgcggattcttccggcgagccaaaaacgcagtcgcacagccccgcaaaatcaaaagcgccgtttgaacatgataaagacgccgctgtggacgcaaaaaaaagcaaaaccaaaaaagccgaaaccagcgcgacttttccggttttatgagacattgccattgtttggattagtggcgcgggccgaagcttcttctggggaccggcctcggggcgtcgttgttttttagcctataaacgatgcgcgctttttcgatgtcttgcggggtcatttccattttgaccctgtcgcccaccgtgagctttataaaattcttgcggagcttgcccgagatgtgggcgagcacctggtgaccattgagtatctccacccgaaacatagtgccgggcagaacggctacgacttttccttcgacttctacggaatctgacatgctttgtttgttttgcagtatgaaagttgacaatttgtgtttatatgattctattagtcaacattaaaataatggaaaactttaaaaattgcgatacacgcgcggactttggcgattccgaatattccggattgttatcggcgccgcgcaagagcttcccggaatgccctttcgagccgatgcgcccgtcatacttgaaccgcggcgacgaattttttatgaagcttgcgtacaatcaagcgttgaaggcgtggagttgcggggaggtcccgattggggctgtcatagaattaggcggggaagttgtggcgcaggcgcacaattctgtcgaaagctcgcgcgacccgactgcgcacgccgagattatagcaatcacccaggccgccgccaagtgcgaagattggaggctttccggagcgactttgtatgtgacaaaagagccttgcccgatgtgcgccggcgcctgcgtaatgagccgcttaaagagagtcgtctatgcggtttccgatcctaaaatgggctttttggggggagctatgaaattccacgatcttccgactctcaaccattctttgattgttaatagcggcgttctcgaagaggattgcgcacggttgttgaagacttttttttcgttgaagcgggcgatttcaaaaagcgcaaaagcctcttcttctcaaagcggcgcggaataactttaaaattaaaactttaaaattttcccgtcgcatccatccgaatggatatacattcgccgcgcaaattttttttgttgtcggcgggcgggggattgcttgatgcaatattttaaattttagagttattttgtacggaaaatttttttccaaaaaatcctttattcactgggtctttcgggaggattcaaattgccgtttatagaaatgcaatgccgttagttggataatatttgaaactgaaaaaatttaggttttagcgcaaaaaaatttttatactttgggacggcgtggggggatttttgttttgcgcgggaatacagaagtttttttgacgcccaagaagggtataatattttttaattgcgtgactttttttaattgcgggatttctgtatcggcgggcgcgtagcgcgcaattttggcgcgccgcgcgtatcggcaccgcgtagcgcgcaaggtcagcgcgcgtctttaacctcgatggtttctttttgcggcggagttttctccaaaatttccctatctattatttcttcgacgggtgtttcgcctatataaacttccgataccgcaagcattccgtgatcctgccgcaacgacagtgacatgggcacatttttcttgcgggcgtcggatatgtatttttgcagtttggtttggtcgaatacggcagtatggtaattgattcttcccaaattgaatagtgcgattggcggatttatttcgacagtctttccgccctcgtatttttggaataaaatatccgacaacttaagctcaaataccgtcccttttttttcatcggcatttttgccgtaagccgcgggagcccataaaccgtcggcgcccttcctaaattctacatctacaatcgtctttttccaataaggcatgtctttgttttttacgaatgcgtcgatttgcggatttgcgccctgggtgtagggaattttaatcggtgcgcatataatatatatgactgaatcgttcgaggaatttggccacattgactctatcggcaattttatctctttgccggtgtcgtgaatgcgctcggcgtcgagggcgaatacgagccccgcgcagaattggactgttagcaggccgacgtaccacaatgtggcgctctctttaaaaaaactcttaattttcacgcgatattttcctgtttagaatcatgtttagaattgcgagcaaaacgccggccgcggcgattgccaccgcccttatcccgacgtccgtttgcgaatcgaaaatgcgcgagacgcattgaaataaaattaaaatcgccccgacattcgacattatcagcttcttttttaaaattcccgatattagaaaagccgctgaagatgcgaaaatcgctccgttcaagacagcggtgactgcccagaaattttttagcaataaaactgtggcaaatgcgggaaagactatcgaaaggcagattgccgcgttttccctgcgcggatttcggaacgcgcggaagagcgagaatgcgtaaactgcgcagagagtccagaaggcggggaaaaatgcggagatggcggtgtggttgataaggtcgttgataatgcctttcgacgcgcctacggacattaaaaatatcaagagaaaaaatcccgcgccggcgtaagggttgttgaaaatacccgtaccggaaaatttcttggaagcggacgctgcgagaaatattcccgagaatcccgcaactaaaacaatgcttaaaatattgtgcgctgccacgcacgaaatggataccgccgataccatgcacacaaaaaccagcacgatattccttaaaacgccattgccgtctctgaacttatacgcaaacgcggccaacgctgcgtatatcgcaaccgcaacgataaattccgattccgggcaatttgcggcataaaatatgttgagtatgcacagcgccactatcgccgagcccgaacggaatatgggcactgccaaaaaggaaaggcaaattacgctcaggcaaaaatgcgcggtatccggctgtatgttgtaaagatgcccgatacttgtaatcattacccacactcccgcgatatttagcattgccgaggcttctttccagaattgcggaaaatccttttttattgcaaagattccgaggactgccgaaatggcaagcggcgcaaatgccaaggcttccctgacgcgctcatgaaaatattcccagttgtggtatacccaaatgcagcatgccgtaaaaactaatataatcccgagtatgtacagcaaattgcgggttatccgcgattcttcgcagatcttatcttggagggcttccctgagttttttttcgctggcggcgtctatgagattggctgatttataggaatccaatcttttcaggagttctttttcaaattggctcattgtcggcgaaaatatataatatatgtatgtttttatatgtcaaattatgagaattaagatataaaaaagtcttgtcgagttcaaaatttctaactatttttttgaaattgcggggaagctttcgtatggggaagaatttttttgataaatatttttctaaggcgggtgtggcgctcttcttcaacttgtgcgcggcggcagcaattttgccctgccagacggcgtttggaagcggctcaacggagcgcggcgctacggaggccgcctcaatggaagttaaatcggaaaaaccgactggcggggcggaggggcgcggagccggcgagccgtccaaaagcgcccaaagtcggggaaatgccgcgcaaatgtcgggctcgaaagcggttcaaaaaaaatctgccgccaaaaacttgggcaaagaaaatcggcaggcatcgggagccttgaaagagggcacagattctgccgctaaaaaagggaaaaatttaaatagattatccgaaaaaaagaaagttgtgcgtccggcaaagaaatcggcgccgcaagcagctcccgtgcgcgagcctacccgctcaaagcgaaagccgccagaaataaaatttgcccccgccaatccgtacgaggaaggcgaaataaacttgcaggattcaaaaaacccggtggacatagcccttgccgcgcattttgaatctctcggactaaaacccgcaaagagatgttcggactccgtttttattagaagggcgaccctcgatttgacaggtaggatacccagccaagagcggctcgaagcatttttggacgatgaatcgccgaacaagcgcgagaagcttgtggacgaacttttggcgtcggacgaatttgtaaactacatgtctttgaggctcggcgacattctgagaatcaaggcggagttccctataaacctgtggccgaatgcggcgcaggcgtacacgcgctttatccgtaaatccctctccgacggcctggggtgggacgaaatggcgcgcagaatgctgtcgtcgagcggcagcaattttagggtaggggaggtgaacttcctgagggcgatgcagtcgcgaactcccgaatcaactgcttcgtgcgcggccctgacttttatgtgcgcgcggtacgataaaattcctgaggagagacgaaaggcttttgcgtcgtttttctcgcgcgtgggatacaagtccacaaaggagtggaaagaggaaattgtcttcgacgacccttcaaagcgcgcgccgttcgtatccgtatttccggacggatcggcggcggtattttccgcggatatgtcggtgcgcgcgggctttgcggaatggcttaccaagaggggaaatccttatttttcaaaggcgtttgcaaacagggtatggacttggattttcggaacgccaatagtttcgcccgtggacgacatgtttttttcggggaacagaccggtgtcggcgcgcctgctggaaacgctcgcggaaaaatttgagcgctcgggattcgatatccgcgcgcttatccgcacaattgcgctttctgaggcgtactcgcagtcatttatccccgagccttcaaacaatcccgaggccgcggctaaaaattttgcagtgtacccagtccgccgtctcgacgccgaaattttgatagacaccgtgtgctccataaccggaacgaccgagatatattcgagcacgacccccgagccgtacacgacaatgcccgactattccgcggctgccgaccttccggacggaagcgtgacaacttcgttcctcgaactattcggcaagtccccgcgcgacaccgggtacgcggacgagcgcgtgaacgtcccttcggcgtcgcaaaagctgcatatgctaaattcgtctcagatattgagaaaaatatcgtcttctaaatttagcagaaggttttttgttatgccgtacaaaaagggagtgtacagtttgtacacaaacatactttcgcgccgcccaacgagcgccgaattaaaggcgtttgaacaatacaagcccgagggaaagcagtttaggcaatgggaggcgatgattgacaccatgtgggctctttttaattcggacgaattttccaacaggcattaggaggatatatggactctaaaaaggcattggacaggagggattttttaaaggcggcaggcgcgatgggcgcgcttttcggattgggtgcgcgcggattttcagctgaactggcggcggccccgaaagaagccgctaaacccgccgcaccgaaaaagccgtttgcaaaatctgtgatacagatatggttttggggagggccgtcgcaaatagagacttgggacccaaaaccggaggcggggtacgactattgcgggcagctttcgtcgccgataaatacgaatgtcgatggcttgcgaatatgcgagcttatgccggaacttgccaaatgcgctgatacatattccgtaatacgctccgtaaggcatttccaaaatgcccacgaaacaggttcgtaccttgtgcagactgggcgcatgcctggcaggtacgtgtatccatgcgcgggggctgtggtttcaaaatttaagggcgtggacgccggctacaagggaactattccgccatacatagtattgacggagccgcaggggcgcttttctgaggcgggatttttggggtcgaaatacaagccctttgcaacgggcgggaatccgtcgtccataccgtttgaggttgaggggatagttgcgcgcggaataactcgcgcccgccaggagtcgcgccgaaagctgctcgacgacctcggcactttcaaaaaatcgctcgcttcaagcggatatttaaagcagtcggagcttgcggtggagcaggcgtacaatttgatactcggcgatgccggaaaaattttcgacgtcacaaccgaaagcgacaaggttcgcgacgcctacggacggaacaaattcgggtgctcgtgcctcgtcgcgcgcaagcttgtggagagcggagtgccgtacgtcacgataaactatcccggctgggacacccacaagagccattttcaggaaatgcgcaagctcatgccgcaaaccgacagggcggtggcggccctcattgccgatctgcgcgagcgcgggcttttcgactctacaataatttggtggagcggagagtttggccgtacgccgcgcatacagtgggaggccccgtactccggcggcagggggcattggggcgatgcgttttcgatgatgcttgcagggggcggttttgacggcggaaaagttgtaggcaagaccgacgacaaggcggagaaagttgtcgagcgcccggtatcgccgtgcgacctgataggctcgatatactcgcgcctcgggattccctcggacgccgttttgcgtacaccgcaaggggatactgtcgggcttcttgaagacaacgagggcgacatgaagggcgacggaatattgagggaaataggatgttagtcttttttgaaaaatttgcgggagggaaaatctctgcgcgatgtgcaaaatttgcgtgtgggaaaaatccacaaattttatttggattgcggcgcggagcaaaaaatatagagacgctaaaatcttctttgcgccgcgatagacgaaaggcctgcggcaggcaaatgcggcgtcctcaaacttgccgatttgcacttcccgctttttttagaattggaaggcttttagcttttgcgatagcttgcgctgtgtccgctcttccgctcggcgcgcaggaaagcgacgttccaaacatagcgtatgtgtatcccgcgggtgcgaaagccggcgaaactgttaaaatcaccgtaggcggcagaaattttaacggcgtcacagatgtgtatataacgggcgaaggaattgaaaccggagtctgcgaagtgactacgccgttaaagtccggcaattattttgggcttagaaataaattggaggaggaatttgtaaaaaaacatcccgaagtagtcgaggagatgaagaaatttgaggacggcgggcaggcgtatttgagaaaattggtcaacgccgacaaagaaataatggataagctcgccgctgctgacgcctctgtgtacttaagaaaagtgtcctccgaccctatggcggaaactgtcgagtttgaaatcacagtttcgcccgacgccaaaaagggaatgcgcaatattctcgtaaaatcgaggcgcgggctttcaaatccggcgaggtttgagatatcggacacagacgaatttgtgaagccttccttgcgcgataccgcaagaaagcgcataaagctccccgaaaattggggaaagctcggcatacgctcgtgggtgaatccgctgatgtacccgggagagggaaacgaattttttgtggatatgccggtggttgtaaacggccagattaccgaggctaaaacggacgcatattcattctacgcgcgcaaaagggatacggtcgtcatcgacgtatggggcagaatgcagcttccatacatatccgacgccgtccccgggtggttccagcctgtcgtccgcgtcacggattctcgcggcaaagaggttgcgtattgcgacgattttttccataggcccgatccgcatttgtcttttaaagttccggaaagcggagtttaccgcgcggaaattttcgacgccatttaccggagccgcgaggatttcgtttacaggatgtcgatttccacgcgcccgtttgtggaatacgttttcccgttgggaggcgcgtccggggaatcgccggagtttgaagtcgggggcgcaaatctcgaaaacaataaaataaaaatagacattccggagggtgcgggagagttttcgccggatttcggctgtgatagcattcccgaattaaaaataaaatattctccggagcgttgcacgttgtctgcggcggagtcttcaaagattgccggcgggactggcggcatgcttccgtcggtgactttgactccccctgaggcggcgcacgggcgcatactgaaaaaagggcagagggacttttacaaattcgacgccgcgcagggcgacaagatagtaatagagacgcgggcacgccggctcggctctccgatagacacttatcttactgtctgtgactcttccgggaaagtccttgcgagggcggacgattttgaagatttgtcatgcgggtttgtcacggcgcatacggattcccgaatgatattcacacctccctttaccggcacgttttttgtccgcgtggaggatttgacgggcgggttttcccccgcgcacgcataccgacttgaagtgcggcggccccgcccggatttcgagctaaggagcgtgccgagctccctgaattttcttcccgggcgcacgacagtgttcagagtttacgcattccgcgcggacggaatcgacgattatccgatagccttaaaaatcgacggactcccggagggatccgaagtgtacggagctgaaataccggcaggcgcaaagtatgcggatgtcggcgtaaaaataccgaagggcgcagccaagaaagtctttaagatgtcggttgccggcaaggctgatttcccgcacggaagcatagtgagggagtcggtcccatgcgaggatatgatgcaggcgttttattatcgccactatgtcccggcggcgggaatgtgggggagcgtaaattcgtggaatatttttgggcgtgggtttgacgcgatacgcccggatatctcgaaagttgcaacgccgataaaaataaaaaaaggcgaaactgtttcgatagatgtcggggcttctccggcgaagtttaaaaatatgccaaaggctgagtttcaggacgcgcccgacgggctttccataaaaagtttttccatacgcgatagcaggctcgtgttggaaataagctgctcggaaaacgcaaagcccgcgaaagggcgttttgtggtgaatctgctcggcaagcattggaggggaatgtttcttgtggataaaatcccgccgcttgattttgaaataaccgagtagtgccgcattaaagcctccgttttgaataagaacgtttattgttgccgataaattgtattttttagcaaatttgtggggcgcgctttatcataaaaagagagggacggctaaaaatttacatggcggcactttttggcaaattggatattacagctaaaaattttacactgttctaagctaccgcaaaaaaaactccgcccaaatgggcggagcttttttcctatggagatagtaaactattcctttacgagctcgtatgcgaagataaccgttcttccctttacagtcgatagcctgaccgacgccgtctctgcggttctatccatttcgatttcatcgccgcgggttccgtcgttgttaagggcgtatagtttccagccttccatcgggtttttgaactttacaatgatgtctgtcttttttgccaaaagcggtgttgtgccgtggtcgcgcaagattgtcatatcggtgtcgtcaaagcgcatattggtgttttttatgtcgcttaggtgcaatattagaatcttggagctgtctttaagcggattattgtctatgcttgaaatcaaggttgagctccagccgcgcgtatttcttatttctgcaaaggcgcctttgaatgatttccctttcgggcctataaacgcctcgcttttggaagtgataagttgccaagtttcgtttttcttgtccaagaccatttccgaagtggaggattcatacctttcattctcgacgtcaagtttgccgcccgtaagttttgtgagttggggaaggttggctttcgtatcgagtattacgggcttatcaaacttattctgctcaatgactgcctgttcggccgcgactgcaaaaggtgaattttgcggaactttaaaccctgagggcgttggatttatttcaacctcggttgcggcgtaaaggcctatgcgctttaagagcggcgagtttgcatttttttccggctcagggcgcgtaaggtagtcttctgggaggaatgacgttattgtaatgtcagagggctttacgtcttccctgagatagaatagcgcccctgcgcggtcggagaatagcgaaactatatttgcatcgaagtagcttatgatagatgcaggtttcgagaaatccactgtagagtgcgaatatgcaaagcggcagagcatatcccatttgtggagcgagccgtatgcccctatgaggaatgccccttcggcgcaatggtcgttgttatttacgtagttccattcggttatcgaaaagggcttgccggccatttggcagtcgcttaggcttatgcagccgccatattccgaaatcgagcttgtatttttcatttttgcgggcagcgaccaaggcttttctatgaatgaggggtgcccgtagtatctgtgggtgtcgataatgtcgtaatatttgcgcattagggtcacactgtatccctcccagaaattctggtcggttatcatagcgcgcacgccgagcgaatctaagaatgccttttgctccttatagaaattcccgtaaacttccgagaggaatattttgcgcaggaagcttttatctttgtcgttcggcgttatagactttgcttcgagccatttgttgaagagtctttcaaagtgcgggaacattgaagtgtatgagccaaaaatcgtattctcgttcacgaggctgattgagactatcgcgggatcgtccttccatgcgagccctgtgtaaggattgacgtggtttagcagattttttgagaaagtctgccaattctcgacagcctttcttgatacgaagaaagcggccttgtttgccgtcatggacttgttccagccgatgtccttttctactgcgtcgtcggcgaggactcttgaaacgtacaggtcggtagttatgtatatgccgcgctttttcatggcggctacgagatagtcgagcctgtcgagtttttcggcgtcgaagccgagcaacccgggcgaggtcttgtcgattaaggggttgtcgtagtggtggattctcattatattgtaccctgcggcggcaaaggcgtccgcgagcttatcggcgttttccttatccgggtagtttgccgaaaagcataggttgttgccgtagaatcgcaccggtttatcagggcggttttcaaaatatatttcccctccgcgggcttttgcaaatccgtattttcctgcgggggcgtcgagcagccaagagaagtcgagcggcgaagattttacgacgctccttggcggatcgaacgggaagtattctttggtttgggttaagaacttccctttgattttatttatggatatgccaacggggctggatgtagccgcggcgattttgaagtctgattccgagtggtttcttatggtaattgacgttgcgtttgaagcttccaagtcaagcctcgtgccgaagatgttgtatgtcttggctccgactctcgaagtccagacgacattcgagttgtcagaactttttaaatcgcgaatggctcccgaattctcggcggagattttgagtatttgctttttgccatttgggaaggatatttcggcttcggcgaattcttcgggcgagagttcgtctgcggaggcgaagccgcccaatataaagaggtatttggagaaattcttgccgggcaatttcagatcctttccgggcgctacgacaagcccgtttccggcgggattggaaaaggcgaatttcacgccgccgagctttagggtgccgcgcgggaggtttgggatatcgaggctttttgcggactctttgcccatgtatattggcgatccgtcgggttcttcgaacgatacttttatgttccaagtgagggtgttgccttctttgcggggcataaatctgagggaatatgtggtgccaccaaatatgcggttatcctgcacgagcaggtttaaatcgccttcaaatacgacattcccatacgcgcattctacttctactctttttgcgctgaatactttttggatttttaatgattcttccggatttatggcgatgctgtctaatttaagtttggattcgctgattgggaagctaaacgcataggaaatctcgttgtattttgcagtttcgctgggggtcatagttgcggacagccggcaagtattgcgaccggagaaagtaaacttttgcgacaatgtgccaaggttgtccaacctcgcaaagaggtttgcctgcaaatcgtataattttcccttctcgtatttgggaaagccttccattggttttcctaaatattttaatgaaagtccattccagtttgcatcgtagtaattgaagtaaacggatccagatcccagcgccagattgaagttactcacttcaaaatttccgaattgctgggcgttaaggcatattgagcatagcgccgtagcgagtattgagattatctttttcatattttatattggtacgttttcaaaatggcttattgtctctttgccggaattttccgagattcgcacatcgactacatcgtatctccacgaagcggggcgcgggcgcacagacgccagaaagcgtttggcgcaatgttttacgccacgctttttagactgcgaaagagccgcgtaatagccgtccaccgcggagttttcggagcgggttttaacctcgacgaacactgcgcagtcgccgtcaaaggcgataatgtcaacttcatgccgtccgcatctgtaatttcgagctgcaatcttcattccgcgtttttttagaaaccgcgccgccgcgccttctcccctgtcgcctgtggctctcgatgggttttttttgcgcgtgaacagttttttaaaaaagcgtccgaacaacatttatttaagataatatacgaataaaaactgggtcaaggcttaaaaaaatctatggggcaaagatgaggattttaattttgactttttttttatacggtttgagaaagttaaaaaacagtgaatagccgcttgccattgagatcttggatagaaatcgacttccaacgtttggagtccaatgtccgcagtataaaatcgacgctgcccgccggagtgaaatacgtttgcgttgtgaaggccgacgcctacgggcactgcatgccgcatgcgcttgtgcgatttgcaaggggaggcgcggacatatttgcagtggcaaacctctacgaggcttcaagagtccgcgaaattatacccgacaagcccgtgttggtccttagtccggtgctcgcccaggagaggccgcttgttttcgactacggggcgacacctgcggtttcgtcttattcggaggcggcggcatttgcggaattggcacgctcgcgcgcaaagacgctcggggtgcacataaagctcgatacgggaatggggcgcgcaggcatttggcatgagcgcgccgtcggggagataaaaaaaattctcgggctaaaaggcataaaggtgacgggcatattttcgcacctgtcaagcgccgacgacgatgccgaatacacgaaaaggcagtttggaattttccgcgaagtggtgtcgcatttcgatttgagcggcatgctcgtgcatttgcacaacagtgcggcgcttcggtatatgaaagtcgagccgcctttcaacgccgtcagaatggggctgttgcagtacgggataaatccgtttgcggagggcgaatacgagggagttcaactccaatcggtgctttcgtttaggtcgaggatacttgcggtgtcttcgcgcgcgggaaaaaggattgccactgttgccgcaggatacgccgacggagtgccgtcgggctttacagacaaggcgagagttattgcgggcggggcgaaatgcccgatactcggcaacgttgggctcgacgaaaccgtcatttgcgtcgattccgcaaaagatgtcaaagtgggcgatactgtcacattcataggcgagcaggacggccttgagatttccctcgtagattacagccgatggacccgccgcattccgtgggagacgatggtagcgattccgcgcagggtcggcagggtgtttaagtgatttttacgccccatagcccgtaaagattttgggttaagtgcgttttgtgtgggtggagctcggcgcagtccgcgccttgggcgctgaatttctaaaagttttacgcgcgctttgcaaatacgggaatatgacagcgtctttgtattgacgttcacaaattttattggattatctttttaatgcaaaagacaaaaagtatagttgaaaaattttcgggcagcggcacgatattttcagtcgaatttttccctcccaagacagaggagggcgcgaggcaaatattgcgcacggctaataagttgaaggagttgaggcccgactttgtctcgataacatacggggccggcggatcgagccgcgagaggacgcttgaatacggggagttgctaaaagacattttcgggtttgaggttatgccgcatttggcgtgttttgggcactcgaaggcggagatatcggcgatactcgacaggtttaatgcctacggatttagaaatgtaatggccttgcgcggcgacatgccgaaggacggctccgtatcgttcaaccccgatggatatgcgcacgcgaacgagctcgtcgcctacatacgctcaaaattcccgcatttttgcatagggtgcgctggctatcccgaaaagcaccccgaggctccgactcttgaaaaagatatagagaacttgaagcgtaaggttgacgcgggcgcagattttgtgactacacagctgttttttgacaattcccactattttaggtttgtggaaaaatgcggcaaaatggggatagacaagccgataatcgcggggctgttgccggcgctttcaatgaagcagctgatgaattttaaaaatatgtgctctaccgacattccgcaggctctaatagactcaatagcgtctgccggcgacgatgttgcggcgcaatcagccgcagggcttgagtgggcgcagaggcagatagacgaactgctttcggcaaaggtgccaggcatacatttgtatattttaaaccgcgcggaatcggcgttgaagctgtcagaaaaattcgggcgcaagtccgccaattaaaaaaagggaaaccgacttgcagctcccctatttttttaaggcgggcaaattacttgcagccttcataatttttaaggagcgcaagcaacttgcaacttccctttttttaacagattgcaagcgactcgcaacttcctatttttaacagattgcaagcgacttgcagctccgcatttatcggccgcgaacattgcgccgggcgcaaaccgcggctttttatgcaaagctcctatttatccaatacgaggcacgcctgcacgcccgggccgtggacgccctccacgagaactccctcgacgtccgtggtttttgaagggcccgagattgcaatcgcgtaagggcagtcaaccatttttgaaaagccttccgggagcgtcattacgatgtccgaggcgtttaggacggcgacatgcacccatggggctatgctcgcaagcctgtctgaggtggtggagtccttcaagactatcatgccgctttcggctatggcaaaatccgccggcgttatgccgaaatcgtacgaatcggcagagtccctgtcaaattcgaaagaaatgtcaaattctccgccgagcccgaagtcggttcccaattttgggtcgataacccccttcttgcagcctttggatttcaaaaagccggctatgtctttgggggaggttattatatcggcgcggttttttacaaaatttctctcaaatacggttcgggcgccgccttcgcctatcgcggcgtacgatacggtttccgagtcgtcaaaatccgggagtttgttgttcaaacgcgatttttcagcgttttttatcctgtctaaaaaagcccgcttatccatttttcttaaaccattttctaaattctccgcccctaaattttgggagcgttcgcgttttcagccacctgccgagcggcccgaccttcacaagccccagcggaagcagattagcaagcttgtttagcggcattgcaaacctccaaatttttggggaagtagcgacgactttccaaggcttaaagttgatgtcgttagcgaccttgaacgatttctttttcatgaggtcgcgcatttttagaatgaggtcgggcagggggattttagatgggcactcctcggcgcatcctccgcacagcgagcatgctttggggaggtcggcgtactctccgattttgtctcccgcaagcagcggcgaaagcactatcccaagcggccccggatagactgcgcggtatccgtgcccgccgactatcctgaaaacggggcagcggttcatgcacgcgccgcaccttatgcactttaatatgtcggaaaattcgctcccgagaattttacttctgccgttgtcgagaaatattacgtacatttcctctgggctgtttttagccttgccgggccctgcgacaaaatcggtgtaaaccgtgctgttttgggcggttgcgctgcgcccgagaaggttcaaaaacaccgacaattcccgcgccgacggaatcaccttttcaaagcccgctattgcaatgtgcgtctttgcccccgccatggaaaagcgggcgttgccctcatttgtggcgagaactatcgcgccttctttcgcgaggacgtagtttgcgccggaaacgactgcgtcggccgaaaaatatttttttcgcaggtattttctggcggcgagcgttatatgctgcggattgtcgtcgtagggcgcgattccgtgcgtctggaaggagcgcgcaatatcctcacgcgtgcggtgtattgccggctttactatatgcgagggcttttcgtgctcgagctgtattatgagttcccccaagtcggtctcgacggcgtctatgccgttttttgcgaggaagtcgttaagctcgatttcctcgctcgtcatgctttttactttgaggatattttttgcgtttttagagcggagtatggagagtatcatttttctcgcttcgtccgcgtcgcttgcgaaaagcacttttatcccgtgcctttccagcgagtccgccgcctgttcgacgagctttgacggcggcagcgactttatcgcgtttgcgagctccctaagccgcgtgacgcgcccctcctcggggtacgccgccgccaggcactttttgcgcccgagcgtgcttccgacgctcgcgtcgttgagcgccttttttaccgacggcgataggtgttttgcaaattcgtctatagtttgaatgtccattagaaaattcctccgtttttcatggcggcgtaaaatagttccgctgcgtgcatcgggcggtattttacgccgagcttgtcggctattcccttttggtgcattaggcacgaagtatccgcagcgcacacgatgtcggggtctgccgccgcaatcgagcgcacttttttctcgcccatttcagatgagagctggggaaatacgacagagaaagtgccgccaaacccgcaacagttttccgaaccgtcaaaatccagcgtcttcaagccgtctatggattccgcgagcttttttagtgcggcgggagtgccgctgcccttgccgtggcaggagttgtgcagggcgactttcgcctcgtactttcccggaattttttcaactcccaaaacatttacgagaaagtcgcaaaattcccaaaccctgcgcgcgaatgcatcgacttctttgcgcacgtcgggggtggattcgcggaaggctatttttgaggagtggtagagcatggcggcgcacgaagcgcttggaacaactatcgggtcgctgttcccgccgaaggcgcgcattgtgctgagcagaacttttctcgccgacgcaaaatcgccgctgttgaaggctggctgcccgcagcaggtttggtcgtgcggcagcgacacttccgcgccgaagtgttttagaatttgcaccgcattttttgcggcgtcggagaatatcgaatcgcacaggcaggttgccatgaaattcactttcctacctgcgattctgtcgtttggagggttgaacattgtgtgatacttttttccttaatgaaatatattgtgaaaattttaaacaccggcggctgaatctgtaaagcaatacttttatcaaaatgcttgcaactcggcgggagcggggcaagattttccggaatttatgaaaaaaatagacacgcttcttttcgattttgacggagtcgttgcagacaccgaaaggcaatataccgatttttggagcggcgccgcaaaaaaatacggggcgcagggcggggtggatttctcgctaaaaataaagggaacgccgctcgaaaagatactcgacatctattttccgcgcctggacggcaaaggcagggcggaggttcgcgagagcctttcggaatttgaaaagaagctcgtctttaggccggtaaaaggagctgtcgagtttttggagtccgcccgcaatctcggatataaaacgggacttgtgacgagctctggcgcggcaaaaatgcgaagggtttttgctgaaagcgactacgggcggttgttcgacgttttggtgacagccgaagacattttgcgcggaaaacccgacccaatgtgttatctcgccgccgcctccaagctcggctccgacccgtcgcattgcgccgtattcgaggattcaataaccggcttaaaggccgccaaagcggcaaatatgtttacagtcgggctgcttacgacattcccaagggcggatgtggagcggcttagcgacgcagttattgacgatttttcaaatgcctccgaagtcttttcactcctaaaatagttgaatctggcttctatgcctgattctcttgccgcttatcttacggaaatttgttttgcataggcggtttgggaaatattctatctaaccagccaaaattaagtgcggaatttttataaaaaataaaactctctgtaatatagagtgataaaaaattagggtcgatatcggaattttttattgaatcgggattaggcattcctacgcttcacattcgcggcattttttagcatctgctcaagaaaagtgcattctttaaaacttgggatatcccttcccgcaataaattcgaaataattccactgaaaaaattctcgaaaccttatttcttaaaaaaatccgcaataatgatgcgattgggaaagtttgcgggagaggctttcgcaataaacctgtataagcctattgcaaaaatgcggtaagtgcttttcgcaacaaatccgcaacaaagttttcctgcaaaaaaatcattaaaaatctttcacacaaaaacttgaaaccttgtccattaagcgccgccaataattatggcaaatttccgagaaagaaggcgcgcacc

SEQ ID NO: 3560 - DNA, 32759 bp, Unknown
  16S sequences of unknown bacteria
ccctgtctctactggagcctacgggatttcacttcttttcggacggtctgaccaagaaagatctcaattttgatatgatgtatcagaattgagattttttcatatcatccgctttttgccgcgcgctgctgcggagcgtgggccacagcagcaaaagcgcagaaatcggcacaaaaccgcatctgtgttgttcccccaggcgtgaatatcccttatgattctattgtcagccaaggctgaacaagattgaaaggggattacacgatgaacaccgataagatttatgcagaggctatcgccaacgaatacgcacccaaggacacttccaaggttcttgcgctgaaaaagctggacagaaaggcaaagaacaaagccaatatttttgcctatacctttggaatcgtgatgacgcttgtcctggggaccggaatgtgcctttccatgggaatactgggcgacgggagcgccgtcatcatgggatgcggaatcgccctgggaattttggggattgccggtgtcggcatgaactatcccatctataaaaagctgctcaacgccggcaaggaaaagtatgcctttgagattctccagcttgccagggagatcagtgaatccgctgaataacggaaaaaaggagggcggcttatgaacaaatcggaaagcaagtattttcataccgccctgcgcatgaatgaagcgcttatcagcctgctggaaaagaaggacctggaatttattaccgtaaaggaaatctgcgaaacggccggggtcaaccgctccaccttctacctgcattacgaaaccatttcagacctgatgaatgaaacggttgagatggttgataagcgcttgctttcctatttttcacagcgcgaacgcgacgtcctgtcagaaatgaacggtgcggatctgaaagaactggtgctggttagcagagcgtatcttcttccatatctgcggtttatccgggacaacaagcgtgtgtaccgggccgcctttcgcaatcctgccggtatgcaggcatatgcgcgatatgagcatttgaaaaaccacattcttggcccgatccttgcaagatttgagatccctcccgaatcgcgccgctattacatcgcctattatgtagaaggcatcattgcgatcgtcaaggagtggctgcggcgggactgtatagacgaggttgaaagcatttcggacatcatagaaaactgcgtacggccaggaagtgcaaaggatggagaataacatcaggcccggagatattcgtacatttttgaaggcgttgagagaggactacgtgtacaaaaccctcgtcagtgcaggcgcttcctttgcctgcacggcgctttttgcgttgtaccatgggtatcttgggctgcgttattcatccgtctggcattccagcatctgtgtattctattttcttcttatgctgattcggggcagcattttgctgacggaaaagaaaaaccagggactgccggagacggaaaaggagctttcccgccacaggacctttctcctcagctctgccatgatggtagcgctggacctgtccctgatgctgcctcttgccctgatggttactcaggctacgcccgtcaccatgggacttgttcccgcaatcgccatggcggcgcacacgacctacaagatcatcctggcgtccatccatttccgccgggaaaagcgcaatccctgcagcaaccttctggtgtgggaattgcggatggtccattttatcgactcgctggtatccctcttgacgctgcagaataccttgatcatggtgaatcgcaagcatgacgccgccaatgacatgttttatgtctccgcggtttccagtgcggtcatttatgctgtgattgtgattgttaccgtttccatgctgctgcaggggaggcggaaaatggtgccggacacacgctctgaccgctgttgaatggccgtagcatacttggcctccctgcaagcctctgggccgcagggaggctttgtctatccctttccgtcctcgtaggcggcggtttcaagaacttcgcccgtatgtgcgtccacgcgaacctgataatcatctaaaagaccgtcgccaaacgtgcagcagcaaaggtgaaacagccagacatagggctctccttcagccatcagctcgcattgaagatcgaaccggctgaggctggcatccgtttcaccataatggcttttgaggagagccttgaccgatggcaggagcgcctccggagaaagaatggaagatttcttttcctgatacagcgggtcgttgagaatactaagagaaggctccctgacagaaaacaggttttgtccccataggtgttgaagcatggccggcgcgaggcgataggagacgattcgcacgacgggctccagttcgatttcaaggaacgccccgtcgcgctgacggcccgtcacaaaggtcagtgcgcgaagactgcctgtgatgacgccctcacggttcaccgcttcggccccggcgaacgcctccaccgcattggagacggaaggggcaacggtatccagaaaagcaagggcatagcgcgccagctcatcctcaaagccttcctgcgccatcagccgctgcgataccggcggcagggcatccgcggcctgataggcggcgagccgcccgtccggcaggtatacgaacgcataacggccgctgccctcaacggacgcaaatacgctataacctcccgcctgggaaaccacctcccagtccgcgttcgtgacatcagccttgaggtagggacagcctgccagttcctgggtatacgaaaccagctgttccgctgtgggcgatgagggccaaaccggcagcgaatcgtccatattgtgcgcggaaacgggcagacggacaggatcatagtcgtcataatggcattgtgcatatgcgcagacaggtgccagtgccagaaaagccgcaaggcataagcagctccatctcatgatcttgccttctttctgcaatgaatgggaacatccattattttaacgaagcggcgaacccatttcttcccaacatgcgtccccggaggttgggctacggcggggcttagtgtcgcctaacgttaggaaagccgatccagcgtttgcctcggcccaataacccgtcggagcgaaaagccggcggtggagtacctttttttcttccccgtctggcagggcaacgcttcatgaaccaagaaaattttcggtagcactgacgattctatgccctgaaccgtctaaaggatgtaacgttacgaagggggcgggggaatggacaaggacttctttgtggaagagcttcagacgcattacgccatgctctaccgcgtagcctacaccattttgcaaaatgacgacgcctgctgtgatgcgttgcaggacgctgcgctgaaggcctgggaaaaacgccataccttgcgtgagacccgctatttccgcacctgggtgacacgcatcctcatcaatgcctgctacgacacccgtcgcagacaccggcgcatcgttgtcatggaggaaatcccggaacagtctgtgccgccagaggaccccgggctggccatggcgcttgagcaacttcccgagcgcctgcgcctgcctctggtgctgcactatgccgagggcatgagctatgccgagatcgccgatgcgctgcgccttccccagtccaccgtccgaagccggcttcacaacgcaagggaacaactcagaaaggagctggaggccgaatgaaacgcgatttggaacatctggatctgaagcaggcctttcatcccgtcccggaagcctgccgccgcgcgctgatggacgccgcccgctccgtcagggaggagaagccagtgaaacgagtttcctaccgggccgcgctgattgcggccgtcatcctgctcgcggccatggcggtggcctatgccgccgtaaggctgggctggattgagtatttcagtcaacagtacggtattgccgtgccccgggcggcacaggaagcgcttgagaccagccagccaaagacctgtcaggtaggccccatgacctttacctatcagcagctgcttacggacaggcgcatcgtgctcagctccgccgccgtaagcctgacggatgacggcgaggcgctctatgccgacgataccaatgtgtatgaatccatcagtgccatcagcgataccgttgccagccgttattcgctcaccgaccactccatgacgtggctggaggcggcgcaggagctggaattgcccctctatggcgtgcgcgcgctggtggagctgcccccggaaagcgatctgggttcctccatggaggatgccctgtggaatgaggacggcaccatcgtgtacttcaacatgcccatgctggctccgggaagcgcggacggcgacgtgaacgccacgctgtacatggccgttacgcagtttgaccccgccacgggcgaggcgttggaaaagtgggaaacgcgggagaaagtgacgctgcccgtagccccgctgctggaggaaaagacctacctgccgcaggagaatgccacttttgacggcctgacgctggaaagcgtgcacggcgagcgctacgcgaccggcgtgtacctttgcgccaccttcaccgcccccaatgggatgaccaaggaagaggcgatggacgtgctgcataccctgagcatctgcgacgcggacggcgcgccgctgccgatggggttgagcctgtccatctgtcctgacgcggaggcgctgcccgtggtgacgctggaggtacccgcctcgctggaggcgctgcccgatgaagtgacggtcgtgggcggcgagacgattgtatcgctgaagtgacctgcctgtgccgggcggctgggctgcccggctttttgcactcattttcaggggaaaggagaagcatgcaaatgaaacgcatcatcgccataacgttgcttctatgcctgctgctgtcctttgctgcgtccgccctggcacaaacgcgtccccttcgctttctggtcaatgacaatggggaggcggcggcctggctcaaggagcattatcccgaaattccctctcaaaacctgcattctgactatgactactctcccggagaatacgacagcctgacggatcgcctgctgggtgagctggaaagcggggacggccccgacctgtacctgctggacagcaacgcatacgacctggccagggtgctgggcagcgggcttgtggaggacttgagcggcaacgaggatatccgcaggggcgtttcgcagcagtacgagccgtttcagcgcttcgtcagcggcgaggacggggccatctatggcatgtttgagcgggtccatggaagccccacgctgatcgaccccgccgcgtgggaggcggcgggcctggaggcggtggaggcgccccgcagctatgaggagctgctggacttcgccggaaagtggacagagctggttaaggccggaagcgtgggaaacgtgaggctgaacacgatccagtttgccggatatccgagggacgagcgccgctacaccctctggctgacgggacttttgtggcgctgctgggccatgcggcagcaggaggcgggcgaggcgttccgcttcaacacgccggagtttatcgccctggcggaccgtgcccgcgagctgggccgcgcgctggttcaagtggaaagaaagccgggcgcggcctcgctctcgctctacatcaacggcggaaatgtgcgctatggccccgaagatttctataccaacgcctttcccatgcggctcacggcggatgagcccgtccgcatcagcgcctatggctttctctacatcgtgcgaaaggggagcccctacgcgcagatctgccgggagttgattgccggcctgacatgtcccgaagatggccagccccgcagatgcatgctgtttagggaggttgcgcaaagccagtacggcacgcccgacttttcctataacccgaatggcgatgtcctgacccgtaagtggcaggagcagtaccgacccgaatggctgtttttcgatgtggagccgtttttccaggcccgccaggttcagcggtccgaaggggccatgtaccggtttgccggaggcggattgacggcggaggaatttgccgccacgctggatgagatctgccgggagaaataacgggctcgtgccccgaatgaaacaaaaaagaaggagagggtcttatgaaacgtatcatcgctttggcactggtcctgtgcacgggcatatccctgttcacgcatgcctgcgccgaaaacgcccccttccgcttcgtgaccaacgccatgaatctggtcgaggactggcttgaggaacatcaccccgacatcaagtatgaaaacctctatgatacagccgattcctggagaacaggcggagcgcataccggacgggtgctcgacgctctgcaaagcgaggacagccccgacctgctcttgctggaaagctccctgtgcgattttgaaaaggtcctcaaaagcggtctggtggaagacttgagcggccatcagggcattcgcgccgccctttcgcagatgtacgagccgttccagtcgttcgtgaccggcgaggacggcgggatgtacggcgtgctgtatggcgtgtacggccttggcatgcatgtgatccccgcggcgtgggaagcggcgggactgaacgccgcagacgcgcctcaaagctacgaggaactgctggacttcgccggccggtgggccgaaagggtggaggcgggggaagtgggtgacatccgcctgaacgcgctccgctcctgcggctatttgatgaatgaccggcgctacaccctctggctgaccgatctgctgctggatatctggagcatgcgtcatcagtcggcgggcgaagcactggttttcaacacgcctgcatttatcgcgctggccgaccgggcccgcgagacgggccgggccctggtcaaggcggaaaaaaagcccggaaccgcctcgctttcgctctatgatgagctgttcaacggcggaaccggctatggcggccctgaggacctgtataccaatgcctttcccatgcgcctgaccgcggacgagccggcccgcatcaaaggctacggctttctgttcgtcgtgcgcaaggacagcccctttgcggacatcgccatggactttatcgccagccagacgtacaagaccggcgaggaacgtcgcaacagcaggctgtaccgggacattcccgaaagccagtttaccccgcccgagggcgtggacggctatgtgctcacccgtgaatggcaggatgcctaccggcccgaatggctgtatttttgcaccaatcccatccatacaaccgacgcttattcgaagcaggagaagctgcgctcacagttcgcactgggggaaatgacggcggaggagtttgccgccgcgctggacgggatttgcacagcccagtgagcggcgccatcctgccggggaatgcagagaggatacgcctgcgttccgatgcagggtgaggacaaaatcgcgttgcctgtgggcgctttgcagcatgccggtaaatcgagcaaggtcggcgcgcgggcacaaaacggtcctgacacgcaggcaaacaaaggcggccggagggaaaaaccctcgtggccgcctttgcatattcttttccctgcgctgcgtttacgccccaatcgcacgcaccgcgtcatcaatcatggcggcgcatttttcgatctgcggcaggtccgcctccgaaatgggggagagcggcgcgcgcacactgcccagcagcaggccctcgcgcttctcaagcaccttcttcatcacggcgtagaggttgccgtggcaggcgcacagctgggcgatgatgtcgttggccgcgtactgtatcttgcgggcttcctccagcctgccttcacggatcagccggtccatggccagaaacagttcgggcatcaccgcgtaggtgccgccgatgccgccgtcggcgccgatggcgcggcccgccacaaactgctcgtccgggccgttgaagaccacgaagttctccccgccctcggctttgaaaatctggatgtcctgcgtgggcatggaggaattcttgacgccgatcacgcgcggattcttgcgcatctcacgcagcagcggcacgctcagcgccacgcccgccagctggggaatgttgtagatgatgaagtccgtatgcggcgcggcggaggaaatggcgttccagtaggccgcgatggcatggtccgggagatgaaaataaatgggcgggatgctggcgatggcatccacccccaggctttcggcatgggcggcaagctggcagctttcgtgggtgttgttgcaggccacgtgcgcaatgatggtgcactcgcccttcacctcggccatgacggcttcgaggatggccatgcgctcttctttctccagatagatgcattcgcccgaggagccgcccacgtacagccccttgacgcccttgttgaccagatgccgtgccagcctgcgcgtgcgctccacgctcacctgtcccgcttcgtcgtagcaggcatagaaggcggggatgacgccccggtatctttcaatgtccatggcttgttgccccctttgtcggtcggtatcagccctttaccgcgcccatggtgataccgcgggtaaagaacttctgaaacatcaggaaaatcagaatgatcggaacgctgcccagcgccgctccggccataatcaggccgtaatcggtgctcagctcgctttgcagcttggcgatgcccagggagatggtcagcacgtccatgtcgttgagcatgatgagctggaggaagtagtcgttccaggcggtgatgaaggtgaagatggccagcgcgcccacgccgggcttgatcatgggaaagacgatgttgacgaaggtcctcgcctcgcccgcgccgtcgatgcgcgccgcctccagcatttcgccggggatgttttcggaaaactgcttcatcaggaacacgccgaagggccagcccaccgtggggaagatgaccgcccacagggtgttgtgcaggcggaggaacgccatttccttgagcagcgggatcaaaatgacctgcttgggaagcgccatggcgcacacaaacacgctgaagagcaccacccggcccgtaaagcgcttcttggccagcgcatagccgcccatggcggcggccacgcaggtgagcagcatgctcatgacgcacatgaacacggtgttgaacatccagatcccagcgggacgctcaaacaggcgcgtgtaattgtctgttgtagggtttacgggaaaccagacgggcgtggcgctgttgatggtgcgcgcgtccttgaaggacccggtgatgatccagtacagcgggaagatcatcaacaccgccagcacgaccagcaggaggacgctgatcaccctgtagggagtggtcttttgaacgctgtgatccattctgcttcctcccttactgatcgctcttggccagacggaattgcagcgcgctgaacaccgcgatgatgatggccaggatcacgcccatggcgctgccgtagccatagcgctgcagcttgaaggcttcgtagtagatgtagtacatgatggtgctggtcgcgtagttggggccgcccgaggtcagcagctgaatcagcgcgaagcactggaagctgttgatggtggtgatgaccaggatgtagagcgtggtgggcatgatctgcggccatttgatgcgccagaacacctgcatgctggtcgcgccgtccacctcggcggcttccaccagcgaatggtccacattgctcagcgccgagacgtaaagcacgatgggctggccgatggacgtggtgaagagaatcaggatgatgcaccacagcgccgtgtcgggcgaacccagccagttgaggttgcgcgagaggatgcccagctccttaaagacgtagttgagcaggccgtaataggggttgaacatccacttccacaccaccgtcacggccacggagccggtcacgacgggcaggtagaacacgcagcggtaaaacgaggtgtacacgtcccggagcctgtagatgaccgatgccacccacagcgagaagaagcacacggtgggcacgctggccaccacgatgatgacggtgttgacgagggactttccgaagatggcgtccgagaagagctcggcgtagttttgaagcccgatgaagctgaagtcggtcatggtgtagttgaacgcgctggtcaccagacacatgcccatcgggaagatgacaaaccccaggaaaaacagcaggctgggcgccatgaacagatagcccgcaacgttctcacggcgccgcgtggctttcagctcacgggaaatgctgacggttttttgcatgcaggtaccccctcattgacagcatggcgctcccccttcccttggggaacgggggagcgccatggcaaggtgtatgggcttactgggtgatgcttgcgttggagttggtcacgtacacgcccacctcggtcgccacgtcgccgcccgcgaagatgcgctgcagcatgttccaccattcggtgcgctgggtgttccagccgggcgttacgttgtagtagtcgcccagatagggcatgaagatggcgaattcggcattttccgctttctcggtgccggtgtagatatcgccgaaggaggcgcgcaccgggaagaagcccgtggcatacacgctctgggggccctgctcggcgtcgtcgcagacgaacttgatgaattccttggcggcagcggccttggcctcgtcgccgttgtcgaagatgccgaagccccagatgccgccgcacagctcgggcacgccgtcatcggaggggaaggccatgggcaggggatcgatgccctcggccagagaggccttgttgctcacggccgcggaggcgttccagcagaagctcatcttggccgtgccgttgcagaacagcgcgatctcgtcgcccgccacgatggagggatcggcggtcagaacgccctcgttgaccaggtccaccagcagctggaggcccttgatgttcgcttcgctgtcggcggtgtaggcggtgtggtcggcgttggtgaactggccggagtagaggttgttgacgagggcgcgcgtgccctggtctccgccctgcccgccgcagtacacgatgccggtgggatagaagcccgcctcggtcagcgcgcgaagggcgcttacaaagccgtcggtggtccaggtgcgggtctcctcgtccagatactgaagcgcgtcggcggcttcaaaagcggcgcggtcgatgaccatgcagtgcgtggtcatgcacagcgggtactcgtagtacttgccgtccacgcccttgcatgcggccacgacggcctcgctggtggcgctgatgtcggccagggcctcctcggtccacaggtcgctcaggtccagcatcttgccggcagcgccccagttggtcaccagacgctccgggccttccatgatgatgtccggggtggtgccggcctcaatggcgctggtcacctgatcgtcgccggactgatagtcaaggtactgaaccgtcacgctgatgttgggatatacggcgttgaaattggcgatgatggcatccaccgtttcggcgttggtccagttgccgatgggataggtccacagggtgatgtccaccttttcctcagcgagggacgccatgggcagcaccatcatgaggcacagaagcagcgcgaacagctttttcatggatgggttcctccttgcaatgtttttttggaaaacggtctcattttcttcctcggcgaaattccgcatttggaaggccgaactaaatgtactacaaactacaaatgatgtcaactgctttttgtgtgtttctgcgttgaaatctgattttgcattgtgagaattgcatattttatcggaaagcatggtttgggaatgggaattgacaaagataaacgctatgctgtacaattcagaggacatcccaatgcaacatccatcctgaaagggcatgccatgaggaacttgaaagaggataagctgtatatccaaacgtttcgcgaaattcgcagctatattatcacacatgagctgaaagccggcgattcgcttccgacggagcaggccatgtgccagatgctcggcgtcagccgcaacgtgctgcgggaagccatcaaaagcatggagctgatgggcatgattcagtcctgtcccggacgcggcacggtggtgaaggaattcaatctggatttcatttttcaaaacgtgctgttttttaccgtaggcgaggagcgcaagcccattcaggaaatgctcatgattcgcaaggcgattgagctcagctacatgcgccaggcctatctcgccctgaccagcgaggatatccgcaacatccgcgagagtctggaggccatcaaggccaagtgggagcagcggatctttttccatgcagatgacaaggtttttcatatgacgctgttccggcatctgaacaacagcgttctcaattccctgctggaggctatctggtcggtggatgagaattttcagcgggaggaaaagagcaagcacctggatgataccatcggcaagcacgaggccatcgtcgatgcgctggagcggcacgactatgaagcctttgcaaaagccatggaggcacattttgcctccggcaaatattccggactcaacagctttgaggagtactaaaaggaggaaccttgcatggacagaacgatttttcagtcccaaagggaatggatcagagcagaactggcacgctgcacggatttttgggtgaaaaatggctgggaccatgagcatggcggcgtctatacctgcctggaccgcaagggaaaggtatattccaccgacaagagcgtgtggatgcaggggcgctgcgcctggaccttttcctatctctgcggcgtttatggcgtgaggcaggaatggctggagctggcgcagagctgccttgccttcatggaggcgcattgcatcaaccgcgacaagggcaaccgcatgtactttaccgtcaccgcggacggaaagcccctgcgccagcgccgttactgtttctccgaagggttttatgccatcgcaaacgccgaatatgccgcgcttaccggcgatgcggcctgcatgcagcgggcacgcgatgcctatgacctcatctggaagctgaatcagggcctgatggaggaccctgtgggcatgggccccaaaaccgacccggccacgcgcccgggccgtgctctggccaaccccatgatctacctcaatatcagttccgtgctgcgccgcaccgacccggacaacgccgccctgtacaacgagcgttcccgcgagtgcgtggaggagattttcaaataccaccgcaagccggagatgcactgcacgctggaaagcgtcggtcccaacggcgaattccgcggcgatgtgaccgagggccgcgtggtcaatccgggccatgatatcgagtgcagctggtttttgatggagtatgccaactacctgggcgacaagcagctgcacgccatggcggaaggcgtgtttaacgatgccatcgaagcgggatgggataaggaatacggcggcctcctttattttatcgactgcaagggactgccgcccgaagcctatgaacacgatatgaagctgtggtggccgcatgacgaaatcctcatcgcctccatgatggcctatcgcgataccggcgacgagaagtattacgactggttcaccaaaacgctggaatactgcaagcgcgtgttcagcgacccggaatatggcgagtggtacggatacctgcgccgcgacggcaagcccacgatgccctccaccaagggcagcacgtttaagggccccttccatctgccccgcatgctgagcatggtggaccagatgatgggacaagtgctcgacaaaaagtaatgctgacaaacagaacagagcgggcggacgctggtttacgcgtccgcccgcttgcaatgccgccacagggccgttttcagaggatgcctgtcagggctttttgaattgtttcgtcaaacccggtgcgcacgcaatacgatagcgctatgtgcgggtacgtcaaaatgcgctccgtgcaggaagtttcccaaatcccgatgggcggtgacatcgcgcaggtggatggtatcggtcatttcccagccgcagtagtcccaggaaaggatcatctgttttgcggcatcggtttcgttcaggagacagaacgcgatgtcgccgccatacagcggtttggccagcacgatatcgccgttgctcatgggcggaagagcgtatgcctgcacccccagatcatcctggttgatggcgatgagttcccgattgagcacaatctcatcaatttccggcatatccttgcgcacatcgtgccccagcagcagcggggcagaaagcatgcaccacagcgaaaaatgcgcgctgtattcatttacggtgcatcctccgccgatctggcccacgtatccctcgcctttgaggcccacaaccatcatatcgggatcattccatgcgccatggccggcgatagggcccatttcaatggcgtttttggcaacggttacgattgactcccaactgtccttgatatcgccggacagccgccacatgctggcgccagcggttttcatccattcggtgaccgttttgcgccccaggcagccggacaaaatgatgtccctgccgctttcgcgcagcgcctgtcccatcctgcggaacagatgaggggcgcttgctcccggcgccacatagccaaagtcatacttaagcagatcaacgccatattcggcaaaggtctgggcgtctatacgctcgtaaccgaagctgcccgcgcgtcccgcataggttaaaaccccggcgcccgcatacaggccaaaacgcaatccccgctcgtgcagataatctcccagggccttcatgctggaggggaatttctgcggatcgggctggagccgtccgctgctgtcacgctccagcgacatccagcaatcgtccacggagacaagggtataaccggcgtcacgatagcctttggcgaccatggcgtctgcggtttgacgtaccacctcctcgttgatgccttttggaccaaagtagttccatgcattccagcccatcggaggagtgagcgccaacatagccataaaaaatccttcctttctgccttgcaccagcgcctaccgctggtaggtgtcgcgtactgtctgctccataaaattgaccacatcttcccccatcagatgcaccagcgtcacgtacagcgcgtctaccacggcaagctggccgatgcgtgaggtcatggcggtgcggttggtagatacctcttgtccgtaggtgcgcagaatgatttgcgcatatttgcacatgggcgtgttgggaaaggaggtcatcaggatggtatggattccttttgcatgcgcaattttgagaatttcgcccgtttcgggcgtgatgcctgaatgggatatgcaaaacaccacgtcgttttcgttcatcgtgctgatgagcatcatgctgctgtgaaactcgttgtaggtccatacgctcagccccagacgcgtcagcttgcgctgcgcgtcattgcagatggtaaacgaggtgcccacaccaaacaaacagatccgccgggaggcaatgagctgcctggaggcggcctccagaagcgtttcatccagaaaacgcatggtggtttcgataacatgactctcggagtacaaggttttgcgaatcaacgcctgaagctcggttgcgttgttttcggcgtccgtgtgaaagaagtactcattataggatgaatacccctgcgccatggaaatcttaaaatccttaaagcccgaatagcccatcgcctgacaaaagcgaaacacagtcggttcgctcacgccaacggcgtccttcaattcgcgaatggtcatgcgcaatacggcagacatgttttcacgcacataatcagccaccttgcgttcgcctttggaaagggaggggtagatctgctgaatctgatcctcataaggctccatcgaggtcaatccctcctttcgaaaaaactttaacggtcacgtggtctaattgtatcaaaattacgattaatagtcaatatactacgtttgaaatgatttcggatggaatgaagggtataaattattccgttttaaaaaacaattgacacattcaataaaatagtataatataattacgaaataagttttaaaatgtaaataaactattttttggagggaatggccgtatgctaaagggcattacaggaaaaaaccactatttggacaggctgcggcgcgatgtgcgcagagactggtggctgtacgccatgctgctcccggggttgatctacattatcatatttaagtatcttcccatgtacggtgtaaccatcgcctttaaaaattacagcatattcaagggatttgaggattctccctggtgcggcatggataactttgtcaagctgttcgcaagggcggattttcggcgcgcgctggaaaacaatattatcatcagcatcgaaaaactgattttcggctttcccactcccatcatcctctctctgatgattaatgaagtacggcataagtttaccaaaaaaggaatccagacggcggtgatcctgcccaattttatttcatggattgtcatcaacggacttctttatgccatgttcagcacatccagcggggtaattgtgggcgtgatgcgcagttttggcctggaagggccggtacccaatattctggcggataaaaacagcttccgtgcggtcattttgatttcctacctgtggaaaagcggcggctttggaaccatcgtatatcttgcagccattgcgggaattgatcaggaactttatgaagcggcccagattgacggagccggccgttggcgccagctgtggcacattacgctgtcgtcgctaaggtccactatcgtggtgctgctgattttccgtgtgggcgaaatgatgtacgccggatttgaccagatctttgcgatttccaattatctggttgtatcggtagcggatatcatcgacacctatgtataccggctgggcatggaaagccgcaagttctctgaggctacggccgccggcctgttccagtctgccatcgggcttgtgctggtgctggtcaccaattatattgccaagaaaattgaccccgaaagcgggatcatgtgaggaaaggggcgtgaatgggcatgaagatcaaacgcaccatgggcgagcgcgtaggacatggtatcatcattttcctgctgacgctgtttgccttcgcctgcatctatccgttctggcatgtgctgatgtattccatcagcgattcgcgggaggccatgaccggcggactttttctggtcccccgcagcccgactttcctgagctattccatgattttcaaaacccggcaaatctacgtcgcctactccaataccatccttcgcaccttgtttggcacgttgctaagcgtattgctcacggcgctcaccgcctttcctctttcgctcaagcgcatgcggggacgtcagtttttttccatgatgattttcttcaccatgctctttaatggcggactgattcccacgttcctggtggttcaggacctgggactgctggatacctttcttgcgctgatccttccaaacgccatgagcgcctacaacatgtttattctgcgcaattactttcagcagcttcctgaatcgctggaagaaagcgcctacattgatggagccaatccctttattgtgttgtttcgcatcattttgccgatttcggcaccgtccctggcagccgtggccatgttctacggcatcgccaactggaattcctatcttgattgccttttgtacaccaactccgatgagttgcaggtgctgcaaatctatctgcgcaacctgctggcctccgcaggcgcaatggattccattgccggcgtggccgggtcggatgcaaacaggctgacggaggaaacggtaaagatgacgaccattgccgtatcggtgatacccatcctggtggtttatccctttttgcagcgctactacaccaagggcattacggtaggcgcagtaaagggttaaataaataaaaggaggtttatcccatgaagagaacccgtttaatggcacttgtgatggctgctgtgatggcgttggctattgcgctccccgctctggccgacgaggcggtgcctgaggttaccctgtacctcaccttctcaggaacgaccgccaatgccgacaatcctgtgctggatgccattgaagaggcgaccggcgtgcggctcaacgtgatccaggcggctcccggcgacgaggaaaccaagctcaacaccatgattgcctcgcgcgaactgccggacctgttccgcgtggacaacatttcggacatgcagcagtttatcgaggaaggcatggttatgcctctggacgacctgctggcggagtttggccccaacatccttgcggaagttggcgacattctgcctcaggctccggccaatcagattgatggaaacacctatctcatgctcagcggaagcaccgattatacctcgaacctgaatgtgcgtgtggactggctgaaaaacctgggccttgaaatgcccaccgatctggacagcctctacgacgtgctctacgctttcacctacgacgatcccgatggcaacggccagcaggacaccgtgggcatcgtcatgcccatggcgcagtacatgcagtgggacaacctgttcggcgcttttggcatctgctttgaaaagaactacctcatggaggatggcaccgtcaccacctacatgaaggcgcccacctaccttcaggccattgaatacctgcgcaagctgtaccagaatggcgtgatggaccccgactttgctaccatgcccgccatgaccgctcacgagcgtctctggaccggccgctgcggcgtgtacggcttccagagtgtgggccccaccaacaactggtatccgggacgctacaccgaagatatgcctgaagatccggccgaggtattcggctttgccaacatcgtgggcccggacggcatcggcggctctcccaagcagtaccccaacatgatgcagggctgggtggtttcctccacctgcgaaaaccccgaagcggccattcgcttgatggattacctctatacgcaggaaggcgacgaactgacctacctgggcgtggaaggcctgatgtacgagtgggttgacgaggagaatggcgtataccgccgcctgggcgagtacaccgacgacgcgattcatcgcgccaatggcggttatacctattggctgaagctgattgaggacaactgcgaggtgcgcaccctcaacaccctgacccgcgaaggtcaggaactggccagggcaaacgcgatcgaccatccggtgatctatagcgcgctgcaatccgaaatcgaatacggcaccggccttatggaaatcacccgtgaggcgctcgctcagctgattgtaaccacgggcgacgtggaggaagagtacaacgcctttgtgaaacgctggaacaatgaaggcggcctcgagttcgaggcggaagcaacggctgcttggcaggcccagcaggcaaaccaggctcagtaacggaaaaactacctgcggcctgggccttgcgcccgggccgcagaagacagggaaaggagctccgggatggaccagatgtggaagtttgaagccgaagatggatggcatctgtgcctcaggctggaaaaggaaaaccattgtctgcgccttgaagccgaacatgacggctgcctgtggaagctgtatgcccaagacatgctggataacacggaggaccatcccagctctttttgcctggaaacgcagcacaagggccggttttggctgtttcatgagggcacaaaggttgaacagcaccccgatgggatcaccctgcacacctgcccggtgaactgcgaaacaaaggctccggtgcccgcactaatggttcactaccgcattcaggtgaaaggcgcgcagatatctgcccgcacttcctttgcagcggaaagcccgtggatctgccatacccttcactggatgcagtggaagctgtacgggcctggctgtgaccggatctactgctttggaccggactgcgtgctgcccaatgcggcgcattccctgcgctttggctcggttgccgtcgccaggggacaggcctgggcggccatgggcggctgtggcgaggccctgtggacgccggagagcaagggcgaatccctgacgccggaatggattgtatcctcctctgacgctgcgcaagacgaatcctttttggggaccctctcaccgattggctgtatttgtccggaaatggatatcagcctggcgaacgaaagccgtccgcttcaaatgacgctttcctttggcacaggcacgccctgccctcctgcagaaggggagaaggacgggaccgcgcagcctctgccgcgtggccgcatggaacggctgaagagcggttccctcgaggcggcagtcgccgtccgcgaggacggcctcacgctcatggggctttccctgacggacggcagagccgacgaaacggcctccatcctgcctttgacgcggctcactgtgcggaaaacggaggatgggtcgattcatacgtttacttccgagcggggttggcggcacgttcgggtggcaaataatgaaaccatcatgcgcatctggctggacggccccggggacatttgcgacctgagcgtatccgtggaggcccgggcctgcccctgcgagcgaatcgagtggcgggtgcgcgtactcaatgccaacccggcctattcggtgctgagcgccacctatcccgggaccagctttgcaggcggcgatgcggtgctgtttgaaccatcgcatagcggttcgctgattcgcaaggcctgtgaaaaaggatacactgcttccggagcgtatccgagcggctttcagtttacgatgcccgttttcggagcgtacagcgaagcgcagggaaacggactgtacgtggcggttcacgaccgtcaggccatgcggaaacagatgcgcgtgcagtgcttccccaatggacagggtacgtttgagtttgagtttcccgccattcacatgggggttcccgcaaccgcgttttcgctggcaggctgcctggtatggcagcgttttcaaggcgattggtacgatatggcgcagatctaccgcacctttgtgcagacggctccctggtttgcgccgcatggacggcccgattcgccggcatggatgcgcgacgtgcctttgtacattatggactggatgcccaatgacaaccccgatgccgatcccgtacccatcagcatccggcctgccaaggagcctccgcgggatgcctgggtgcgcaagcccatcgagcttgcggatgcgctgggcgtgcccattggataccacctgtacaactggcactggattcccttcaacaacgattttccccattattttcccgtgaaggagggcctgcgcgaaggcgtggaggcactgcactgccatcaggtgcatgtcatgccctatatcaacggccgcctgtgggatacgcacgattgccggggggatgtcgggcgctatgcaaccgacgccgcgccctcgacggcaaaggcagaggacggcagcacctataccgaaagctacgcttcgcatgagccggacgggcggctggcagaacttgcggtcatgtgcccgcaaagtgccatatggcggcgcgagcttgccgctattgtgaaacggttggccaatgagtatgtgatggacgctgtgtatattgaccaggtggctgctgccaatgccaacctttgctgcgatcccacgcacgctcaccccagtggcaatggcgattggtgggtggaaagctaccgcctgctgatggaacggctgcgttcagaggccccggagggctttggtttcacgacggaatgcaacgccgaaccgtatgcggatcaatttgacggcttcctgacctgggtatggatcatgcccaacctggtgccgtttttcccggcagtctacgccggccgcattgccatgcttggacgcaacacgaatggttacaaaaagcaggatctgccctatttcaggttccatctggcacaggctgtgctgtttggccaacagatgggctggatcaacgcagacgtggtggacgatgccgaaaaaatgtcgtttttgaaggaaatgaccggcttacgctggaagtaccgcgactttttcagccacggcgacatgctgaggccgccaaagctggaaggcgagaatccgcacttcctgaccgataccggaatgggctattccatcatgtttgacgccgaaacgcttcttgccggcgcgtggcgcaggcggcgggaccaaagtgtgctgatgatgctgatcaacgttggcgatacggagcaggaagcacggtttgcctttgactgggaggcggctcacgcggcatatgacggggcccggcaagactacgggcagggacgggtcctttcgctggattcagacgggattcgctgcctactgccgccgcatacctgcgtcgcattgcttgcgccgcaggcaacgaaatgaggaatacagcatggacatacgcctggttggcattgacggtgggggtaccaaaacagatgcagtgctttgcgccggcgacggcacggtgctatccagaaaaatcggagatgcttccagcccgaccagccggaccctggaggaagcggaaggatgcattttgggtatccttgaggagctgctgtcgccctatggcggactgaatgccaggatagacggcctgtatgcgggaatttccggcggcgggcttgcgcgcaatcgggaagccctccatcggtgctttacgtcaaagctgcccaatgtgcgaaatctcggcaacggcagcgattctgtcaacgcgatcagttgtgtgcttgcccacggggatggcatcgttgccattgcgggaacgggaaccagcgtctttgcccgacgcgacggcgttatgcatcaggtggggggatggggataccttctgggcgatgagggaagcggctttgatatggggcgcatggcgctccaggcggttttacgcgcgcgggacgggcggggaaagcccaccgcgctgacccgggcatgtgcgcaaaaactgggtgagcccgtttgggaagcgatcgagaggctctatcaggggggacgaccgctgattgcctcctttgctccctgcctgattgaaaccgccgagagcggcgatgaagtggcggcggatctgtgccatcaggcagccagatcgctctatgaagccattctggccgcccgcagatggctggatatgagcgtatgccctgtggtcatggcaggaagcgtatggcagccgggcggttattttgaaaaaaagatcggagactggctgggggatgattttattcttatgcgtgcagagcagccccctgtttacggagctgtagccgaggcggcaagactggcgaatattccagtggatgcggaatttcagaagcgattttccgacaccatgaaagcgggaggaaaataatcatgcaagcggaccaacaaaccatttccaggttggaaacactttccaccgagcaacgaaatccggagagcatgggcctgtcctcctggacgacgctggaactgcttcgctgcatcaacaggcaggatcagaccgttgctgtgcgtgttgcggatgtgctcggggacattgccaaggcggtggacctgattgcgcagcgaatgcagcaaggcgggcggatggtctatgtgggcaccggtaccagcggtcggctgggatatatggatgcggcggaatgcccgccgacctatggctgcggcgaggatgccatcacctgcgttatggcaggcggccgcgatgccgtgttccatgcccaggaggcgctggaagaccatggggaaattgcgcgcatggatctggaaaagtggggcctcagacctgccgacacagtggtggcggcgtcggccagcggccgcacgccctactgtgtaagcgctttggactatgcgcagtcccttggatgcggcagggtggcgcttgtgtgcaaccgcaattcggaaatggcccatcatgcggatgtcgccattgaggtggatacgggacccgaggttattatggggtccacacgcatgaaggcaggaaccgcccagaagatggtgatgaacatgctttccaccgccgtgatggtacggatggggcgcacatgcgacaatctgatgattatgatcaaggcgcgcaacgtgaaagcaaatcaccggatgcttcgtttgtttgcgcaggcggtcggcaatcctgacctggactatgccagaaaaatgatggatgaagcggatggcgatttgagcgtggcggtgctcatggcgcttcatggggtatcacgcgaggaagcggcgcaggctctcagcgatggacagggccattttgaccgggccatgcgccttctcgaaaatcaaaagaccggcgcatgtacaaccgcgtgactttaaaaatcgaaacattaaaagcggaaggacctggtgcaaaaccagtcccttccgctctttctttgatgcggttacgcccccagcagccggctcagcgccgataccaacgcgcacagggtaacccctgtaagcgtaggcagaagcaccgcgacggccgtccacttcaggctgtgtgtctccttgtaaaccgtcagggtggtggtggagcagggccagtggaacagggaaaacaacgccacacatgcggcggttgtcagcgtccatccgttggcgaccagcagcgcacgcagactgtccagcccctgcacctccaccagcgttccctgggacaggtaggtcatcagcatgatgggcagcacgatctcattggcgggaaagcctaagatgaaagccagcagaatcaccccgtccatccccaaaaagcgtccggcaggctccagcgtgtccgccagcaggcgcaatagctgcgtatcgcccactcgcaggttcgccaaaagccagatcaccaggccggccggcgcggccaccgtgaccgcgcgacccagtacgaagagcgtgcggtccaagacggaccgtatcagcacctgccccaccttgggacgtcgaaagggtggcagctccagcgcaaaggcggatggcactcctttgagcactgtggcggaaagaagccgggaacagcccagcgtaacgcccacgcacagcacgatcagcccaagcatcatcgctgcgcctgccagcgaccccacaggcccctcagcaaggacaaaaaacatggaaatcaaggcgatcagtgtgggaaaccggccattgcagggcaccagagcattggtcagaatagcaatcagacgctcgcgcggactttggatgatgcggcagcccatcacgcccaccgcgttgcagccaagccccatgcacatgcaaagcgcctgcttgccgcaggcgcggcagcgctggaagcagcggtccagatggaaagctacgcgcgggaggaatcccagatcctccagcagcgtaaagagcggaaagaagatcgccatgggcggcaacatgacggacaccacccagctggttacgcggtatacgcccgataccagcgcctccgtgagccattggggagcccccagccccaggagccaggcgaaaaggcgtggctcaagtccggacagcgtttcgctcagccacgcagacggcacgttggcgcccgatatggtcaggtacagcaccagccccagcagcgccagcatgagcggaatgccaatgtgccggcgggccagcagccggtcgatgcggagctggcgcagatccgctgacgattgcgaaggacggcgcaccacgcggcggcatagctcgcccgcggctcggtagccttcggagacaacggtttccgccagcttttccctgaaaaagccggagcgctccagcacgtttttctgctcttgtatggcattcctgagcgagtcccgatcggatgcgttcgcctccgacagcaatctggcaaggaagccgtcatcgccggtcatggcgcgaagcgcggcaaaacgggctgtgcctgccgattcaatcgcgggaacggccttctggatctgctgtgcaatcacgctttgcgcctgctccaccgctttgggataggatagaagaagggccgccgcggtttgtgcggaagcacgcgccgccgcggcctcctccacccgctgcttgaggcggtcaaggccctgccggttccgggcggcgatgcctacgaccggcagcccaagcagccgttccagcagttcgatgtccacgtccatgccccttgaacgcgcctcgtccatcatattgacgcaaagcaccatgcgcgggctggcctccgccacctgtaatgccagattcaggttgcgctccagacaggtggcgtcacatacgacaatgactgcgtcctgtgcttcaaaggtcaggcagtcgcttgcaaccatttcttccggcgagccgctcagcagcgaatacgcgcctggcaggtccgtgagcgtccagtccgcagtgtttccccgtaccaggccgcgtgcggtatccaccgttttgccggcccagtttcccgtgtgttgccgaagcccggtgagggcgttgaataccgtgctcttgcccacgttcggattgccgcacagggctacgcgcagcacgctcattttttgcctccctccgcaaggcagaggacggtccgcgcgtctccgcttcgaagcgccaccaccgtgtcccggattcggtaggctctgggatcgccaaaagcggaaggaaacaggcaggtaacacggctgttttcggtaaagcccaggtcgcacaggcgagactgcatcgcgcccgtgcccgtcagccttgcaatgcgggcgctttcgccgctcgcgagcctatctaatgtaaaggcttgttccatcaggatcgcaccaccttgttctctacgttcgggtgaaaagggggaatgcctttccgccctgttttcagggtatgacgtctgcgcgcaggcgtgcgccgcttgccattttccgccgggcatgataccatacgtttggatggcgcagccgtatggatttacctgcaggcaatgcgcagtccgcagcgttttatgcgcgaaaacgttcgcactgtttattgaaggaggccgctttatcatgctttgcaaccgacggtccattcgccgctgcctggccctgatgctcgtgctggccctgccgctgtgtgcggcgtgcgctcaggagcagacactgccctccgcgggtgtgcgcgatcagacggtgcgcgtctatttgagccgcctgaacctgacggaccgcatggatctgtccctggtttcggcctatagtgtgaatacgcagcagggcgcccagctgcattttcaggccggcagcgaggtggccgtgctgctgcgcgatggcgcgctgtacctgtattatgagggaatgagccagctggccggccagagcgtcacgctgctgcgcgacgcggcagaaggggagagcggcttccgcctgaccaattacccggcgctctatgcgggcgatttgcagatcgacctggtagacggaaagatccgccctgtattgagcgtgcatgtggaggactatctgctgggcgtggtgccttatgaaatgagcgattcctttccactggaggcactgaaggcccaggctgtggcggcccgcacctatgcgctgcgcagccagaatcccacgcagccctatgatctggtggataccaccaacgatcaggtgtaccgcggctatgtgcccggaaacgatcggaccgagcgggctatccgcgaaacgcgcggtgtgtgcggcttttaccgcgaccagctggcccagtgctactattcggccagcaacggcggacagactgagctggtggaaaccgtgtggcccacggatgaggatttcggctattatgcctttggcgatgacccctacgacgtggccaatcccgacagcgtagtgcgcacctttgaaatgaaaaaggcctatggggaggaggaaaccgcgccctatgccctccgcagcctgttggctacgcagctttttgaccagctgactgccctcggctatgatcccacgccggagagcgtgcgcgtggacggggtgagcgctgtaagcgtatccggggcggcgagcgaggacaacaagtacatgacgcgcctcacgctgaccgtgtccatcagcggccgcacccgcaaaaacgcccctgcccccgtcgtggacctcaacgccgaggaggtcagcctctttgaggtggtggaggaaacgcccagccccacgcccaccgtgcaggcaacgggcttcgtgccggtggtcaccgttacccccagccccacgcccaccccggtctatggtccctttacccccattgaagaacccttcacgctggagctggacatcttcccgaccgcagaacaggcgctgggactggacattaccgcccattatgacaacgagctgtggagcgtgcgtgaaaccggcgacagctttgtcattgaggcgcgccgtttcggccatggcgtggggatgagtcagcgcggagcgcagtggatggccgccgagcatggcaaaacctatcaggagatcatcgcattctactatccgggtctcacactcatgcgctatgaggaccagcccgcgcagatgattcagccggaggcggcgctggccgccacccccggccccgcacccactcccaccccccggcccacgctcatgcctatgaccctgacgcccggggaaggccagtggctggctactgtgaccgaaatcgacgacgacagctcgcttaacctgcgcaaaacgccggatctgggcggcgagattctcatgcgcctctataagggacagcaggtgctcgtgttggagcgctgcccccaggagggatgggtcaaagtacgcaccgacgtggccgaaggctacgtggtggaggaatatctgacggcggaaacgccgtaaacgcgggttttacaagtatgcgaggaaaatgccgcgcctttctatggcctttttgcgaaatttgtcgtatactgatatcggccattcgaccggaaaacggaatgcgccagaggaggaaagcgcatgtggagccctgctgcccccaatgcccacgaaggttctgccgccgtgccgggcgcaaggcgccgccgtcgtgggcgcgccgtgcgtttctttcgtggctatttgatgatggtgggtgcgctgacgacgctgtatgtgcttttgcagctggcggtgcgcctgctggtggaaatcggaaaatggatgccctgacggaggaaatcagttgatcagatttgcaaaacggctgatcggcgttgccgcgtgcattgtggttgcgctggtgctggtccgcttcggtcccacgctgtgggtccggatttttggcggcggcaacacgcaatggatcagcgaacggttttcggaaacgcttcgggaaaaaaatgaactggtcgtctatgaggtggagattacggggcaggaaacggtatcgcaggatgcctggctgctgggcacagtgcaaaaggtggaaatgccctatacgtttcaaatgagcttcacagttgacttgagccaggcagtggtttccgcaggggaaggcctggtggaggtccggcttccttctccatcgcctgcctatccaaggcttacggtgcaggagaacgaggtgaaaaaatccgactggctttatcccctcaccccggagcgctatgcgcagatccagcaggagacggaggagcgcctctttgcccaatgcagcgaaaacgaggaataccgtgccggcgcctggggcgtaacggtgcgcaatgtggaatcgttattccagtctgtgctggagcaaagcgggtgggggaatggatgcagcattcgtgtcgtccaggacgacagcctgcgccccgaggccgttgaggaaagcgccgcataacgtaggccgacatttctcaggcagcggcaggtcatcttcgggatgacgcgccgctgcctctgtttttcacaaacatttcccatttattccatgcgtatttacaaagtatgaaaaaagcgttacaatacaaaatggttcttttcatcaatacggaccggaggtgccgcaagtgcccacgttgacccagctctcgtccaatctgacggaaattgtgatttatgcagccatcgcgctggttaccctgacgggtctgtgcaagtgcatttatccccttttacgaaatgccacacttctcaaccgcgcggtcatcaagctggagaagagcactgcggcgggggagcgtcccatctggcgcgaggcgcgcttcttgggccggtcgctgcgcaacgagtggcagcagtttttgcttaacgccggacagctggacatgcgtggcattccctgcgatacgcgcgaatatatcaacgaggaaaccgtagtggacaagccgggccacgcccagctggcggagctcattccgggcctgctgacctctctgggtattctgggcacgttcgtcggcctgatgcagggcctcaccagcgtggatttcagcaacgcggagggaaccatccagagcattccccggttgctcagcggcatgcgtttcgcctttgccacctcggtggcgggcatctcctgctcgcttctgttcaatatgtttaaccgcatggccgcaggccgggcggtgcgggcgctggacaatttcgaggatgctttctacgagctggccatgccccgtccgctccagccggatgtgcagatgatgtgtcagaagcaggacgaggaagtccgcatggcacgactggccgaaaacgtaggcaatcacgtggcggcctcgctggaaatggccattggacgcgccatggcgccgcttacgcagtcgctggatacgtttatcaagtgtgcgacgcgtgagcaggtggacggcgtgcggcgcatcgtgggccagttcgtgcagcagatgaacacatcgctcagcggccagatgacagcgctgggcgacacgatgaacgcggttaaccagggccagctgcaaacccagaagaatctgcagaccacgctggacgccgcgcgcgccatggcgggcgacgcgcaggcgatccgggaagcgagcgcggaaatcgcccggcaaatgcaggcattcgctcaggagatgcaaaaagaacgcgacagccgcgccgaagcgctgggcacagcggaaagcgcaggacagtcccttgccgaccagctcgatgcgctggcggaatccttccgtcgcatgcaggtagccgcggactttctgacggatgaaatggaagtgcttccctccgaggatgcgcaggctccggcggcggagctgtaaggagagtggcagatggcacgcagacggtatatccggcgcggcgcgagcaaggcggacggcggcgcgtcctggatcagctactcggatatgatggcggcgctgctgctggtatttgtgctggttttgtgctacagcgtgtatcaatattttctgatgctggaaaccaagaccgccgagctggacgagcagagcgcgcttttgacccagcagcaggctacgctggatgagcagcgcgaggagctctccgcgcagcaggccgctttaaccgacaaacaaaatgagctgacggccgctttgacacagctggatgagaaggaaagcctcctcaacgaccagagcctcacactggaagagcaggaaaagattatattggcggcgcagaccgcactgagccagaaggaagaagaactgaacgccgcgaatcaggaattgaccaacaagcaacaggagctggccgacgccaccatcctgctgggtcagcagcaggacacgctcaacgcccagcagcaaaagctcgacgacctggtgggcgtgcgcacggagatcgtgcgggacctgaccgcagcgcttagccaggcagacctcaaggccaccgtggatggcaacaccggcgatatcatgctggaaagcgccgtatttttcgatgtggccaagagcaatatcaaggacagcggacgtgccctgctggatgagttcattcccgtctatctgggcgtgctgctgcagcccgaatatgtggactatctcggggaaatcatcattgaagggcataccgacacgcagggtacctacctggtcaacctcgaattgtcccaggagcgcgcgctcagcgtggccacctactgcctgcaaatgccgaccctgagcgaggagcagctggaaaagctgcgcgaaatcctcaccgccaagggtcgcagctattccgatcccatctataacgaggacggcaccatcaatatggatgcatcccgtcgcgtggaattcaaattccgtatgaaggattcggaaatgatcgacgaaattcgcaacattctgggttctggcgtcaatcaataaggaaggacggtgcagcatgcgcggcctgaaaattgcggccatcgcctcggtttctctgctggtggtgatggtgctgctggtgggatacctgtttctgacagctgaggtgcgcgtgaccggcgttgaagtggtgggcgtttcggccgcccaggacccggcagccttcgaggcgctgaaaaacgccgtggaggaagaaacctttcagggcacgctataccaaaagccgctggaatggaaggacccttcggagtatgtctacctgacctacacgcttcgtattcgaaatgactgtctcgtgcccatcgacatgatcgaagtgcaggtggtaccgcagacgacagacatcctgcaaataggcg

SEQ ID NO: 3561 - DNA, 32759 bp, Unknown
  16S sequences of unknown bacteria
ggtgccgacggagttcagctcttcgtagttctgaaggtttcctccgccatccacttcgatgacgaaatcgtatccgtttgccttccggatttcatccaggcggcgaattttgtccagtgctctcggaatgaatttctgtccgccaaaacccgggttcacggacataatcagaatcatgtccactttgtccaacacatcctccaccatcacgataggggtggccggattcagggcaacgccggctttcactccggtgctgtgaatatgctgaatcgtccggtccagatgacggcaagcctcctgatgaacggtaatgaattccgtgttcggtgtcacgaagtcctcgatgtatcggtccggatcctcgatcatcagatgtacatcatatggaatggttgccacattattcaaacttttcatcacgccggctccgaagctgatgttcggaacgaaggcgccgtccataacgtccacatggatgtaatctgcgccgaattcacatatttcctgtacatccgctcccagtttggaaaaatctgccgatagaattgatggtgctacttttgccatttctgaacctcttcatacatttttaaataactgtcgtatctcgtccggcagatttcaccctctgccagggcttccttcacgccgcattccggctcgttaatgtgcacacagtcgccgtagcggcaatgagctccgggttcccggaattccggaaagaagtttcgaagctcccgaggatccatctccggcaaatccagagacgtaaatcccggcgtgtcgtacacataggtggcgtgatccagtggaaaaatttctacatgccgcgtggtgtgctttccccggccggttttctcgctgaggtttccggtctccgcatccgcatccgcaatcaatgcgttcagcaatgtggatttgcccacgcccgacggtcccgccagagccacgctctgtcccgcaacggccttgcgaaggtcgtccacgccctctccggtgacgctgctgatgggatagacgggatacacctcccggtacatattctccagctctcgcatccgctcttccgatgccaaatccgcttttgtaaaaacaagaatcggccgaatcccggtaatctcgcagtacaccgtcagcttgtccaccgccaggggaatcatctccggcgtttctgccgaagagacgatgaccagcgtgtccaaattggataccggcggacgctttagaatattccggcgcgggagtactttggtgataatacattccccatcttccggacgaatttcatattccacctcgtctcccacatagatggtatccttctttcggcgcttcagatttccccgagcatttccttgaatgatttcttttccgtcggagacgtaatagaagcccccgattccttttactacttttccaatcatatgctaatcgtccaccgaattgctgccgttatcgtcgctgtcggtattcgacggcttcttgttcggcttcttcttgtcgttggtcttcggtgcgcccttgctgacctcgatatcaatcttagtacccttgttcagctcggtgtttgccgcatactgctgccacattacgtagccgctgccgtatgcattgctttcttcataggttaccttgcccaccttgaagcccgcacttcggagcgcctgcttcgcctcggtgagggttcgtccggtaatggacggcacggtggacttctgaacgccctttccgtcgctgaccacgatgttcacctgagtgccgtgatcggcttcctcgccgccgttcggatcctgggaaatgatggtgcctgccgcttccgtggaagtctgctgtttaatcgtacccagctcgtaatccgaagacttcagcatctcttccgcttcgctttcgttgtggcccaccagattcggcaccgttccggcctgaggtcccttgctcacatgaacggtgatggaagcccccttcttcgctttcgaaccggactccggatcctgctccgcaatctggcccttggagtagtcgttggagtagacctccttcccctccttcagcttaaagccggccgcttccgcttccttcttggcttgttttaccgtcattccgtagaggtccggaacttccttctgaccggagaaaaggccgttgaatccggcaaccgcaacgcccaggcccactgccagtaccgcggctatcgcaatcaggatgcggcgcttcttctgcgctttggtcagcttcttcttcggttttttcttcttctttcgggatttccggtcgtaggactcatcgtcgtcctcatcctcgtaatcctcttcctcgtcggtctgacccttccggctctgttccacctgttcggaggcttcgttaaaaatagaatttcctaccatacgggtaacgaattcaatattgttcagctcttcgatcagctcgtccgcactgctgtagcggttcgtctggaacttgctggtggccttcagcacgcactgctccagtgccggcggaataccgtccaccagctggctcggcggcgtaatctcttcgttgatgtgcttgagggcaatggttaccggattatctccgtcgaagggaacctgtcccgtgagcatctcgtacataacgattcccaaggaatagatatccgaacgctcgtccacgtaatttccccgcgcctgttccggcgagaaatagtgaaccgaaccgatgattttgcttccggtggacatggtggcatcgttcaccgctttggcgattccgaaatccgccagcttcacgattccatccgtcgtaaccatgatattgtgcggctttacatcgcggtgaatgattttgttccggtgcgccacccgaagtgccgccgccacctgtttggtgatctcgatgacacgacgataatccatcggtgcttctttcgcgataatctcattcagggtctggccttctaccagttccatcacgatgtagttgatgtttccttctctgcctacatcgtataccccgacgatattctgatgagccagtcccgctgctgcctgagactcccgcttgaagttctctacaaacgtcgggtccttcgtaaattctggccgcagaatcttgatggcgataaatcggttcagcagtttgtcctttgccttatacacaacggccatgccgccgtctccgattttctccagcagttcatagcgacccgccagcaatctgttactcataattgtcctccaccatacttacacaaataaccgagatattgtcgtttccaccgtttgcattggcccgatccaccaattccttggcacaggccttcatatcatcggtagaagtcattaattccagaatttcctcttccgatacttcgtcgtacagcccgtcgctgcagagcagaattcgatccgtgggttcaatataaatattgaagcagtccggattgttgtaagaattcgctccgatggctcgagtgattacgttcttcttccgatggtgctccgcctcgcttcgggtaattgcacccatcataaccagatcgttcacataggtgtgatccaccgtaatctgatgaatttcctttccgtgaatgaagtacacccggctgtctcccacattcgcgatgtagagaatccggtctcgaacgtaggcaaataccaatgtggtggccattccggcacactccggaacggaatgagccatctgcttaatggcttcgttcacgtaatccactgcatcctcaaagtaccgaaatatccggtcggatccttccagcgcctcaatggggttgttctcaaaatattcgctcacgatatccagcgtcctattgctggcaatctctccggcccggtttccgcccacgccatccgccagcataaaaacattatgccgcgtcagcacgcgaatcgcatcctcgttctgggttcgcttttttcctttgtctgtataatatcctatttccattattttccccgtcaatttactccggcttctccagtacggtatagaaaaagccagtcttattatacggtaaaatcagccttttttcaataacccgactgtccggcatgcttttttggaatgcctccacgactttttcattctcttctttattaattgtgcaggtggaatacatcactcttccgcccggttttgcatatttccacgcgttttccagaatccggcgctgaatcttcaccaggccggcgtactctccggtatgatctcgaagcttgatttccggcttcaccgggatggttcccagcccggaacacggtacgtccgccaccaccgcatcgcagcagccttccagctccggatagaacacggtggcatccttcactgcggtctccacggaatgaaggcccagccgctccgcatttctccgaatcagctccgtccgatgggggtgaatatcccaagcttccactgtgccgcagtcccccatcaactcagcgattcccgtggtcttcccgccgggtgccgcgcacatatccaacaccttagatccggctttcggcgccaatgcctgaatcgccatctgagaggaaatgccctgcaccgaatagtgcccctttcggaacaaatcgttctgaatcaaggcgcccccttccgtcaggatgccgctgtcgcactccgccgaaggcgtcccctcaatctccagctcccggagctgctgcagaagcgtttcccggtcctgcttcagcggattgttccgaagtgccacgggcaccggccggttaaaggcatccagaatctgaatcccctcttccgatccgtactgattcagcatcagcttcaccaaattctcctggcaggaataccgaacggccaaagcgtgtcggtcgcttccgcccggcaaattcatttttttaccgccccgaagatagcttcggaggacgccgttgataaaaccacgattgtgtctgtccacggcgccggccagctccacgatttcgttgacgcataccgcatccgggatgctgtctacttcattcaggagaaaaattcccatgcgaagaagaaccttcgtccggcttttcatgccccggagtccgttccggcaaaggccggcaatgacgtaatccagggccatggagcgacgaaggatttctttcacaacataacgaacaaagccgggagaacagttttttccgtcctccagggcttcgttcatcgcaatattcgaataggcttcctgagaataaatctttcgaagcgcattgtaactcactcgaaaatcttggttcatctatctgtcattacttccgcggatcagcaggatccggataagagatgcaacggcggttgccagcgcggccacgtacgtcatcgccgcggcgtgaagcactttgcggcttccgctgtaatcgaaatcgctcaccatgccgatggaagtcatctgcttcagcgcccgattgctggcattcagttctaccggcagtgttaccaggtggaacaggattacgaatacaaaacacagcgctcccagattgaacagcagggagccgtaccgactggaggtggaaaaaatcaatcccagcatgatcagcggccaggagaaggtggacgtcaagttcaccaacggaacgattccgttccggattcgtaccggcgcgtaattggtggcatgctgaatcgcgtggcccacctcgtgacaggcgatgcacatggccgcaatggaatccgtgtggtataccgcctgagacaggtttaccgagttgcttctcgggtcgaaatagttattcaaatcgtcgccgccgttcaggatgttgatcggcacgccggacagcccattggcatccagcatcatccgggccgcttgggcaccggttaggcgccggctgttctccacttgagaatatctggaatacgcccgcttgattctgccctggacaatcatggtaaaaatcatcgccggaatcagtacaatcatcgagctgtaatatcccattcctccgtagtacatagtctattctcctttcgtcagccgatctcccacggacacgcccgcgcctcgcagaaaatctcctgcactcattcgtttctttccctgcagctggacttccagaatccgaagtttacccttgccgcagtccaccgtgaaggattttttgtccaccgcggagattacacccccgtcgtgggtaccttcttcttccgacacttccgcccggaagaatttaatctgcttcccgttaaggaaactgtacagcgccggccacgggtcgtaggcccgaatctttcgttcctccgataccgcatccccgctgaaatccgtccgtccgtcttccttccgaatcatggatgcataggtatgttcttcctcgttctgcggagtatagacggccgttccgttcacaatctccggaatggtcttcaccagaagctccgcccccagtaccgacagtttgtccgccagttcatggatggtcatgccttcgatgttcatttccgctttggaaatcatatctcccgtatccaagcctttggccatcttcatgatggtcacgccggtggtcttgtccccctgaaggatggaatactgcattggcgccgcaccccgaagtttcgggagcagggatccgtgcacgttgatgcagtcgtacttcggtgcattcagcacccgttccggaagcagctggccgaaggccgccaccacgatgaaatccggttccagggcttccaattcctgcatgaattcttcatccttgcgaatctgctgtggctgtgccaccggaagtccgtgctgcagcgcgcattcttttaccggggagaaggtcactttgccccgattgcctcggcggtccggctgggtgaccaccatcggaatctcgcagccgcattcaatcagcttttccaatgaaggcaccgcgaactccggtgttcccataaaaacaatcttcatctaccgctcctcttcttcctgttccttcaggatttccgcatattcctcgttggtcatcacgttgtccgaacggtcggtatagagaattccgtccaggtgatcgtattcgtgacagatgcaggtagccgcaaaaccgtcaaagaccagatcctgcatttcgccttccgcatccagtccctgaatccgaaccttctccggacgaaccacgtgtccgatgtatcccggcacgctgaggcagccctccatggagtcctgctccccttccttctccagaatttccggattgatgaacacgtaattgtgttccggatcctccagttccggacggcacacgaacatccgcttcatgattccaatctgaggcgccgccaggcccacgccgtcggcttcgatcatggtgtcgatcatgtcacgggtcagggtctgaatgtgcttcgtcacctctttcaccggtttgcatttctttgcgaggatctcgtcccctttctctacgattttacgaatagccattgttcctcctacacgatgccatacggattgacatcaatttcaatatatattgtcgacttctgctgaatcatccaatcccgataccgcatgtacatctgaatgaatccactgcgggaccctttcggcgctttgatcagaaaggtcacccgcttccgttccgtattcccccggagcacttcctcccgaggccggtaaatcatggatttatccggaagattctgcatattttccaatttccctttaaaatcctccgcatactccattgcagtccgattccccggtcggtatttttccccttctgtaaaggataccgcaattaaatcggagtatggtggataattcatgatatttcggtggagtaattccgactcatagaacccgtcataatccccctgagcggcaaaagcgatggcttccgcctccggattgtaggtctgaatcaccacccggctggattccgaactccgccccgctcttccggacacctgggtcaccagctggtaggtgcgctccgacgcccgataatccgggatgttcagggaaatgtccgcattcacgatgcccaccagtcccacattccgaaaatctagaccttttgccagaatctgagtgccgatgagaatgttcgtccgttggtgcacaaaatccgacatggtgcggtcgatttccttctggttcttcgccgtatccagatcgaaccgcgccaccttgtagtccggaaacatctcctgcaccacttcctccaccttctcggtgcccatgcccccgtaccgaatatgagggcttccgcattccggacatttcttcggcagcggaaatttcttcccgcagtagtgacacaccgccacattctctcgcttgtggtaggtcaaggaaatcccgcaatcgtcacactgataacggtatccgcactccacgcactgaatctgaggcgcgtatccccgccggttcaggaacaggattacctgctcccccttctccaggcagtaccgcatctcctcctgcagccgcaggctgatcatctcattccgaccccggaccacctgtcctcgaatgtcctcgatttccacatccggcagacggctttttcccacccggttcttcagttcaatcaggtgataaattccgacggatgcacggtaaaaagaaaccacgctgggcgtcgcgcttccgagaaccaccgtggcaccgaaggtccccgctctcttatacgccacgtccatggtttcgtatttcggattgtggtcggatttgtaggtggattcgtgttcctcatcgatgaccaccaatcccagatccgtgaccggcgcaaaaatcgccgtccgggcacccagaatcaccttggccgaaccctctcgaatccgaagccagttctccagccgcttcgaagtggtcagtttgctgtgcaggatggccacgttctccgcaccgaagcggttctgaaaccgcttctccatctgcatggccagagcgatttccggcaccagtacgatggcacttcttccttgggccagcgcatgctccaccgcatgcatgtaaacttccgtcttcccgcttccggtcacccccttcagcaggaacacgttttcctttcgacgatccagggactcgttaatctgcttcaccgcagattcctgctcctccgtcagctcccagggctcttcccggagtgccggcgctttcaccagcttctccttttccctttttccgcccacggtgaacatcttgaccccgtcaatatacttgatgccgtagcgccgccgcatccagatggcggtatcaatcatctcttcggaaagagagcgcctcttgtccacagattcgatttcccgaattttgttctccggaagatcggtttccacaccggtttcgaatacgtacgcatccaccggcttctttctgttactgaacagggcgctgactttatcacctaccgccaccgaatccggtgcgcggtaggtgaagtaggtatctgttaattcacttttattgtcgattacaacattgatgtattgcatttcttacagtaggaaaatattgtgctctgcgcactcctcaatcatatcttccggccataccgatgcctgtacctctccgatgtgcgctttctgcaagaagaacatgcacagacggctctgaccgattccgccgccgatggacagcggatactttccggtgatgacaccctgatggaatggctgctccagacggtcttcttttccgtcaatcttcagctgacgcttcatggactccgcatccacacggattcccatggaagaaatctcgaaggctctgtccaggacgtcgttccacaccaggatatccccgttcagttcccaatcgtcgtagtccggtgctcttccgtcatgcttctcaccggaagccaggacgccgccgattctcttgatgaatacggcaccgtattccttagtaatcaggtcctcccgttccttcgggttcttgcccggataacgatcttccagatcctgagaatcgatgaatgtaatctcgttcggaagctcaatctgaatatcccggtagagacggtttacataatcgcccaggttcttcagtgcgtggtaaatcgtcaccacggtttcttccagatattcttccgtccgctgctctttggtgattaccttctcccagtcccactggtccacgtagatggagtgaaggttatccaattcctcatctctccgaatggcgttcatgtcggtatagatgccgtgacccggctctacttcatacttgtacaaagccattctcttccactttgccagagactgcacgatttccacctgacgctcgttcatgtccttaatggtgaaatccacccggcgttccacaccgttcagcgtatcgttaaaacccgtttccgggaatacgaacagcggcgcgctcacacggcgaagctgcagtccataggccagctcctgctggaagtagtccttaatcttcttgatggctctctgagtctccttcagacccagaatcggctcatagccttccggaataattacgttactcatagttgtttctccttgtccccttcataaccctttggcattagcgtaccttgcatagtcgcatccgcagaatcgctggcgatacaggccatacttctttgaaagttccacacttctgccaaaaccgttcttcttcttaaaatcaatcggcaggtaacaggtgcccgtctctgcggcaagttcttctcccgtcttcgtgagaaggtcgtagttcttgtgcgggctcaccgacatggtggatgtccaacaatctgcgtttcttgcttttgccacacgagccgcctcttcatatcggagccggaagcactcttcgcagcgccgcccaccttccggttcatccttcagcatcgccgttcgctccagatatttctccggttcgtaccgtccctccagataatgcaccaaagtccggtccttgtactcttcattaaagagacggaggaatttctccagattctcttttcgaagataatactcttccgaatccgtgatatttggattataatagaacacggtcacatcgtagtcgaatgcggttcgctcgacacaggctgtagcacaggggccgcagcatgtgaggagaagaagcgttggtttctcttctggcatgaatctgtttccctttcaaataataaaagtaattatatcacgttgccctttgtgtagcaacgattttggaggaaacatgcaaggcggagaacgatatttttctataagcaattatttcaaacaaacctttggcgaaaaaaccatcaagctctctctggatgcgggattcacctgtcccaaccgggacggaaccctgggcaccgggggctgcgccttctgctcttcttccggttccggcgagttcgcctcgtccatctcagagcagattgaactcctcagcgagaaatggccccatgcccggcacatcgcctacttccagaaccacaccaacacctacgcaccggtgccggttcttcgaaaatactattacgatgctctttcggatccccgaatcgacggcatcgccatcgccacccggccggactgcctgggcgaggacgtgctgaatctgctggaagagatcaaccgggagcacttcctctgggtggaactgggccttcagaccattcaccccaaaacctccgaagccatgggcatcggttactccctggacaccttccacgaggcgattaccgaactccaccgtcggggcatccgaacggtggttcacgtcatcctagggcttccgggggaaagccggcaggacatgttcgataccgtatcctacgtggcccggatccaccccttcggcatcaagcttcacatgctgaacatcgtccgaggttcccgtctgtacgacatgatgccggactacgttcctttccgttccatcgaggaatactgcgagctggtggtggacctcctggaaatcattccggaagacatcacggtgcaccgactcaccgccgacacccagcgcggccttctggtggcgccggaatggagctaccgaaagcgcaccattctgaatcgaattaacctgcgtctcaaagaacgggatacccgccaaggggcaaaatgcggtgcgcacaatcaataatttactcacaaaaatgggttcggctccccggaaacgtccggagaatcgaacctgtttttttatttcggcaacttcgtggaagacggcatactcttgtacaccggaatctcgaataccagcttctcaccggtgaggccgtaggctttgtaggcctttgccatggacttggattccgtgtacggtgccgtgatgttggtcatgtactgatgggtgcccgcccgcagccatccgttcttcacgttgaaccgctggtagtagatggtgttctgcccccggttgatgtaatcctttgacagcacctgagcgccgccgtacaccgcttttttgcgggaggtccagcccttccgatatgcgtacttcagacctttcatcaccggattggatcccgaagcagcgccgatgttgtacggattgtacaccgtctttcccttcatccggtatccccgaattgcgatgcttccgccgccggtttcctgccgagcccgagatgccaggaaaatcggactcaccttgtacttcttgccggcgctcacgaacagagacggcgagaatccccgcttcggcagctccgttccgctgaggactttgttcaccgtgcccgtgttctgataagaatggtaattcaaggacaggtacatgtagatgttccggtcgttcaggaaatgacggggatccatgtagtaggacaccacctttttgttggcgttgaaccaggtggagccgtccttggcgatgtactttccgttccggtagctcttccggcccttgtcccgataggattttgggtaggatttgtagattagggagaccccatcccgggtttcccgggacagcaccgtgctgtagctcagattgaccttcttcgcccgaaaaacccaattcggatgctcgttatgaagtttcttcaaagatttccgataggatgccgggaacccctgagacttcaggtaagcgtcgtaatcggaggtgctcaccttcgtcaaggaatccgcgatgacatagcggtactttccgttcaccagaaccttatcccaccatgtcttggcccccttgtaccgagaccgaaggcgcacggacaccaccgcccccttggacaattttccctttgccttcatggatgttttcggcccgattcgagtgggcaccttccgggaagcccggcccaacaccgcctgatagcggatgccgtccacccgcttggccagcacgtagcccttctttttttccacgccgatgcggtaccaatggtaccgggaatccgtccggtttcgatgggtatagacttcgtaataaacggtaattttcgtattgttccgaagggttcggatttttttcgatgaggtggaggccttttcccgcagcaccgtccctgccttcgcattgatggaggcggtggcatttcccggttttgcttttatcgcggcatgggaaaaattcgttcccgccatccacaggcaaaggatcgtcatgccgattaccatcattcgaattccacccccgcgttctgcgaatcgccgcacgcccgtctccttcctcgaactagtcgtctgccgacaaccttccgtcgttgtaatgctttcggcacagggaggcatacatgtcgttgccgccgatcgcaatctgatctccctgcttgataatctttccatcctgaattcgggccaccatggtggctttccgaccgcaccagcagatggtcttgatctcttcgatcttgtctgcgtacaccaggaaatagtaggatccttcgaacagctcattcttaaaatcatttttcagtccgtaggccaataccggcacgtcgaagctgtccacgatttccgccagctcctgcacatgatgcttccggaaaaactggcattcgtccaccagcacgcagtcaatctgatgccgcatgttcttctcgatgaacagcgtcatgatattcgtatcgtcatccaccgtataggccttgtggctcagtcccacccgggaggtcaccctatcccgctcgtagcggtcgtccacctccggaaccaggcacatcacccgcttgcccagctcctcgtagttgttggccaccttgataatctccagggactttcccgcattcatcgtactatatcgataatacagctgtgccatttcgctctccttattctgcttaatatctgcttattctaccacgaattccccggagaagcaaaaagcgggaatgcttctgcacccccgctaaaaagtcatttatgatactacttccaagcacccattccgccctgcaggcagatgattctgctttcgtctacaccgttcttcaccatggtgttccgggcttcattggccttggcgttaccggtatagcataccagaacgtaaagaccgttcttgttgtcgtttacggccttcattactgccgcttcatcgccggacggagcggataccgcgttggagatatgtcccttatcgaaagcatcttttgctcttacgtccataacggtgaataccttctgtccgtccacatcggccttcaggttctccggtgtgatgccgtttgcgaagttgaagttgccggaagaagtgtgctttgccacaacgtagcctgcatactttgcattccatgccttcatgccgccggcagcggaccgcatggaatcgtctccgcccagagtttcaatgtttgcattctcaactccgttattcttcagaagtccggttgctgccttggcatatttgttgccggtgtagcagataacgatgtacttcttatccttgccgtacttatccacagcagcctttacgtttgctgctgcagcgtccttgttgccggaaaaaataccgtcaacgtctgcggaaaccgcaccggcaatgtgacctttttcatagtctgcagcctttctggcatccagaattacgtaggaagaatccttcatcttgctgaatgttgtgtcggcgttggtgtagttgtaatcaactacttcatatccggcagctttccatgccttcattccaccattggcagactttctagccttgtctccacccagtgtgaagatgttgtcattgcttacgcctaagcttctaagctcagcagaagcagcctgtgcatatctgttgccggagtagcagattactgcatacttcttgttctttccatacttgtcaacgacagccttaacgtttgccttagactgtgcttctgtgatggacttaccaacaaatccatccatgtctgcggatactgcatcttcaatatgtccagttgcaaaatctgcagcttttcttgcatccaagataacgtaattagctgcattgtccttcagagtcttcgcagaaatatagttatctgtctgtgcagtatatgtaatggttacagtcgtaccctttgccggcatgttctgtggaacgaatggttctgcacatgtcttgaactcgttcgtaacaacgcctgcgtagcaggatgtgttgcaagtcaggcatccggatccagcgttgtggttatttgcaacgttggaataaatcatgctgaaattatcgttatccttcgcacctgtcagagtatcaaccattttgatggtctgatttccattctgaatgttgatatcgaacttagtgtagttcttgttaccaataccggactgtgccagttcatcaatagtcttgtttccagcctgtgcaacttttgcatccgtcttgaagtttggatttgtgttccaagcctttgcagaaatcttaccaagagctgcgttcagctctgccggagttgcatcagtaacaaaatacggattctgcttcgatgcgcccgcattcttcgttacaacgtaatgcatagatttcgtttcagtattatttacagtagcagttacagaaacggacttattcgctttgtccactttaattccggatacagttactgcacatgtagccttcttgctgccacccttctcggttgcagtaatagtagccttacctgccttctttgcagttacagtacccttgctggttacagttgcaacagaagtattggaagacttccaggtaacgccctggttgtagaatcctgcggatcccttcacggttgccttcagtgtagtcttatcgttcgggaaaagaattgcagacttcttgctcatggttacggacttggccttcagattcgttactttaatcttgatggtcttcttaaccttcttgctcttcttggaagttgctgtaatctttacagttcccttcttcttaccggttacgtaaccggacttggaaacggttgcaaccttcttgttgctactcttccatttaacggacttgcttgccttggaaggttttgtcttataaacagatacctttactttacccttgatatccactgtagtagaagtggccttgaggtaaatcttcttcggcttctttgttgccgcattagcggtaacggatgccatagccatggacagtgccacgcacagtgccaacatgactgtgaacattttcttcgaacgcttcatgttcaaattcctccttcgttcatcaatactatacaattaattgaaggggctcccccctttgcggcattccaaaagcggaagccgtacgctataattatagctatttttcattgaaaaataaactatagttcggtcgtttttgcgaagtatagtaacaatctatattctactgtctttttattgatatttcctatacttccttgtgctttgccacccacacctgacgaatcagggtaatcagaatcgccagtgcgaagaggcacagcagtccgataaagagcttctgcgctccgccggtgagcattccgcccacataagaatacacgatgcaggccggcagctggccgaggccggttgccaacatgaatccgccgaaatccattgcggtcagacccgccgcatagctgacgatatcaaaggaaataaacggcagcagccgggcaatcagaatgcattttttgccgtatttatcaaagaatttctcgatggacagaagtgcgcccttcgtacacagcttttccaccacgtctcttcccaggatccgggcaatatagaagcatactgcggcacccagcatagaagacacccaggacaagatgcatccctgccaccatccgaagagattcgcattggtcaatgtaatgaagaatgccggcagcggtgctgcgatggactggaataccatcaggaaggctgacaccagcatcgcccattttccgtacttcgcaatgaagtttctcatctgatcgaagtcgccggacttgaacatggcaaccacgttgttaatccaagtgtgtaccgacggcactgcaaaatagattacaacgcaggcgatgagaagtcccaccaggacgatttttccggtatgcttcttctttggagcattcacttctttctcgttcatctttctattcctcctaaaatcataaaacaatcatactgattaattgtaacggctcttcacaaaaataacaaataggaatcgactttattttcggtgcggaactattgattataccaatacctcgcccgaatataccgcaaacgggcaaaagaaaaacggtatgcaatgcataccgttcatggtgcccagactcggaatcgaaccaaggacacagggattttcagtcccttgctctaccaactgagctatctgggcatattaccttattcaataaatggtgggccatcagggacttgaacccgggacctgccggttatgagccggatgctctgaccaactgagctaatggcccatatgttgggtaaatggtcggggtggcaggatttgaacccgcggcccactggtcccaaaccagttgcgctaccaagctgcgctacaccccgatattcagtacagtccttagttaattggcaggggcagtaggattcgaacccacggcacgtggttttggagaccactgctctaccaactgagctatacccctaaaaaatgtggcggagaagatgggattcgaacccatgcggccctaataacgaaccctaacggtttagcaaaccgtcctcttcagcctcttgagtacttctccagatcatgtgcattcttggcggagagggtgggattcgaacccacggtccctttcagaatcactggttttcaagaccagctccttaaaccactcggacacctctccggatgttttaagagtaatggtgacccatcggagactcgaactccggacaccttgattaaaagtcaagtgctctaccacctgagctaatgggtcgcaatggctggggtagcaggactcgaacctacgaatcacggagtcaaagtccgttgccttgccacttggctataccccataatcaagtcggtctgctatactctctctgtttcttttaaaaaaatagtggtgagcccacagggattcgaaccccggacacacggcttagaaggccgttgctctatccaactgagctatggacccacatggagcggatgatgagaatcgaactcacgctatcagcttggaaggctgaagttctaccattgaactacatccgcataaaagatggagcggaagacgagattcgaactcgcgaccctcgccttggcaaggcgatgctctacccctgagccacttccgcatattggtcgagggagatggattcgaaccatcgaaagcacagctaacggatttacagtccgccccctttggccactcgggaatccctcgataaaattattggagctgatggagggaatcgaacccccaacctgctgattacaaatcagctgctctaccgttgagccacatcagcttattgttataaaaaatggcgaccgggaacgggctcgaaccgtcgacctccagcgtgacaggctggcattctaaccaactgaactacccggccataaaagtggtggacgctatagggctcgaacctatgaccctctgcttgtaaggcagatgctctcccagctgagctaagcgtccatacatcagtctgtcactcattatagcaaactttcttgctgagtgcaactctttttttcagaaacttttgaaaagtttttcgttttctttacgttcctgacgacaagcaatatattaccacagcatctaattgctgtcaacgattttttcggaaattttttcgttttttttcgacagcagctcgcaggtacccgaagtgatatcgttgaaagtctttattaccaagccttccgcctcggttttgcaccctacggtgaccttcactttatccatgtattccgtatggataatatggaagtccccctgctgctccgcattatttatttttgccaaatgagaatagtccagcagatactccattacgtatccgtcggttacggtgcagatgccggctgcctccagccctaatttggcggatccggaatacgcccgaaccaaaccgccggttcccagctttactccgccgaaatatcgggtcaccacaaccaccaaattggtcaggccctcttccaccagcatgcgaagaatgggcggccctgaggtgccctgaggctccccgtcgtcgctcatccactgcagctcctgtttttccccgattaccacggcagggacgttgtgcgtggcatccttgtattcttcttttatcatggcaacgtacgcctgcgcctcctcgtaggaatctacgggagacacatgcgtaataaagcgagaacgctggattacctgttccgcttctgcttctttgtaaacggttttatagctcataattacaaaatatacttatctacatccacttcacggattttttctttgaacttctcctgtaccatttcccggtccaccagaacgtgggtgatttccggattcgggagctcgtaggaaacatcttccagaagggtctccatgatggtgtacagtcttctggcaccgatattttccgtctcctcgttcatcaggaaggccattccggcgatttcgtcaatggcatcatcagtgaactccacctgaactccttccgtctccagaagggctttctgctgcttgattacggcgttttccggcaccgtaagaatctgcttgaaggcttccttatccaggttcttcagctccactttaatcgggaaacggccctgcagctccggaatcagatccgacggcttggatacgtggaacgcgcccgcaccgatgaacagcatatggtccgtcttaaccgggccgtgcttcgtattgaccacgctgccctctacaatcggcagaatgtcccgctgtacgccttctcgggatacttcgccgctggcggtcacggagctgccggaggcgattttgtcaatctcatcgatgaacacgatgccgttctgctccgcattcatcagcgcctcgtccaccacctgatccatatccagcatgctctgagcctcctgctcccgcaggatctttctggcttcctttaccggcagcttcttgtgcttggtcttcttcggcatcatatccccgaaaatatttccgatggcgatgcccatgccttcgttctgcatatccagctggttggtgttcggcgtcacttccacgtcgatttccaccagctcgttctccagctttccgtctctcagctcacggcgaacttgctcccttgccatggcaatatcgtctgccggcttggcgttctccgcattctgcttgttctcgtactcctccttctggctggtatacccgccgctgttgaggatgaagtcaaagggattgctgctctctccggacttcttctttttctttgcatcgggaaccagcgcttccagaatcaaatcctctgcacgctgatctgcgatatcgtatttctcatcgatatgcttctgcttcgtgatgcgaacggaggcttccaccagatcccgaatcatggattccacgtcgcggcccacatagcccacttcggtgtacttggtcgcttccactttaataaaaggagcttccataatccgtgccaaccgtctggcgatttccgtcttacccacaccggtcggtcccatcatcaagatgttcttcggtgtaatctcttcccgcatctcatcgctgagctggttccggcgataccggttccgcagtgcgatggcaacggacttcttggcctcatcctgtccgatgatgtatttgtccagttccgctacaatttctttcggtgtcatattcttgatattcatagtaccgggcacgcctccttacagtttctccacggaaatgtggtcattggtatatacgcaaatggaggacgcgatttccagggatttccgcacgatggattccgcatccagttccgtattgtcatacagagcccgtgcggcagagtacgcaaaatttccgccggatccgatggcaactacatccatatccggaacgattacttcgccgtttccggatatgaccagcaaatcgtctcggtccattacgatcatcagcgcttccaggctgcgagctcctttatcggaacgccagatctgagccagatccaccgcggcccgcttcagatttccgctgtgctcttccagctttttttcgaacttatccgtaagggaaaaagcatccgccacagaaccggcaaaaccggtgagtacgcggtcgccgtatattttttttaccttcttggcgttgttcttcatgatggtggtttcacccatggtcacctgtccgtctccgccgatgcagatgtctccgttgggacgacgcactgcgcagatggtggtggcatgaaattcgattttacccattgttatatcctttctatacccctaaaattattcttctctgtagtcgcattcgctgttggaacacttgtaccgatattttttcgtggtgttttccatcagcagggaaccgcacttcgggcaggtccggtcgattggcttgttccagaataccacgtcgcagtccggataaccgctgcagccgtagaaaatccggcccttccgggaacgcttctgcacgatttcctttccgcatttcggacatttcacgccggttggaatcacgatggctttggtgttggtgcattccggataaccggtgcacgccaagaactgaccgaaacggccttccttaatcgccatcggttttccgcagagttcgcagacctcatcactgagcaccacttcctgctcgattcgctccacctccgcatcggcccggtccaattcctttcggaaattgccgtagaacccgtcgatggtgtttttccacggaagcttctgaagctccacggagtccaggttatcttccatctgggcggtgaactgggcgtccacgatatcggagaagtattctgacagaatttttgtgacatcaaaacccaactgggtcggcatcaaggatttcttctctttcttaatgtatcgccgagtccccagggtggtgatgatggtggcgtacgtgctcggccggccgatgttcagctcttccagggtttttaccaggctggcttccgtgaaccgcggcggcggcgtggtgaatttctgttccgtaatcacgtcctgcacctgcagctcctcgccttcttccagcgccggaatattcataccgttctcgccggaggatgccggatagattttcttccacccgtcaaacttcggcgtggaaccgctggccttcagctcgtacttgccatttttgattgccaccgaaacggtatcgcttaccgccggtgccatctgcgatgccacgaaccgctgccaaatcagccgatacagtttgtactgctccggcgtcagggattccttcagcatctccggatccagcgtcacatcggagggacgaatggcctcgtgggcatcctgaatgtccttgtttttcttgttggtgaactttccggaaccgatatattcttttcccatattggcttcgatgaactcgtggacctggcttctggcaccctccgccacacgaacggagtcggtacggatgtaggtgaccagaccgcgggagcccatgcctttgatgtccacgccctcatagagctgctgtgccacctgcatggtgcggcgagtcggaaagttcaatttaatggatgcatcctgctgtaatgtactggtggtaaaaggaggatacgggttggtcttcttgtccttccgggtcaccttttccacatggtacgggttttcctgcagttcgattttcacctttgcggcggcttcgccgtccggaatatgaatcttctttccgctgcgctttgccacctgcgccttgaagcctccgccaaaatccgcgaagatgttccaatactcttccgggatgaagttcagaatctccgtctcccggtcacagatgatcttcagggccgccgactgcactcggccggcggaaagtccccggcgcacctttttccagagcagcgggctgatctgatatcccaccagacgatccagcactcgccgggcctgctgggcatccaccaagcccatgttgatggctctcgggtgtttcagggcttcttttaccgcctccttgttgatttcattaaattcaattctgcattccgaggttggatcgataccgagaagatgggcgatatgccaggatattgcctccccttcccggtccgggtccgttgccagaaggacgcgcttcgcacttgcggcttccttcttcagctcccgaatggtcgggcccttgccccggatgttgatgtactccggctcgaaatgattgtccacatccaccgccagccggctcttcggcagatcccgaacatgacccacggacgcgatgactttataactggatcccagatatttcccgataatcttcgccttggatggagactccaccaccagcagagttcgggctctggatttggttgttttctttgttgtctttttggttgttttcttctttgcagctgttgccattcattatctcctcaaaaatattttacaacagtttatagcatacccccaagaaggctaatttgcaaggtgaatttttcctccgtggctgatgactatgcctttaatttcaagcacggttattatagcactgatttttccaatgtttttgttcattatatgtgcaatttcattcacatgaattccattattccgcttcacgatttccaatatcgccatctcgtcaccgcctaatgcaattttcttttcattctcttccggcagctccaggcccatatccaggagcacgtctttcaccaccaccaggggcaccgcgccgtctcgaatcagcagattcgtcccgatgctgaactggctgttgatgtttcccggcaccgcatacaccgtccgtccctgttcgccggcgaactgagcggtaatcagggatccgctggaggacccggcctccaccacgaccacgccttcgctgaggccgctgataattcggtttctcgccgggaaggagtattggtttccgctaaaatcattttcgtattcggaaataaccagtcctttttcggtgatttcttcctgcaggggtttgtttttcaccgggtaattccgatccaatccggtgcccagcacggcgatggtgctgcctcccgcttccagtaccccggtgtgggcaaaggtgtcgatgccgctggccaatccggacaccaccgccagctccgtcttcccgaaatacttcccgatcatcagcgcggtctgctttccgtacagggaatagcggcgagatcccaccaccgccacctttcggcattccagcaattccgggtttcctctgcaaaagagctttttcggcggattcggaatctgccgcagaagctccggatacaaccgggaatctcggtcaatttcaaaatctttttttatcatggtacgcctccttcaataaatatcctccggcgccgtccggtaacttagggcttccagaatatgctcgccgcaaatgcattccgactgctccacatccgcgatggtgcgggccaccttctgcacctttatccaggtgcgaggcgacagtttcaggttggtatacgcattctgaaggatttttcgaccctccgccgaaatctccagctgctgcacctcccggtcttccagcaggccgttgggctttccctgccccctcgccgccgcaaaatcaatcgcctgcatcaccattttccgcatctctttggaggaaaggttctcatcgggttttcgattcagctcatcgtagtgcaccttctccatctgaatcagcatatccatgcgctccagcatggggccgctgagccgctttcggtaattctcaatctctcccggcgagcaccggcactctcgctccggatctcccaggtacccgcagggacagggattcgttgccatgactaaccgaaaatcgctgggaaaccgatacgctctcccatggcgaaaatgggtgatttccccctcttcaagaggaatgcgcagggcctcgatgttttcccttttgaattcgcccacttcgtccagaaaaagcaccccgttgtgggccatggtgatttctcccggcaccgggtagcttccgccgcccagcagtccggccttgccgatggaatggtgaggacgccggaacggcggcatcgatatgatttcctgccccttctccagtttgcccgcaatggagtagattatggtggtttccaccatctgctgccgggtcaacggcgggaggatggaaggaatgcgccgggcaatcatggttttgccgcatccggggcttcccatcatcaggagtccgtggtggccggccaccgcaatcacggccgcccgcttggcattttcctggccgctgatatcgctgaaatccgtatattccgtttcccggattgccggccggacgccttcgccctgtgacggaatttttttaccctgaaccgcatccaggcattcctgaagatttcggaccgccaaaagctccggcccggcgctcccaccttccagcgctagctccgcttccgtcaaattctccgccggcagaacgacccgccgaatccccgctttttccattcccagaatcatgggcagcacgccttccacgcggcacacgtccccctgaagggatatctctccaataaaaccaatttcacgaagggcatcggcgtccgcgtatcccatggcgcccaaaattcccatggcaatggccagatccagatggctcccgttcttgcggatgcccgccggaatcaaattcacggtcacccgtcgccggggatactcgaaaccggagttcaggagtccggacttgatgcgctctcgggattccatcaccgtggtggatgccagccccacaatgttgatctgaggaagtcccggaccgatatccgtctccacttgcaccggaattccttcgatgccctcgcaaactgctgtatgtactacactgatcattttgttctccttttttatgcgctccgcgcgacttgagtgatttgagcgcgctgcaattcgggcgctccgcgcgatttgaatatttagagcgctctattatatgggcgctccgcgcgatttgagtgatttgaataatttgagtgattagaacgttccaattgtattatccgtcatatgcaatttgaaatctgattcacttcgatttctactacatcaaattggacccgtacgttctccaatcgattcatatgcatgtagtatcgggccgccgcctgcatccgccgctgcttcgtctcattcaccgcctctgccggatacccgaaatcgtcccccctccgggtcttcacctccacgaaatgaaagcaaaaatccttttccgcaataatatcaatctctccggagcggcatcggaagttggtttccaaaatctgaaacccatcttccgcatatactctttccgccatctgttctccaatatctcctagttttttactgccaatcatagttctcctcctgtcaatctgtcgcacgtcctgtcagtctgccggttgagtcgccgcatgtcccgtcggtcttccggttgagtcgccgctgcttggtccgtttgattcttgccgcctgttggttcttcctttgtaccatattccgggaaggggatgtgacgtttcgagcaaaaaggacttttcgcccgggaaaaagtaccaaaagggggcgtttgtaaaccgggtggccggccgggaggaaggcggcccggccgctagagttcgcgctcgaaatccgaattcattggctttcaagggaggcgagcgcgaaccagagaggcccctgaggccggggtcaggaggggccgaccggccttggtttgcgtacaaaaaccgaattcattggctttcagaggaggcgtacgcaaaccgagaggcccctgaggccggggtcaggaggggtttgccggccttggtttgcgtacgaaaaccgaattcattgactttcagaggaggcgtacgcaaaccgggaggcccctgaggccgggttcaggaggggccggccgggccttggtttgcgtacaaaaaccgaattcattggctttcagaggaggcgtacgcaaaccgagaggcccctgaggccgggggcaggaggggtttgccggccttggtttgcgtacgaaaaccgaatttattggctttcagaggaggcgtacgcaaaccgggaagcccctgaggccgggttcgagaggggccagccggccttggtttgcgtacgaaaaccgaattcattggctttcatgggaggcgagcgcgaaccgggaggcccctgaggccggattcaggagaagccggacggccggccgggaggaaggcggccgggccttcaaaaaacaaaaaactttgaatcggcggaccgaagcgtccgccgattcaaagttttttcattacatattacatcctatttataaggaaggaacttaccgtttctcccccagggcgaagcggcggatggtccgacccactccgtcctcgtcattgctttccgctacgtagtccgccgccgccttcacatcgtcccaggcgttgccaacggccacacccatgccggcatagcgaatcatgggaatatcatttcccgcatcaccgaagctcataatcccttcccggggaatttccagtttccgggacagaatctccagggcgtgggccttgctggaattgattccgccgatttcaatgttgtttttcacggacgacaccacattgcagtccggaagagattggattctcggacgcatttcttttaggcgatcatccccataaaaaaagaaattgatgttttccagaatttcccggttttcccgcatgaaaccgaagatatccggaatcggggtgcgggtggttatcacgtattccttatttcggtagacgctgccgtttacccgaatgtcctcgtaaagggcttcggaaatatagggcttcccgtgacagaaggcctccaccatcaggtgttctttcactgccagatcgatggcccggtccaccgtggtgggggtgatgtagctggaatagatgaattttccggtagtcagatcggtgatgtgggcgccgttggaggagatggcgtactgaagacccggaatcgccagaacttctttcggcagggcgtcgaaggctcggccggaggccaccactacctgaattcccgcctgtaccgctgcctccagggattttcggttgtaatcggaaaggcggttgtcgctgttcatcgtcgttccgtccagatccagtgcaactaaacgaatatccatatcgctttcttttctcctttcaatacggcttttgcattcgagggtaagagtcccggcgtccccatgcaaatgccgccgttcaaaaaacaggaaaaagaccaccgtgcaattacggtggcctttcgaacaatcagactattcctcgtcctgtgcttcctctgcttcatcgttgttcaatgcagctttgatgctcaggctgattctctttctgtcggaatcgatgtccatgatttttgcggtgatttcctgacccaggctcagctcgtcggaaacgttctcaactctcttgtttgcgatttccgaaatgtgaaccagtccgtccagacctgcttccagttcaacaaaagcaccatactctttgatctgtacaaccttaccggtgatgattccaccgatctggtatttcgtaccaacctgagaccatggttccggtgttgtctgcttcagacccagagaaatcttacccttctcttcgttgagggacagaatcttaacattgatgatgtctccgatgttcagaacttcctgagggttcttcagcttgccccaagaaatttcagaaatgtgcagcagaccatcaacgccaccgatgtcaacgaatgcaccgtaatcggtaaatctcataaccttaccttctacgatgtcgccaacattcaggtttgcccatacttcagcaacctgcttatgcttctcttcaactagtacagcttttctggagaataccgctctgttccgcttgttgtcaactctcagaaccttgatatcaacagtctggccgatgaaatcatcgacgttctcttctgtgacaaaggtgtcagcgagctgggacatcggtacaaatccggtaacttccttgtaaactgcaattacgccgccattaactttcttgctaagtttaacggagagcgtctccttgttctccatggcttcgttgagttctttgtaattctcattaatttccagtttcttcttggaaagaagaattccgccatcgttgtcgtccgtcttcatgactttggcctgaacggtgtctccctcctggaaaacgtccttcagagactgaccctcttccagggatacttcagccttcttcaggattccgtccttcttgcatccgatgttaacaatgacttcatcttctgttacctgatgcaccttaccttcaacaacatctcccggtcttggcagacgcaaagaattctcaatgtcatccatgaaatccagcattggattcttttctgtggtgtttgtgacattttcgctcatactagcaataacctccttaattatccattcaggtgtcgatgcacccgcggttacacctattttattatattttgcggcttgtttcaactgtaaatctgaaatatcttgtataagaattgaatttttacaattttctttcgcgatttcgaataatttccgtgagttggagctgtgccggtcgccgatgaccaccatcaattctacttttttggccaattcccgacaagcatcctgccgctccctcgtcgcactgcaaatggtgttgtacagctcgtattcgtaatttttgcccttaaaaacatccagaatctcttccaggatttccaccttaaaagtagtctgacatacaatcaccggtttccggcccgcctgaaacagttccgggtggttccgggtcagcgcctctgcgtcctctcggctctgcagaatgtgcccccggtaatcgcaccagccgttggtggcaatgacctcctggtgctccggattgcccacgatgatgatgcccttttcctcggcgtgcgctttgtggacgatatcatgaatttttgtcacaaaaacacaggtggagtccaccagggcaacccctttctcctccgccgtgcgatagaacgattccggttctccgtgggagcggatgatcaccacatccccctccgaggcctcctcgatgttctgaatcattcccacacccttctcttccaaggcgccggttaccgaccgattgtgaatcagcggtccgcaagtgtacaggggacgcttctcccccttttcatttttctcaatctgttccatggtcaaatcgatggctcgctgcacgccaaaacagaagcccgaccgatccgcgcggatgatttccatttccgatttcctcctacatccataatagattgattatatatgaaggaggctttttttgccaccgatttttgcaaatcggccgctgttcttccgccggttattcttccgattactcttccgccgagccttcgcagcgaatccgggcagcctgaatcaggtcccgcagtttctccgggtcattgctcttctgtaggaggtaccgcatttgttccagcagtcccttctcctccgggacgccgggattcaatattttttcaatcaaaatcagccatttccgcaggaacggctctcccttcacatcgggataaaacaacaaccgcacggttttccggccgatccggtggtccttccaatagatcaattccggctctaacatgtaccgctccgcgggaatcaagtgattttcgttctcctcatttatgtcgtacagaagctccagcagacagaatttctcggcagaaggtaggcgctgcgccatgcagcgccggtagccgttctgctcgtaggacaggtcgtagacgcccgcgttccgagaaaccaccatccgcaggaaggtccccgcataatcctgaatcaaaatctcaatcatgtactccggaatggaatggcctacaatccgccggctgagccgctcttccatagtgtcctcctttcttttccctacccgccgcacttactgcacggggtgtatttccgctccttcgccacatccttttcgatttcgatgcaccgccgttccagtacccggcatccgggcaggtgataccgagaaccgtattccggaaatacgtacacccgggttccggacgccgcctccttgctccggcagactcggcatcccgtatattttcttttgaccgattccgtcagtgccacggctttggtttccgatcggacgaaggtgcagtttttgttgtggtacttctccccatcctgagggaaaataaagacgccgtccgccagttcgttccgaaattccgcctccgtcatggctttgcagtttcgaacctgccccacataggcccgagtcatcagtgcggaatcgtaccgggattggctgaggattcccaggggattccgggttttcatgtccatctccaggttcagatagatcagctcgttcatgccgtttcggttcttgcgaaagccgtactccagaatccgatgggaatccaggatggggtgattgtcccgggttcgctcggccacctccagcggaatcaatggctgcccttcgccggctaccgcttcgatgctccccttccgaaattccgtggcggtgataaaagccgcatcctcgatgcaggaatagtacagaacgatagaggacagcacaatcatggcgatgagaagcacgggaagggtgattgccgcctccacgacatagcttccccgccggcaatctccccgccgacggccggtgaaaggattccgggatttccgtcgccccttaccgatattctctgctgtatgcatatttttttccgttaacatgaatcgcaaaactcacccctccgtaatattccgccagattaaaatcccggtaataccgatatttcatgttaatctgcaccaggtccatgaggcggcgcagccgggtttcctccggcagtaccagaatcataatcatcaggtactcttcgtaatccagcccttcttccaccacttttccggcagacttcccggccgcctccgacacctcacctcctttctccttcagcagcttccgggaatcctcgtctaattttttttgcacctcctcgtccttcagaattccctcgatgcccgtgttccaggtggccgcggttttcatcaccggcacccgcctgcccgccagcagattttccacgtccttctccgactccaacgccgcccaggcttccatgagaatgccctgagtcaccacccccatggggcccggcgagatgatttccgcaatcgccgtcaccacttccaccttctccggatccttgtacagataggccagattcagcccgttccgaatcaggaaaaggcgccgccggcagcttttcaggt

SEQ ID NO: 3562 - DNA, 24225 bp, Unknown
  16S sequences of unknown bacteria
atatatctattctaccatagaaggctctttttttcaattgtccgttttttacggatttgtgcataaatgacactttgtcgcgcttatatcaattcttgagactgaatattgttaaaaaagcaaaaaatcggcggattttccgctgattttttgcttaatctttattatttgtttttataataatctttatcgtcacacagacgctttctgtattcacggtgcatgaatatccatgttacaagcgcaccgacaacggcgccgccgagacaatatgctatccacatataatcattttttgctgctacctgtacgccgttattaggcgaagcggaatcagaaacctccgcggctctcatttttgtccaaagttcgtccattttctgattggcttcggttgaaagagcgttaaacgttctgccgtttttgagaacttcttcggaaggatatacgacggggctgttagcccattcctcatcaagatattcttttgcgccgtcaacgggagttgcataccctatcgcatcggcatttctgcctgcaatttcggggtcgcacataaagtttataaactcttcggcttccgttttgttctttgcgcctttcggaatgcacatcgcatcgacaaagtagttgaagccctcatcgggaaaacagaacgcaagatcgggatttgtttcgctcatcgtcatatagtcgcctgcataatacggcgctatccacgcttcgccgctctccaaaaggtcaaatatctgatccattacataactttgcagaacgggtttctgttcgagaagaagtttgtagcactcttcaaattccgcaggctcttcggtgttcagatcgtaaccgagacggagttcggcaataccgaatgcatcacgcgcattatcaaacatcagcgtgtaacccgcataatcgggatcccacaaagactcccaacttgtgatttcttttgtcacatacttggtgttgtagattatgccgaccgtaccgaacgtgtacggaacggaatattcgttgttcgagtcataatcaaggtttttgtaagcgtcgggaatattcgcataattcggaacgttgtcgaagtttatcttttcgagcatatcgtttgcgataagacgtcctatcatatagtcggacggaattataacgtcatagttcgagccgcccatttcgagttttgtccaaagcgtctcattgctgtcgtacgttatgtaattgacttttatgcctgtctttgcttcaaattcggctataacatcaatggtgtcatcttcacccgttccgatatactgtccccagttataaacggtaacggttctctgtgcagcgggagtcacaaccgaaaagattgcgataagcgtacacagaacaaaaaagaatgaaacgatttttttcaatttcttatgtcctcccgtataatgccgccttctttttatcgcggcgaatatctgcaatattcataaccaaaagcagaataagaattatcaagaacatcagcgtaaacaacgcgtatatcgtcggcgacatcggctttttcgtgtagttgtatatttccacggggagcgtcgtaaacgtcgaacccgatacgaaataactgataacaaagtcgtcaagcgacagcgtaaacgccataacaaaacccgaaacaacaccgggcattatctccggaagtgttatctttcgaaaagcctgcgcgggcgtacaaccgaggtcgagagccgcgtctatcatggttctgtccatgctgcgaagtttgggcatgacggaaagaataacatacggcagattgaacgtaacgtgtgcgataaacagcgttccgaagccgagaacgtcatctattttgagccacgttccgataaatacgaaaagcagcgcaagcgaaacgcccgttacgatttcggggttcgacatcgggatatttgttacggacataacaagattgcgcgtgcgttttttcatcttgcttatgccgagcgccgcagtcgtgccgagcaaagtggcgacgacgcttgaagcaacggcaaggataagggtgttcagcaaaagtcccatcaggttggagtttgtaaacagttccttataccattgaaaagtaaatccgtcaatcataacggtgcttttcgatgtgttgaacgaaagagcgacaagcacaaatatcggtgcataaagcaggataaaaataatagcggtaaatatttttccgaaaactttcacagcactatctcctccccatcatcaccggagaatttgcgcattattgccatacatacgaagataagaacaagaagtccgagagccattgcggcacccatatacgggttgtacgcctgtttgaactgctgttcgataatatctcctatcatgacgtcggaaatcccgccgagtttttttgagatatagaacgtgctgaccgcgggaacgaaaaccatcgtcacacccgatataactccgggaacggacagcgggaacaccactctgcgaaaacgctgaaatctgtttgcgccgaggtcttccgccgcttcgagaatgtttttgtccattttcgaaagcgaattgtaaaggggcattatcatatacggaagataaatgtataccattccgacgataacggcgggggtgtttcttataagcgaaagtttttcaagtcctatcatgtcgataaaactgtttatcaaaccgttgttcgacatcagcgaaacaagcgctatcgttcgaagcaggaaactcataaacatcggaagcataacgagcatgaccaatattttttgagttctctcccccgctttcgatatgaaatacgccgtgggatagcctatcagcaaactgataaacgccgccaaagcccccatccatatcgaagaaagaaaagtcgggatatattctttgagatttacgatatttgaaaacgtaaactcaccgttcgcattggtaaaagcgtaaaatacaacgattatcagaggcgcaacgataaagagaaacatccatattatataaggaagagcgacaagtttgtttttcatcacaaatcctccgccgcctgctcacgttcaagttcctccgcggcttcttcctcatcgacaatctcgctgagttcgtcatattcttcactgtacgaactgtaatcgccgaacgagcccgaatactcggattttttcataacatgaataagatcgggagcaagttcaattcctatattttcgccgacgccgtgaaattcggtcgtctgtataagccatttgaaattctttatatctacgattatttcgtaatgaacgcccttgaaaacaacatttgtgaccgtgcccgaaaggtggctttggtcggaagcaacgacctttatatcctcgggacggataacaacgtcaacgggttcgtttttggcaaagcccttgtcggagcaggtatatttgtgtcccgcaacaagaacgctgtaatcttcaagcataacgccgtcaagaatattgctttcgccgatgaagtccgcaacaaatgcgttggcgggttcgttgtaaatatcaagcggcgtgcctatttgctgaataacgccctcgtccataacaacgaccgtatcggacatcgaaagtgcttcttcctggtcgtgcgtaacataaacgaacgtgatgttcgactgtttctgaatacgcttcaattcgttctgcatatctttgcgcagtttcaggtcaagtgccgcaagaggttcgtcaagaagaagcacacgcggattgttcacaagcgcgcgggcaatcgcaactctctgctgctgaccgccggaaagatttccgacttttctggaagcatagcctttgagattcacgagttcgagcatatcgaagacttttttgcgaatctcagcatcgggcatttttttcaaacgaagtccgaacgcgatattctcaaacacgttcaggtgcggaaagagggcgtatcgctgaaaaaccgtgttcacctgccgcttatacggaggtatatcgttgatacgttttccgtcgaagtacaaatttccgctgtcaggttcaataaagcccgcaataattctcagggttgtggtctttccgcaaccgctgggtccgagcaaggtcacaaattctttgtctttgatcgaaagactcaaattatcaaggaccttttccccatcaaaagcaaccgaaacattttcaagttgaatgatgttttcagacatccttttatctcccttcaagataaaaaaaattattgtatcgcgaaggggtctccgaaatacaataatataatagcacaaaaaatctaattgtcaagggatttttatgtaaaattcgactttaatcgcaaaatttaaatcgtggctttgatttttctccgaaacactctgtttttctccgaattactctgtattttgcggtcaattatgcaatcatacaaaattttcacttcaagaaagacagtttttgtacaatttcccattcatcgaaaaaagccgctgttttcaacgtttttccgcgcagatatgagagacttcccgcatcggtcggaaaatcaaaagtcaactcgaaggaactgagcgcctgatatttgaaaggaaagcctttatttgccgccgcagtgccgtatttggtgtccccgagaagaggatgaccgagaaacgccatgtgcgcccttatctgatgagtccgtcccgtcaacagccccacgcgaagcaagctgatattaccgtcggtcgcaacaacctcatacgaggttgaaatattcttgaaaccatcggcatttttcggaagagttccgacaacggtaacggtatttgtttccgagttctttttcaaaaaagcgtgtacgaccgctttttcgggttcgggcttaccgaaaacaaggcacttgtaaaacttggatatttctcttttctttatcttatcgttcattatgcgaagagattccgcatttttggcggcaatcacaagcccctgcgtgtttttgtctatgcggttgcaaagcgcgggaacaaacgaattttccttttcgggcgaatactccctttttccgataagatatgcgataatatgattcgaaagagtgttaaaattctcttccgcatcgggctggcatatcaagcctgcgggtttatcgactacgagaatgttctcgtcctcgtaaacgactttaaacgatactcttatttttgaataatcgactttgtccctgccgttttcaaagtattcgtcgcttataaaaaaccgcagttcatcgccctcacgcaaaacggtctgcgccgcggcatgaacgccgttaacgcgaacgcatttcttgcgaaggtatttgtatatcatagactgcggcattgacggaaaggctttcgacatatacttgtcaagtctttgtccgccgtcgtttttgccgagaataaccgtcctcatcgcgttatgcgtgaataagcgccgcgccgattatacccgcgtcattgccgagttttgcgatttcgatatgctgttcggggttaagacttccgccgtatgcgtacttatttataaagttcttgatgggaacaagcagcgtgtcgccctctttgcagattccgccgccgatgataagcgtttcggggcggaaaacattgacgatatcgacaagtccctccgcaatatattctatgtatctgtcgcaaacatcttttgcagcagcatcgcccgcgcgcattgcatcaaacgcggttctgccgtttacttcatccatgggcgtttcattcatttttgattcggggtgcgctttcatagcttctttcgtctgacggataagagccgtaacggaagcatacgcttcccagcaaccgtttctgccgcaggaacaatgttcgccgtctttgacaatgcagacgtgtcccatttccgcacctgcggaattttgtccctcataaattttgccgtcgatgataataccgccgccgacacccgttccgagggttatcataaccgcgttcttcacgccttttgccgcaccggatattgtttctccgagcgccgccacattggcgtcgttgccgagatatacgggcttgtttatatgctgctgcataagtttgcgaagaggtacgtccgtgccgtttttgaagttgttggcatagacaagtctgccgttttccgtatcaagatttccggggcagcctatacctatcgaaacgatgtcgttttccgtcattccctgttccgcaagcaaatcaagtatgcaatttgccatatccgcaacaatttcgtcaaacgggcggtcagccagcgttttaacggacttttttgcaagaatttttccctctttgtcaactatgccgacggctatgttcgtgccgccgagatcgacgcctatataatacatttcagatactcccttttcggattgaattatacggtcattttatcataattgtataaaaatgtcaagggacttgaaatcccgacacgactgtgttataattgtttcaaaggagttcgttacaatggcaaaaacaaagacagtttacatttgttccgagtgcggagccgaatccgcaaaatggtcgggacaatgccagaattgcggcgcatggaacactttgacggaagaaatatccgctcccgtcgaggtctcgaaaaaaatcgagcagaaagcaaaagcacccgcaaagagcctgaaattatcgcaaataggaaaagaaagcgaacaaagaaccgacacgggaatttcggaattgaacagagttctcggcggcggcatagtcaaaggttctgtcgttctcgtcagcggtgaacccggtataggaaaatcgacgatacttttgcagatgtgtgcaaatctcgacatggatattttgtatgttgcaggcgaagaatcacccgggcagataaaacttcgtgcaagccgtctgggtgtgacaacggacagactttccatactttccgaaacggatatcggtactgtttgttcgacggttcttgccgaaaaaccggggattgtcatcgtcgattccattcaaacgatgtcccgagacgatatgcagtcctcgccaggttccgtcccgcaggtgcgcgaatgcacaaatctgcttatgcacctcgcaaaggacagcgatattcccgttttcatagtcggacacgtcaataaagagggttctatcgcaggaccgaaagttatggaacacatggttgacgcagttctctatttcgagggagaaagaacgcttgactgccgcattctgcgcgcgataaaaaacagatacggttcgacaaacgaagtcggcgtttttgaaatgacaaacgaggggctgacggaagtcagaaacccgtccacgatattcttacagggcaagcccacaaatgtttcgggcatagccaccacctgcgttctcgaaggctcacgcccgatatgcgcggaggttcaggcgcttgttgcgccgacaccgttcccgtctccgagacgtgtcgcaacaggttttgattacagccgccttaatctgctgattgccgtgcttgaaaaacgctgcggaatgtttttcggaacaagcgacgtttactgcaacgttatcggaggtttgaagcttgacgaacccgccgcagatcttgcggttgcctgcgccgttgcttccgcgctgaaagattttattattcccgacgatacggcgcttatcggagagataggacttgcgggagaaatcagagcggtctcgggtatagagaaacgcatatccgaagcggaaaaactcggtttcaaaagatgtatcgttcccgcaagaaacaaactttcgcatataaaaacaaacgcagaacttatacctgtgtactcgataaaagacactttcaacaaaatataggagatgctgaaaaatgacacttaataccacagtttcgattgaagagtttgaaaagcgtttttccgaaaaagtcggcaaaaaagcgactgaaacaaattctttctacggcaagataggcgacggatttttcacgctcaaaaacgccgacagaagcgattccgtgttaaaaggaacgtacgccgccgacgaaaacggaaattgcagactggaataccgtcacacaaaaccaaactcggacaaagttttttggttcatctatatggctttgacgggctttttcacgcttgcattgctcaaagattacccgctttacagccttattgctttcatactgctcgttttcggcgcggtatgcttcatgattcgtccgcgcagattcgaaaaactcatggcacaggcgctcgccgatatttcaaaaggagaaacgcccgttatgcccgcaccgaacaaggctgatacaaaagatgataaaaaagaagtaacagaagactccgacggggcaaaaacatcggaagcggaacatacggaagactgaatataaaacataaaaatcctgcggaaaacgtttcccgcaggatttttttgtatgtattctacttaaagtttttcaatcacataatccgcaaattctttgcaggtagcgccgctgcggtcgcccgtaacgacaacgcgtttttccgtttcattgcaaacagtaagcgcatcggcaagacgcttagccttttcggaaagtccgcaatgcgaaagcatcatttccgccgccttgaaaatcgaggacgggttcgcataatcgcctataccctcttcaatcattctcggagcagagccgtgaatggcttcgaacatcgaatatctgtcgcccatatttgcgctgcccgcagtgcctacgccgccctgtatctgtgccgcttcatcggtgatgatatcgccgtaaaggttgggaagcacaaagactttgaacttcgaacgaatgctttcattgacgagatttgccgccatgatgtcaatgtaccaatcctctgtctctatttcgggatagtccgccgcaacctcatggcagattcgggagaaattaccgtcggtctttttcatgatgtttgcctttgtgactatcgcaacattgttcttaccctctctgagggcaaattcaaaagccgcacgcgctattctgcgtgttccgaggtcggttgtgaccttgaaatccatcgcaagtttgccgggaatttcaataccgctgctgccgagaacatattcaccctctgtgttttcacggtagaaagtccaatcaatacccttttcaggaactgaaacgggacgcacgtttgcataaaggtcaagttcgcggcgaagcgttacgttggcactttccatcgtaccgcctttcggggtcgttgtgggacctttcagaagaacgtcgcattttttgatctccgcaagcgtttcttctggaacggactggccgagcgcaagtctgttttctattgtaagaccgcctatttcacggatttcgacacgacccgtcgctatctcgtctttaagaagaatatcaagaacgcgctttgcctgttcaacgattatcggacctatgccgtcgccgccgataactccgataactatcttttcttttttggaaaggtcagccgcttgtgcgcccttttccatatcttcaactcttgcaagttgcttgcgcaaaagagcctcgtaatgttcaaccgccgcttttatctgattttcaatcattttccctgctcctttgtgtatgcaagcagaccgcccgctttgagaatgtctttctgtctttctgtgaacgaacaggacagttcaaaactctcgcccgtcgtttcgtctttcatcatgataacgcctttatccatgcccgaatgaacgtcggagaatgtgagcgtgtcattcattttcagtttgtcgtaatcttcggggttcttgaatgtaagcgggagaattccgacgtttatcaggtttgcaacatggattctcgcaaaactctttgccacaacagcgcgaacgccgagataaagcggaacaagcgctgcgtgttcacgacttgaaccctgaccgtagtttgaaccgccgacgataacggaacgtcccgcggcttttgctctctcggggaacgtttcgtcgcataccgcaaagcagaactgcgaaaggtgcggaatattggaacggtaaggcagaatctttgcgcccgcgggcattatgtggtcggtggtgatgttatctccgactttgagtaggagcggggctgtaagagtgttttcctgcgggaacgtatcgggaaatttctttatattcggaccgcgaagcacttcaagtgtttttgcggtttcttcatctgctggaggaatcacggcggaatcgtctattctgaacgcagcaggcatctttatttcgggcatttttccgagaagacgcgggtccgttatctcccctgtcagagccgccgcaactgcggtttcgggcgaaacgagataaacttttccgtctttggtgccgcttctgccctcaaagtttctgttgaacgttctcaggctgacgcccgcgctgttcggagaaaatcccatacctatgcacggaccgcaagcacattcgagaagtcttgcacccgcagagataatatccgtcaatgcgccgcaatcggcaagcatcgcaagcacctgttttgaaccgggagaaatggaaaggctgactgtcgggtcgataaccttgcctttcagaagtgccgcaactttaagcatatcgagaagcgacgaatttgtgcatgagccgatacatacctgatcgacttttgttcctttaaggctctcgacagttacaacgttgtcaggtgaatgcggacaggcaataagcggtttaagcgtcgaaaggtctatttttataacagcgtcgtattcagcgtcggggtcggatgcaagcggcttccaatcctcgcctcttccctccgcttcaaggaacgctttcgtaatttcgtcggacgggaatatcgacgttgttgcgccgagttccgtgcccatattcgttatcgttgctctttcgggaacggacagcgtttttattccctcgccgccccattcgataatggcgcccacgccgcctttaactgaaagaatacgcaagatttcaaggctcacgtcttttgcagtaacaaaatcccgcaatttgcccgtaagttccactttatacattttgggcatcgttatgtaatatgcaccgccgcccattgcgaccgcaacgtcaagtccgcccgcaccgaaagcaagcatacctatgccgccgcccgtcggagtgtggctgtcggagccgataagcgttttgccgggtttgccgaaccgttcaagatggacttgatggcaaattccgttacccggtcttgaaaaataaagtccgtgtttttttgcaacggattgaatatacctgtggtcgtcggcattttcaaaacccgattgcagagtgttgtggtcgatatatgcaacagacttctcggttctcactctgggaatacccatggactcaaattcgagatatgccatggttcccgttgcgtcctgcgtcagggtctgatctatacggagagcaacctcgctaccgactgtcatatctccggatacaaggtgatctttaattatcttctgcgctatcgtcaatcccattttatttattctcctctttgaacaaacgatctcttgcgttttctatatgttttaatgccgccttttccgccgcttcggggtcgcccgccgcaatcgcttcgaaaatggctttgtgttcttcaaacgactgttccgcgttatccgtcctcgcaacggaagcttttctgtattttacgccttttttatgaagaggttcaagcgtgtaatacagattctgacttttggaacaaagatacatttcggcatgaaaatccgtatcgaagtttttaatattgtccgcgtcgtgcttttgcgtataaaactcctgaagttcaagaattttacgaagtttctcaacgtcttcttccgttcggttctgcgccgccttatatgccgcaaagccttcaagccgcatacgaatgtcgtacatatcgcgcatatcatccttatttatacctacaacgcttgcgccgcgtgtcgtttcaattattatatgctcctgcgcaaggcggcgaagcgcttcgcggatgggcgttctgctgacgccgagtttttcggaaagtttcgcttccgtcaaaatctcgccgcgttcatactctcctgcaagaatgtcgcgttcaagttgctcgaaaatctgatccgcaatggaaaccgttttgtgttcggtcatcatttctgttcttcctcctcgctgaattctttgaatttcgcttcaagttccttgttggaaagcgttgtggatctgccgtcttcatattctttgtcaacccactctttcatcttctgaacaacggggtcgtgcttatccacttttttgtcgtcgggcagtctgtaatgcgaatttatccaatatgcgatacccgcaagtcccgacgtcttcgaaacaacaacagccgcaggacggttcagtatttttcccgtatcgaaaatattgtagatctcttcgtctttaagtattccgtcggcgtgaatgcctgcacgggtaacgttgaagttttctccgacaaacggcgtcatcggcggaattttgtagccgatatccttttcgaaaaattccgcaatctcggttataacggaagtgtccattccgtcaagcgaaccgcggagggatgcatattccataaccatcgcttcaagcggaatattgcccgttctttcgcctataccgagcaacgagcagttgacggcacacgccccgtaaagccatgcggtggaagcattcgcaacagccttataaaagtcgttgtgaccgtgccattcaagcatatctgatttaacgtccgaataatgttgaagaccgtaaactataccgggaaccgaacgcgggagcgcaacctcgggatacggtacaccgtaacccatagtatcgcaggcacggattcgaacgggtatgcccgcatcgcggctcatcttcatcaattcgttaacaaacggaacaacaaagccgtaaaagtcggcacgggttatgtcttcaaggtgacaacgcggcataacgcccgcttcaaaagcctccgcaactgtcgcaaggtaataatccatgcactgtttgcgcgtcatcttcatttttttgaatatatgataatcggagcaacttacaagtattcccgtttcgcgtatgcccatatcgcggacaagtttgaagtcgtttttcgtcgcccttatccaagttgtgatttcggggaagcgcagaccgagttccatacatttttcaacggcttccctatcctttttgctgtatatgaaaaactctgtctgacggattattccgtaaggaccgccgagttttgacatcaacttgtaaagttgaactatctggtctaccgtataaggctcgaccgactgctgtccgtcacgcagagatgtgtcggttatccatatttcctcaggcatacccataggcacacggcggtggttgaacgctatcttcggcacagcctcataaggatagatgtctctgtaaaggttcgggtcgggaatatcttgaagagaatatttgtaactcttctgttcgagcaggtttgtttttcccgaaatttcaagcattgtattatcctcccttttgaatgcggacatagcgaaatcgcagaactcgcacattcaagtatttctgtatacaattatactcccattctgttccattgtcaagcatatatatgtaataaaatgcaacataaacgatatttcccatatttttccgcttttcttcaatttttcattattacagacctcttgatatccgataaactcccgtatttgtacagaatacaagcataagcaaaaactaacggcaccaatctcggcgccgttttactgtatatcaaattttttttgaaatcagttttcttcgtctttttcggtcggatttttccgtgcattcactcttgcgacaattaccgtcaggtcatcgccgtccgcaagtccagaattgactgcggtatctataagagcggcggcaaagccgagcgggtcgcttttttctgaaacgcatttgcgcaggatattcatacaaaaatcttcactgtcaccgaaaaagccgtccgaaaccataacgaggatatctccgtcaaaaagtgtacaggtcgaagaaaaagaatctggtgtttcgtctgcgccgagaggcaatgaacgccgtccgacacagtaaacgtttcctccgcgacagataaaggtcgggcttgcgtcggctttgagcatttcacattgagcggagtccaaatcgactatcgacatgtcaaaagaaagaacggaatcttcttttccgttatacagcgcggtgtttaccatatccataatatcggtttttggcacacctcggcttatcattgtccgaacggttgccgaaacacgtttgctctgctctgcggcaggttttcccgtgcccataccgtcaacgatacaaagcgcatatttattttttccgcaatcaaaaccgcagtttgtgtcaccgcattcggtctgcccgtccttactgcgacaaactcggacgacatcgagaaatatcccgtttgaaataacttgtccgtctgtgcggaaatttcgaagaaacaggtcgatattggggcaaactctttcgagcgcgctttccgttaagacttccggaacgtcgcagtttgcgcgcagcattccgagagaacgcaccgtgtcgtcataattttttacccaacaaagtattctttttttgcattttgagcagactcgttccacgatctcatcgtcggcaccgtttcggatgcgttttccgagagctgtttcggcggtatattttttcggtttaaaaataagtttttgttttccgtcggagcgttttggcagaagcaagagggcgaatctgtcttcgactttttgaggaataagccaagagatgacacccgcagaacctattgagataagggttcggataaggtcgtgtcccccgccgccgtatatgtaaacaagaacatttgcaagcgcaaagccgagaataacggcaaaatcgctgacggagcgaagaatacagcccgcaagagtgcccacaacgatcacacccgcaagccaaaggtcttccggcttttgcagacaaaaaacaagggcaaccgtcatggcggcggtggaagcaagaaaaattccgccgcgacgaagaatacggcaaagcagagccacggtcaaaattataacggcataatatgcggcatttccgagacggagcattccgacgcagaacaccgaaaatgaaagaactgcgctgaaaaaacgaagatttgctccgaccgtcggtttgcccgacacggtttcaaaagcataacatacataatacgaaacaacgctgccgagaagtccgccgagaacaaaaaaagtgttttctctgacatcgtgactgcctgtgaaaagcccgaaaacgcctgaaactatcatcgcccacagcgagcacataacgcattgcacgccgctttttacggacaaaacgggtttcagaagttttcttgcaacaaaagcgacgcaaacggcaataatgcttcttgtaacgtcacaacccgcaaaaatatgtccgacaatgcagccgataagagtaaaaatatcaccgctgacggcggcggcgacaccgaacggagcaaaagaacccgatacgacggcattcgaaaagacaaaaccgactataaaacgcaaaacggatcttgcaagaaacgacggcaaggtcttgaccgaaaatgggagcctgtcccttattcctgttttcatataaaacacatccttccgaaaagcattatacttttttcggagcgaaaagaatgttgaagcgtaagagacgaaaaataaagaaagcgacgcaataggtttttatctgcccgtattcagccgaatgcgcaaacaaacgtcaaaaaaacgagccgcggggaggagcgtcccgcgacccgaaaatcaaatattgtttacattattgtctgcaaccgcagttgcgggtcatatttttccgttccgcttcttcgcgaattgcggcaacgcctgcgggagtcgagcattcacacccctcgcccacgtccgttattctcgacgggaaaaattcatcaacggggaaatccattctgtaaaacagactgcacgggtcttcttcgctcgggccctgacattctttttcggggatgcagaaatcgtaagacggaacgagtatctgaacttctctcatcaggcggacaatggagaaaagtccgagcgaaacgtaaaccctgttgcccgaagtgttgtcgcaaagacattcttcaaaacaccgacaaatgcaggcgggaacggcggaaagatccgtatcgccgcagccgcagcgcgtgcagctgtcaacaagtttagcggcaagcgcgatgggttcgacaagttcgacggtcgctttcggcgcatttgtttttgagccgaggtcggtgtcgggcgcggacggaacatacgaggaagagtatgttttgacgttgccttcgctgccgtaaagaataacctttttgtcaaaggtggaaagaccgtatactctctgcggtcttccgacgtttgcgaaaacgtcaagtcctatgcggaagaatattttgatatcaacggtataaaaccctctgttgaaaggcagcgcctcaacatcgatgtacgtccagagaacttccgcggtcatcgcttttacattgacagcgcgatcgattatctgctggtttgcgtcggaaacataaacgcgggcatcggttatgcagtctctgtccttgcaacagtcatataccctgtcaacgtttatgcaaacactttcgcgcagatcccgtcttgcgcaggcggcatttttttcagccataaattcaacctccaaaaattcgtttgacataaaaatttatgttcagtatcattgtatgtcgaagagagaaaaatgtgttaaataaatgtaaaatcagggtttttctattgacaaaacggattttgtatggtatcatatccgctgtaaaggtaaaaacatttacagagaaagcggaaatacgatgtcggatattgatatttcttctgaaaaagaacgtttccgtataatgcttatgcttgaccgttacggttcgctgttgacggaaaaacagagagatacgctggaactctattttcaggacgatctctcgctttcggaaatttccgaattaaagaacatttcacgacagggcgttcgagaaaacctatggcaaggcattcggacacttgttgattatgaggaaaaactcggaatcgtagagaaaacggagcggctcaaagagcggcttgaaaaatttattgaagaagaaaacctttccgatgccgcaaaaagcaggctcggagaaatagcaaatcaaccgttataagcggaggaataaaatggcatttgacagcctttccgaaaaactcggaaatatattcaaaaatctgcgctcaaaaggaaaattgaccgaagacgacgtaaaaaaggttatgcgtgagataaaactcgcattgctcgccgccgacgtcaactacatggtcgtcaaggacttcatcgcggcggtcagcgaaaaagcgacgggaacggaagttctcgaaagtcttacccccgcgcagcaggtcattaaaatagtaaatgcggaactgaccgagttcatgggctcgaaaaacgacaaagtgaagtttgcgtcaaaaggtccgacggtcgttatgctctgcggtcttcaaggcgcgggcaaaaccacgcattgcgcaaaacttgcgctttacttcaaaaatctcggcaaacgtccccttctcgttgcctgcgacatttacagacccgcggcgatattgcagttgcaggttctcggtgaaaaactcgggattcccgtttttactcaacctgagggtacaaatcccgttgatatagcaaaaagagcggtcgctcatgcaaaagatcacggcaatgatattgttttcctcgacacggcgggacgtcttcacatagacgaagttcttatggacgagttgaagaacatcaaagccgcagtcgaaccgaacgagatattgctgacggttgacgcaatgacgggtcaggatgccgtaacggtggcaaaaagttttgacgaagcgcttgacataacgggcgtcattcttacaaagaccgacggtgacacccgcggcggtgcggcactttccgtaaaacacgtcacgggcaaacccataaaatttatgggaacgggagaaaaagcgggagacctcgaacctttccaccccgaccgaatggcgtcgcgtatattgggcatgggagatatgctttcccttatcgaaaaagccgaacaggcctttgacgagaaaaaggcggaagaactccaagaaaagatgctcaaaaacaaatttgacctgaacgattatctcgaaaatatgcagcaggtcaaaaatatgggtcccatcgacaaattgctcggaatgataccgggcgtcgatcaatcgaaactcaaagacgttgacatcgacgaaaaacagatagcgcacgttgaagcgataatctattcgatgacaatgaaagagagaacacgtcccgaaattcttaacgcttcaagaaagcgcagaatagcggcgggaagcggacgttcggttgaagaaataaacaaacttctcaaaggctttgatcaggcaaaagagatgatgaagcgtttcggaggaaaaattccgatgatgcgcaaaaagaaaaagaagagaaaataaagatatctgccgcaagacggatgatatataaatatgaagacgaaacacttagagaggagtgaacaataatggtaaaaatcagacttcgcagaatgggtgctcacaagaatccgtactaccgtatagttgtagcggactcccgttatcccagagacggaagattcatcgaggagatcggaacttacgatcccatgaccaagccttcgacagttgtcatcgacgcagacaaggcttccgagtggcttaaaaaaggcgctcaaccgaccgacaccgtaaaggccattctcaaaaagaataacattctttaatcggaaaggattttcggcggaatggaagaacttattctttacatcgtgaaaaatatcgtgtccaagcccgatgaagtgaccgttgaagacggcggaacacgcgagggcgcgaccgtttataacctgaaagttgcggacgaggacaaaggcttcgttatcggcagacagggacgtgtcgcaaaggcgctaagagccatcgtcaaggcagcagccgcgaaagagggacagcgcataaacatcgatattatctgacaggaacaaaagcaacaaagcaccgtttccgaaacagatcaaaaaaacacgaaaaacagagggcgcacggcgggcttttatcttgaaaagataaaccgcggtgcgcttttttcaaaggagacaatatggaacttattcagacgggcaaaatagtcaacacccacggcatacacggggagttgaaagttatctcctgggcgagaagccccgaagatatgctcggaatagagactttttatatagacgaaaaaccgtatgaggttgaaaagacgcgaatccacaagggttccgtactgctcaaactctgcgagacaacaaatatggacgaggcaacagcgctgaaaaataaaattctttacgccgacaaagaggatttcgaactcgaagagacggaattttttatagaagaccttatcgggcttcaagttatcgacgcggacacgaaccaagattacggaaaaataaaagacgtgctgatgacgggagcaaacgacgtttacgaagtcgtagacggcgagggaaagacaagacttgttcccgcaataaaggattgcatagttagcacggacataaaaacaaaaacgatgaaaattcgcccgcttccgggattgtttgatatataatatgacatttaacataatgactatcttccctgccgaggtcgatgcgtttttgagttcaagcatcataggcagagcaagaaaaaaaggcgttatagaagtcaactgcttcgatatacgggattatacgcttgacaaacacaacagagttgacgactacgcatacggcggcggtcagggtatgcttatgcaggcagagccgatatgcaggtgttttgacgctataaaagaaaaatatccgacgacgcacacggtatatatgtcgccgaaaggcaaaaaactgacgcagacgctggcaaaaaggcttctcaaatatgattctctgactattctgtgcggacattacgagggcgttgaccaaagagcgatagaccttatcgcggacgaggaaatttccgtcggagactatgttttaacaggcggggaattgcccgcaatgatattgacggacaccgttgcacgcatggtcaaaggagttttgtcggacgatgtttgttttgaagacgaatccatatacggaggacttctcgaatatccgcagtacacaagaccgcccgtttacagagggctcgaagttcccgaagtccttatgagcggaaacaccgcaaaaatcgaagattggaaactgaaacagtcgttaaatataacgcgggaacaaagaaaagacctttactcgaaatatatcggaaagaagacccgaacgatgaaatatctaaataaaagtatgtcggaaaagatgctcggaaaagtttacgggcttatgcaaaagtcgtttccgagagatgaaataagaactttcgcagaccaaaaaagattgttttctctcccctgctttgacatggcggttttggagaactttacggatattatcggatttatcagcgtttgggatcttgacgggttcaactatgtggaacatcttgccgtagcgcaaaagcacagagggctcggttacggaagcaagataataaaagactatatgaaagaacacccggcggaaagatatgtgcttgaagttgaacctccgcgagacgaaatttcaaaaaaacgagtggctttttacgaaagactcggattcacgttcaatgatttcgaatatatccaacctgcgctttcaggcaaagaagtcgaacttcgcataatggcgacgggcggcgcgctttccgaagaagagtttgaaaacataaaaaagatgctttacggcatcgtatacaaaaaagccgtcgattgacggcttttttcaacttaaaacaaaacaatttctgaacgattttacgtttttcggtgaaacagatgttgactttgtatattttatgatatataatagttttataaaatatcattggaggttgggcaatgaaaaaaagatttttattcatgcttcttgtcacggttctcgcggtgtcgttgattgccggttttgcactttccgcaagcgccacccccgcgtcatatccgtttcaaagcaccgtgccgattacgggacacggctggacaggatggcaaaatgtgttgaattccataccaagcacttcggattatgattcgatgcgtgcggacggaacaccttatgccgtactgaaagcaacgcttgacagcgccaaatcgacatatggcgaaatagcggacggagcatctccgaactatgactccgtaacaacatctacgggacaaacattgaccgcttatgcggattccgtattcggcagggctttctatatgtttgacggcggaaagcaacttgcatacgaattgtggaacatcacggtcgattcttccgtaaaactcatcaggacaaaagcaaactactttatgtatgtcaccgccgattcgcagacgatatatcatcccgatctgtatcaggcggcaatcaacgcgctcggcgactacacaagaaattgtcattacgacaaagcgttcggaagtgctgacaccggtagatacgaagcgcagaaacaacgcttcgaaacctttaaaacggcattgcaggctatgcttccgaatgacggaaaatacgaagtttccgactataaaccggaaggaaaaactccgcttaaagcaaactccgtttttgcgggctggtacacggacgaaactttcacaacaccgtatcttctcgattcgggcgaggcttatgcaaaattcgttgacgaaaaagtcctttccgttcgcgttcagtgcgatgcgggcttcacgggcgcaagcgaaaaaacaaatctgcgctttgtgacaacagttgacggaacggattaccgcgctgtcggattcagaataacgctcaacaacggcaaagaaatagacgtaaacaccagcaccgtttacagcagcataacagcgaaaaacggtcaaacggttctgacatatcagccgacggcattcagttccgaatcaaagtatttcatgacttttgttatcggaaatgtaccgactgaatttttcgtatccgaattctgcgtaacgccgtactggataacgcccgacggctcaaccgtggacggtgtaacaaagacgttcaatataacggacgcgaacggactgacaaaggccgttgcggttgacaacacaacgaaagtttatcaggacagaacgtacagcaccgaaaccccgataaagcgtatagatatgtctcttgcctccaacgaatcggaaggtgggcagttcattctgaaaaatgagtccaaggcattcaccgttaaagatattacagtcagcgacctgacggatggcagcggaaacactattccgtcatctgcaataaccgtttacagacagcattatatgtatgttgacgttcactactatacatataccggctatccgaacgcatactaccccgacgctcttatcgagataaaatacgataaggcacattattcgtcgggcttccccgttgcaaagggcaaaaaccaaggctattggtttacacttacagcaggcaaaaacaccgcagcgggaaactacacgggcaaaatcacggtaacaacgggagacggtgagttttatattccgctcaatgtaaaagtatacgactttgctatccccgaagaatcgcatttcaaaaattcgtatgcactttatcaattgaccgattacgacggacagagagaacagtattacgagttccttaaacagtacagactgaattccacatatctgccgacaatcgaagcggatctttcgtggaatgaagacaaaaacaagctcgttacgcttgacgcaacaaaagctgttatcggtcatgcgcaatcggatctcatcaacaccgttatgctcgacattgcgggtatgagacgttacaacgacaacggaacataccgtttcacttccgaattcagagaaatgctttcgtatctgaatacggaacttcccggcaaactctattcgataattgcagatgagcccgtataccaggagggcgcagactgggtaaacacaacaagaatacccgaccttgcaactcttgtccgcgaagagggtcagggaatgaaatctatcattacctatgacacataccttccgaaggacacaaatactttgagcataccggatgtatggtgcgtaaaaccctcctacatcacaaaagcggatgcggatgctgcacacgcaagaggtcaggagatgtggtattacacctgcaactggcccgtttaccccgcattgaccacacacattgactcgcaccttatcgctccgagacttataacatggctcggattcggcgaccacattgacggattcttctgctattccgcaacaagacattacagagcaacaaactccacgcatacggacgccaacgaatgggtgaacccctatgctcacctgctcggagacgacacgggcaataccgcgaactccgaccccgcaggcgacaactatatcatcatgataggacttaacggtgacggcataatagatgaaaacgtacccgttccgacactcagacttgaagcgctccgcgacggtatggaagactacgaatacctctggctctattccgaaaaaatcaaggcattgaacgcaaaactcggaacgaatgtttcaaccgacgatgcaacgcagatgttcacgaccgttatgtacaacagcacaacggattggctcaaagatacttccgttttcgcatatgttcgcaacgaccttgcggaaaagattgcggaagatgtgggattcatttactacatcagcgaaacgggaaatgccgcaacaagaaccattcatgtttacggcgcaacgacttcgaccgttaccatagcgggacagtccgtaaatgtttctaatgggcacgcgcagttgacagttagtgtcaacaccgcagcaaagagaaacgattacagcataaccgtaggcggcaaaaccgttcaggtgcattgcttccccgggaaataaacataataacagattcgcggcgacgtatataatacgtcgcc

SEQ ID NO: 3563 - DNA, 17927 bp, Unknown
  16S sequences of unknown bacteria
ggggtagcccctctttttttatagaaaatttgaaaataaaattatataatattgttgacaaattaaataataagaatataatattcaataaagaggagagaaagatatgaaccgtagtgtatatagcctggtgttgatggatgatgtcatccatcgcatcgatgagctggcctatgccatgcataccagccggtctaacttaatcaatcagattttggcggaaaaattgcagatggttacgccggaaatgcggtatcaggatatatttcaatatttagagcaatcgatacaacggcatagcggttttcagctacaggcgcaaccttcacagacgatgatttccatcaaaagcccgctgcaatataaataccgccctgtgattcgatattgcgttgaactataccgagagccacaggacgctgtgggtgaattgagggtgatggtgagaacgcaaagccaacagctgatggacgatttagaggaatttgccaggctttgggcgcggctggaaaatgagcacgctgctgcggtacagcaaaagcccatagagtaccatatggagccgggcaagctgtcccggaaactgtcgacaccctcgacaaaagaaggaaaggatcatgaaagtattgcgcataatatagaggcataccttacgatgtttgataccattctcaaacggtatttttccaatttggaagacccgcatacagcggcgcatgaagcgcaggatctgtatgaacaatatgtaaaacacgggctgccggaaatataacggcggcaggaagcgaggaagctatgaatattcaaaaatttacacaaaaatccatagaggcgattcagcaggcacagcaggtggccagcgagcatcaaaacccgcagattgagcaggaacatcttttgtatgcgctggcaaaccagcaagaagggctgattggtcagctattgattaaaatgggggtagagcaacgggcgtttttgcagcgcctacgccagaggatcgatacgatgccgcatgtatccggcagcggcacggctggtggcaatgtgtatgtggccagcgacgtggaaagcgttttaaatctggcagaaaaaaccgcagagcgtatgaaggatgagtatgtttcggtagagcatatcatgatggcgctgatagagcagccaaacgacacgctaaagacgctgttccgcgaatattccattaccaaggattcgtttgccaaggtattggctacggtacggggcaatacgcgcgtaacaagcgacaacccggaatccacctacgacgtactgaaaaaatacggctctgatttggtggaattggcgcgtgagcataagctggatcccgtcattggtagggattctgagatacggaacgtcattcggatcctatccagaaagacaaaaaataacccggttctgattggtgaacctggcgtagggaagacggccattgcagaagggcttgcgctgcgtatcgtacgcggtgacgtacccgataaccttaaggaaagaaagatcttttctttggatatgggctctttggtggccggtgcaaaattccgcggagagtttgaagaaaggcttaaggcggtgcttgaggaggttcgtaaaagcgaaggaaggatcattcttttcatcgacgagctgcataagagacaggcatacgattgtgggcgcgggaaaaaccgatggcgcaatggacgccggcaacctactaaaacccatgttggcgcggggggaattgcattgcattggtgcaacgacgctcaacgaataccggcagtacatcgaaaaggacgccgcgttggagcgtagatttcagcctgtgatggtcgatgagccttcggtggaggacaccatttccatcctccgtggtttgaaagaacggtatgaggtgtttcatggcgtaaagatccaggaccaggcgctcattgcagcggccgtactttccaaccgctatatttcagatcgatttttgccggataaggccattgacttggtggatgaagcttgcgctatgatccgcacggagatggattccatgcctacagagctggatgagatttcccgcaagatcatgcagcatgagattgaagaagctgcgctgaccaaggaaaatgataagctgtctcaagagcacctaaaagagattcaaaaagaactggcggagatgcgtgagcagtttaaggaaatgaaggcaaaatgggagaatgaaaaggaagccatttccaaggtccaaaagctacgcgaggacattgagcgtgtcaatgccgagatcgaaaaggcggaacgcacctatgacctaaaccgtgcagcggaactgaagtacggagaactgcccagcctgcaaaagcagctatcggaggaggagaagctggcagaggaaagccagggccccaattccttgctgcgcgataaggtgacggaagaggaaattgcccggatcattgcaaggtggacgggtataccggttgccaagctgatggaaggcgaacgtgaaaagctgttgaatctggataagattttgcatcagcgcgttgttggccaagaggaagcggtagagcgggtaacggaagcaattctgcgctctcgggcggggatacaagatcccaaccgccccattggctcgttcctgtttttaggccccacgggcgtagggaaaacggagcttgccaaggcgttggccgaagcgctgtttgatgatgaacgcaacatcgttcgcatcgacatgacagaatacatggaaaaatactccgtatcccgcttgatcggcgcgcctccgggctatgtaggctatgaggaaggcgggcagttgacagaggctgtgcggcggaaaccctatgctgtggtgctgtttgacgaaatcgaaaaggcacacccggatgtattcaatgtcttgctccaagtgttggatgacggcagaatcaccgattcccagggacgtacggtggatttcaaaaacaccatcatcatcctcacctctaatttgggctccaactatatcctggaaggcattgatgagagaggaaatatcagcgaacaggcaagaaaacaggtggatgcgctgttgaaacagcagtttaggccagagtttttgaacaggctggatgagattgtgttctataagccgctgacaaagacggagatttcttcgattgtagacctgatgattcgagacctgcagcatcggctggaggataagcagctgaaggtaagcgtaacggaaaaggcaaaggcctatatcatcgatcaggggtatgatgccgtctatggtgcaaggccgatgaaacgattcatccaaagccgcgtggagacactgattgcaaagaaaatcatacaagacgatgtagcgccggatacggtgttgaaggtggattacgatggcaatcgtttgaccgtgcaataaaaaaagccctgcaaaagagattttgcagggctttttgcatacaatggaagggtccggtacggtgtggatttgcttgatggcacatcctatgataaagtaggcaaaaacgagcggacaaatgggagggcccatgcgcattaaaaaatatacaaccaaagcggggcttgcttgcatactggctatgctttgtgtcttgctggccgggtgccggcaggcagaaagggtaacaactgcggcgtatgagcagactcagcgcagcattccggtcttgcagggatttgcgcaggaagagcaaaccaacgacgctttggaagcttggtttggccctgcgcccaaggcgctggcgcaggttgaaagccgggagggccgggtttatatgctgtcctatgcgctggaaaaggccgaggaggaccagtggacgctgcaaagccagattgtagcggaggggcaaccgatattggcgttgccggagattggtttggatgcacagggcaaggctacgtttccgaccgattcaacggcacaggcattgtcggatgcagattttctaaacgatgtgctgtggctacggcagatagggattgcatcggatcttgggcaatatggacggaatgcaaacaatgagcagtccatggcatttttaacagcgctctatgagcatgttttgggcaaacaaattgatacacagggcatagattcggccattgaaaatgaggtattccgaaaggcgattgccgttggcatacaggactactatgattctgatatggatatgcaggctgtgtatccggtcaacaatgcgctgatgatgcatgacatgatgctttggatgacaaacatcaatcgcgagggatatgggatatgcagccaacaggccacgctggaacagactgcggccctgatggattggatggcggaaacctatcaaattgggcaggggattttggaggaagggcaggccttcgctacctctacgccccgtacagacagagcccctacggggttttcacagcttgctgcacaggagaaaggggttagggcccccttgacaagagaagcgttggcagcttttatggtaaaggcctatgaaacaaacataggccctatcacggtgaaaaagcaggatacaggattttatgacgctacggaggaaacgtgcgaaaaagcggtggctgccgatcttatgtatgcatatccttccgcggccaccttttcaccagagctggaggtgcggatggagatactgccggaatggattcaggacttcaccatgtcttatatgacggcatggtacgatccggaccggcaactgggcgatgcattgtatgcaccactgacctaccaacagatggttcacagcgtagcgcagctgggcgcgctgtatgaaaatagacctgtcccgcagctggaaaccagccagcagatcaatgacaggccttatgattggtattacacgcagaacaacacggggacatacagcgagatcaactgcatgccaacggccactgccatggtgttgaagtggaaagatccggattttgcagagagcgtggagtctttgcgcaatgcatttcccaagctgacagggggatggacgatttacccagtagaaaaaacgttggaacggcatggcgtatcttatatgcaaagacaggtatccatgcaaaatatgatagaggacctaaaagcaggcaaaattttattttgccaatgcaacgattatgacgtacgcgaaagcgggcactgctttgtcatttacggctacaagaccagcggagactccacctggtttttactgcatgacccggcggccataggcagcgacgcctatggaaaagaaaagaaccgagccaaatggatggaagccaagtattgtacatggattgtggatcgcttcagcatgtactatttggccatagaaccttgatggctaaaccatagcggcgccgtcaacagataggatctctcccgtcacatagctggccagatcgctggccaaaaacagaaaagcgttggcaatatccgacggctcgccgatgcggcccagcggtacggcagctaccataggagcaatcatggattccggcagagcagccaccatatctgtgcgaatgatcccaggcgccactgcattgacacgaatattgtctttgccgagctcgcgagccagagattttgtcaacccgttgacggcaaacttggaggtggggtaggccacgcccgaaggctggccataaaggctgaccatagagctggtattgagaatgacgccgccgccctgctccttcatgatgcgcgctgcggcttgggcgcaaaggaacacggctttcacattgagatccagggtggattcaaaggcagagggagcatagtcatacaaagactctctggcggatacgccggcattgttgacaagaatatccagccgcccccaatcggaaacaacctgcgccatggcggcggcaacgctctctgggtctaaaaggtttggcgcatatccctggacgcaggcgtctggcatctcatcacgtatctgagacagcgcttggtccaccgtttgctgacgcgacccccaaagcgctacctttgcgccctgctgcaaataggtacgaacgatggccgcgccgattccgcgcgtaccgcccgttacaacggcaactttatccttcaatagcttcatataagttccctccttaataataagaattattactaatattttagcattgcttagaatattgtcaagagatgcttttatagaaaatagtattgccccagatcctgtatttacatgatgataaaagcatatataaagtgtacttttcttaaaaatactaaatttttatgtcggaatgtccttgaaaatatcgtatactaaatgtatgagacagaaaagtgagataaatgatagagggagggaaacagaaaatgagtggttggatcttattgggatcggttgttttgatggcatgcatcattggaaataaaatttccagccgtctaggcgtacccacactgtttttcttcattgccctggggatgctttttggctcagatggattgtttaaaatagagtttggggattttgtattttcagagcagatctgttccgtagcattgatctttatcatgttttacggagggtttggtaccaaatggagtgctgccaagccagtggcgggtaaggcgatcttactcagcacgcttggcgtatggatgacggcgggcttggtgggcgttttttgtcattttgcattggggacaggccttttggaagggctactcatcggtgcggtgttgggttctacggatgcggcctcggtattttccgtgcttcgttcacagcggctaaatctaaagtatggcacagcgtctctcttggaggtagagagcggcagcaacgatccctgtgcatatatgcttaccgttgtcatactgtctgctctgcagggagaaatttctgccgggcaggtcgtctacgcggtttttgcacagatcgtatatggcgctctggcgggcattgccattgcagctttggcaggctgggtgctaagacatgcgcactttgaatcagaggggtttgactccatctttttaatcgcggtgatcttggctacctatgcaattccctccttggtgggcggaaacggatacatcagcgcttatctagcggggattttactaggcaatcaaacgttgccaaggaaaaagagcctggtacatttttttgatgcattcaacggcatgatgcagatgcttatctttttccttttgggcctgttggtattcccttctcgcctgccgagcgtctttctgccctcgttattcattgctctgtttttgacctttgtggcaaggccagcagcggttgtttgcctattgaccccgtttaaggcgccgttcaagcagcaatgcctgatttcttgggcagggcttcggggcgcggcttccattgtgtttgcgattatggcggtggtatctcctgcatatgggaaagaaaccatttttcatatcgtattttgtgtggtgctgttgtccatcctatttcaagggactctgttgccgatgatggctagaaagctagatatgctggatgagcgagaaaatgttctcaaaaccttcaatgattattcagatgaaacagacgtacagtttatccggttggatcttcgaaaagaccatccctgggtgcaccggcagatccagcagatagaatccattccaggcttactgattgccgcagtgctgcgaggcggggaagcggtcatgcctaaaggggatacaagtctgaacgaaggggacgctttgatcctagtggccaaggagtataccggacgagagggcgtcacgctgagcgagcagaccgtagagccaggcagtgcgctgatcgggaaaagattgaaagaaatcgacttaaaaaagcaatcgctggtgttattgatccaaagagccgggaaagagatgatccctgacggcgatagccggatactagagggcgatacgctcgtgatgtatacgagagacgagatagaaacgaaataaaaaaacagcccagagggctgttttttatccgttagttgcgaaggctgtggatgggggccgggatacgaccgccgcgatccacaaaggattggcagttgtatgggttgacgcccatgcaataggcatgccccagcaagccgccgaattctacgcgatccccaacctgcttaccgggggctgggataatgcgtactgctgtggtcttttggttgatcataccgatggccgcctcgtctgcaatgatggcagacagcgtggctgccgtggtatcgccgggcacggcgatcatatccaacccaacagagcagacacaggtcatcgcttccagcttttccaaggatagcgccccgatgcgggccgcttcgatcattccggcgtcctcgctcacggggatgaatgcaccgctaagcccgccgacatggctagaggccataacgccgccctttttgacggcatcgttcaacagcgctagggccgcggtggtgccaggcgcgcccgccatttccaggcccatttccgttaggatatgggcaacgctgtcgccgatggcgggcgtgggagccaacgatagatcgacaatgccgaagggaacgcctaagcgctgcgatgccaggcgcgcaaccagctggcccacacgggtaatgcggaaagcggtgcgcttgatggtttctgctacggtatcaaagggctgaccctttacctgctccaaggctgatttgacaacgcccgggccagaaacgccgacattgatgacgcattccggctcgccgacgccgtgaaaggcgccggccataaacgggttgtcctccacagcattggcaaataccaccagttttgcagcgcccaggccgccgtgttctgcggtaagctcagctgtttttttgatgataaagcccatttcacgcacagcgtccatattgatccccgcctttgtggagccgacgttgacagaggcacacacgcgctccgtagccgccagggcttccgggatggattggatcagggtgcggtcgccattggtaaagcctttgtgcacaagcgcgctaaagccaccgatgaaattcacaccgacggttttggcagcgtcgtctaaggccttggcaatggccacataactgtctgcaccggtattttgcgcaatcagggaaatgggcgttacgctgatgcgcttgttgacaatggggatacccagttcctcttcaatggtttcgccggtttttacgaggttttcggcccggcgggcgattttgtcatatacattctgcgccgttttttccaggctgctggcaccgcaatccaataacgaaatgcccatggtaatggtgcggatatccaggttttcctggcggatcatgcgcagggtatccagaacctcattttgatcgattctctgcatggcgctttccctcacacccggtgcatggaattgaaaatatcttcatgctgacagagaatggacaattccaattcttctcccagcttggagagggcttctttcaattcatgaaaagatacggtacaaggcgctacatccaccaacatgaccatggagaaatactcctgcatgatggtttggttgatatccaaaatattgacgccacattcgtacaatagtgttgaaacttttgcgatgatgcctggcttatcaaagccaagtacggtaacaatggttttaatcataagatcctcctgaaagcctaacgtgctggttcgctaaaaacaagcattattctttattttaatcgcaatgccatggccatgcaacccaatcacatcgttttccgagaaaaaaggccggcataggccggccttttgaaaaatcagtattcttttttgctgcatatgcggcaggaaagccgatacgagataaagacgacggcagccaacaggaaaggcaccaaaggcaggagtcgatccagcatggcaattagtcgatccagcgcatataaatagttttgcgcagcgaccatggcgcctacgatacagagggcaatgaccacagcataaatgcgaccgcggtccacgccgaaccgaaacgcaatgggcataattagggagatgagcagcaggctaacgcccgctacggccaacgagctgtatatcagcagggaaatgggctcttggctgaaaagcaggatgataccgccgcagactaaattgaggataaggcagacggccacaatgatcaaagcaaacaaataccgcccctgcaccagatttttgcgggaaagggggagggacagcgcataacgatcccagtttgcatagttgtcgtatgtaaaagcgctaaaggtcacgatgacagctgccatggcagagaagccggcaaaaaaggagacctctcggctatatacgctgataccaaaatacagaaccagcagcaatccaagcgcgttgagatattttttcagcgaaagaaactctttgtataacaaacccttcatagcgacggcactcctttgatgtaaaacagcatgatctgttcgatggtggcaggctctaaaatcatttgctcagttaaccgaagatgttctttttgggttaccagtacctcacaatggaaatcatggggaatgatccgcacgatctgctgaggcgctaatgtatgcaaagcggaaacgctgcaacgtagcacaccatactgctcttgcagacggtttttttcttcgctaaacagcatttggccttggtgtagcagcgttacataatcggcgattttatctaaatcactggtgatgtgagaggaaaaaaggatagaatgtgtttcatcctggataaactctaaaaacagatcaaggatctcgctgcgcacaacagggtctagtccgctggtggcttcgtctaaaatcagcagccgtggatggtgggccaatgcgttggcgatgagtaatttcatgcgcataccgcgtgaaaacttctgcataggctggcgaaagggcagctggaattgatccagcaaccggcggtataatacggaatcccattgtttataaacgccggccatacagcgctgtacatcctgagcggtaagcccctcatagaaaaagctgttttcccagacaacgccgatttgttctttcaacagcgcactatccgaacggacgggttggccaaatagacggatctctccgctgtctgggcgcacaatatccagcaaagctttcaacgtggtggttttgccggcgccgttttccccaatcagccccataatgcagccttctgcaagagaaaaggagatatcttggagctgaaaagaagaatatgatttacaaaggcctgaaacctctatgatgctgtttgccatggtattaaatgtcctcctgatataaaagatggatgatagaagcaagctcctcttctgcaatgccgcattggcaagccaaggcggttgccttatgaagatggccttcgatgaggcggagctgctcctcctttagaaaatcctcatttttgctggcgacaaagctgccttttcctacgatggtttctataaagccttcgcgctcaagctcttcataggcccgtttcgtggtaatgacgctgatgcgtagatccttggccaacagccgcatactgggcagggcgtcccctgcctgtaaggcattggaaaggatgagctgtttgatctgtgaaacaatctgctcatagatcggtttgccgctggcatttgaaatgatgatatccaaaagaagcctccaactatatatattgtatataaagtatatatacaatatatgactactttacagcattgtcaagagcaaatagcaagtttggtaaattgacaaatcgcagcagggccgatacactgaaacacgattcttctttgggattgggataaagagggttgtagaatatgaaacagaaaaaaagcaaaaaaagtatacaattgcccaatgggtttttatatacgttaggctgcaaggccattacaccgtaccttaaaataaaatataaatttgccagggatacgggggccattcaaggcataaagccgccgtatcttttgctatgcggccatacatcgggcatggattggctgccaacggtggcgggtatgtatccacaaaagatgaatatcgtaacagcgcagcactatttttacaatcagccgctcaagaccatccttccttggctgggcgccattgccaagcaacaatttcaggtagacgtcagcagcatacagaaaatgaaaaaggtcgttgccatgggcggcgttatcaacctatttccggaaggacaggttagcatagacggaaaattggggtttgtacatccctctcttgccaagctggtacagtttttgggcattcctgttgtcattgggaaattgcagggagcaggtgcctgcaaaccaaaatgggccaaggtctggagaaagggccctgtaaagtttacagcaacgccgcttttgacagccgagcaggtaaagcagatgccgcgagaggcattgtatcatacgctggtagaggcgctttcctttgatgaaggagagagcatccggacaagcggctggcattataagggtaaagagctggcaaagggtttggaaaatgccctgtaccaatgcccaaactgcggccgggagttttgcacgttttcggaggaggataggctgatatgcagggcctgcggcaacgcggtgcgcatagacgatcagctggcgctacatcccgtgagcaaaaaggagaatgcatttcctaccatagccgagtggctggattggcagcgggatcagctgcggcaaaaagcgtcacagcccggctttgccttggtagagcaggttgtcttgaaggacccaaggcaggaaagtagcgggtttgatagaaaaggcagcggaaaagcgcgctttacttgggatgggatgctttatcagggtgaaatcgacgggaaaagcggagaacgctggtttcccaaagagcatcttgctatgatcccctacgcctgcggtatcgatcttgaaattccttatgggcggagtatttgtgtgctggaaccggagaacaagcagtctgtgatgcagtggattttattttcagagctgttgagggagaaagaacagaaaaagaaggcgtaggccttctttttttcgccataccccagaaaacggcatagaataaagggaaaggggcgtagggcatgaaaaaaaagggaaattgtgtgaccactgtaccgatgatggcggcggctgtggccagcgcattggcctgtggacagacagaggcgcagatagagcaatggcgctgttttttgagcgccgtgattagcaatctgacgttgattctggtccactgcgatctggcccctgagctggaagcaatctcggaagaggtggaagagctggcagaggaggccgaaagacaatcctaatggatgcttgccaaaccctctatggctgtttacaatagggaatagaccatgagaaaagaggaaatggcatgtccgtagacaaggtaaagacatatttacagcaatgggatcgtgcaaaagacgttttggaatttcctgcttctagcgctacggtacagttggcggcagaggcgctgcatgtgatcccggcgcgcattgcaaagacgttgtcctttaagggaaaggaagaaaagggcattttgatcgttgcagcaggagatgcaaagatagacaacgcaaaatttaaacggtgctttggcttaaaggccaaaatgctgactccggaggaagtgctggcatataccggacatactgtggggggtgtatgcccgtttgccattgaggactcgcgggttgaatgctatctggatgtatcgttgcaaaggtttgcaacggtgtatccggcagccggtagcagcaactctgccattgagctgacgtgtgacgagctggctacctatgcgcacagcttagcgtgggttgatgtgtgcaagggatggcaggaggacggggattgacagatagcaaccgctcacactataattaaaaaaaatagattgtctgtttcggggcgaggtgcaattcctcaccggtggtgaaacgctgataggcggcaagtccacgagctttggcagagctggttagaatccagtaccgacggtatagtccggatgaaagaaacaacacagaggactgttttctgtgcgccctttattcgtattggataaagggtttttcattttctccatcgggcaggcaaaaaaggagaagagaaaacatgaacacatctacaaagatcatcctttggtcggtattggcgttgtttttggtcgtcttgttcgtcgttgatctaaacaagaagaacaaaaaccgccagcaaaacacccagcggctcgttatgatggcagtgttggttgcgctttccatcgtcatgctgatgctcattcgatttcctatctttccaagcgcggcatttttggaatacgatccggcagacatccccatttttctgggcacctttgcctatggccctctggccggttttgcgctgacggtggtggcgtccatcattcagggcatgacggtaagcgctggcagcggctttatcggtatcttgatgcatatttttgcaacgggatcgttcgtattggtagcgggcaactggtataaatttcataaaaccaaaaagcaagctgtggtggcgctgctattgggttgtttggtgatgacggtgtcgatgatggtatggaattattttgtaacgccgattttcatggggatgccgcgtgcggctgtggccccgatgatcttcccgatcattctaccgtttaacctaatcaagagcggggtcaattcattgattacctttctgctatacaaacgattttccaaggtacggtatctaccgctgcacagcaaataaaaaaagagccatcggctctttttttatttctgtattttaattttcgtgatggcatcgatgtcatacggggtttcttgatagacaaagttcagccaattgaaatagaacaagttggcatgcgcccgccactgcacaatgggaggtagggaaggatcgtcattttggaaataatgcttaggaatcttgatcgcggcaccgcgctgcacatcgcgttggtattcatatagcagcgtatcccggtcgtattctccatggccggtgataaagatctgccgtccgtccggcgtcatggccaggcctacgcccgcctcttcggattcacatacgacctccaggccgtgcaccgtttcgatatcctctttacgcacctcggtatggcgggaatggggcatgtaaaagacatcatcgaacccgcgcagcagcggattatgctctgccaaaatatggtgtgagaatacaccgaacagcttttccggcagctcatatttcggtacgccgtaatgatgatacagcgctgcctgggcgccccagcagatatggatggaggaaaagacattttccaatgaccaatccatgagcatcttcaattcatcccagtaggcaacctggtgataatccagcttttccaccggtgcgcctgtaaagatcatgccgtcgaacttttccgactgaatttgttcaaacgttttatagaatgttttcaagtgctctaacggcgtatgggtggaaagataggactgcgggtgtaccaaagtaatatctacctgaagcggcgtattgctcaacagccgcagcagctgggtctctgtggtgatcttcgtcggcatcacgttgaagatcgcaatcttcaacggacgaatatcctgtgtcgtggcgcgatcctctgtcatcacgaagatattttcattggataggatcgcggcagacggcaaagcattgggaatacgaatgggcatcgcttgaccatctctctttttttggtttttcggctattgtatcatggtaaaaaaatgattgtcaatgtgcaaagaaaaaggggggttacccctcctccggcattttataaaccaaagcgccgcttcgcttatgctgcgtggctttgtgtgcccgctggatgatagcaatatcctccggccgaccggtaccatgcagtatatattcatcgatggcggcataggtaacgcccatttccttttcgtctgtctgcccctcgaacaaccctgcagagggcgccttttcaatgatctcgggaggggctcctaaatagcgcagaaaatcgaagatttctgtggcggttagatctgcaatggggttaaaatcaaacgcaccatcgccccacttggtgaaatatcccatataccgctcactgcgattgccggtgcctgccacaaggcagcccttgctttgcgccagcgcatacagcgttgtcatacgcagacgtgggttgatattcatcccggatgcaccggagagcggcgacaatggctctatggcgctgacaaatgcggtcttgatttccgtaagatccacctgaacagcctctatgccaaactgcttgctcatcaaaagtgcatggtcgcggtctatgccaaagttgcggctagaagaacacggcatgataacgcctgtgacctgcggcgtagccaggcggcacagaatgcctaccaaacagcagtccttgccgccgctgttgccaaagacaacgcctttggcgccggaagatttcaggacggattgtataaaggaaacacgagcttgtttttctgcggcccaatcacgcagcatcattcttcactcctttgaaaagtaaaagggagagcggctctccctttttttgctcaatattgggtcagataacgatccacttcccattgatgaacctgcacacggtatttatcaaattccaagcgcttggccgttacatacttattgaaaacatgatcgcccagggcttcgcgcatcagcgggtcgttcaccatatcctggatagcttcatccagcgtacctggcaggttgcccacttttttctcaatgcgctcttcttcgctcatatggtagatattgccatctacgggtagggggggcatcaagccgcgttcgattccatccagaccggcacgaagcaccagcgccagtagcagataaggattgcaggacggatcgggagaacgaagctccacgcgggtggaattgccgcgcgcggccggtacgcggatcagcgggctacggttgcgggcggaccaggcgatgtataccggcgcttcatagccgggcaccagacgcttataggaattgaccaagggattggcaatggccgtgatgcccttggcatgatccaacacgcctgcgatgaattgcagcgcttcggtagaaagaccaaactgctcatccggatcatagaaggcatttttaccatctttgaaaagagacatattggtgtgcatgccattgccggccacgccgaacaacggcttgggcataaaggtagcatgcagcttatgcttttgcgcgatggtcttgactgccagcttgaaggtgacaatgtcgtcggcagcggtcaaggcttcggcatatttgaaatcgatctcatgctggcctggcgcacattcatggtgcgaagcttcgatctcaaagcccatttcctccaaggccaaacagatggcaatacgggcctcctcgcccatatccacagggccgaggtcaaaataaccggccgcatcgtgtgtatgcgtcgtaggagagccgtcctctctggtatggaagaggaaaaattccagctctggtcccacattgaaggaataccccattttggcggcatggtccaacgcgcggatcaaaacattgcgcggatcgccttcaaacggcgtatgatccggacgatatacattgcagatcaatcgcgcaatgcggtgttctttcggcgtccagggatagatgacaaaggaatccagatccggatacaaacgcatatccgattcctcaatgcgcacaaagccctcgatggaggagccgtcaaacatacagtcgtttttcaacgctttttccagttgcttgtcggtgatcgccacgtttttcagcgaacccaaaatgtctgtaaactgcaaacggataaaacgcacgttgttttcgcgtaccatttgcatgacc

SEQ ID NO: 3564 - DNA, 20490 bp, Unknown
  16S sequences of unknown bacteria
gttcgggcaagatactgacgggcgggcatcaggagcgcggcatgcgcggcggcacgaccaacgtgcccggcgtcgtcggcatggcggaggcgctgcgcctcgccgtcgcaaaactggatgaaaacgccgcgtatatctcttctttgcgcgatcgctttatcgcccgcgtccagaaggaaatacctttcgtcaaactcaacgggcatccgaaaaacaggctgccttccaacgccaatttttctttccgctatgtggaaggggaatcgcttctgttcagcctcgatctggcgggcattgcggtttcgagcggttcggcgtgctcctcgggttcgttggagccctcgcacgtgttgctcgcaacgggaatgagcgaggggctggcgcacggctctctccgcttttccttcggcagggagaataccgcggaagacgtggattacacggtggacaaacttaaagagatcgtggtgaaactcagaaatctttcgccgctgtttcccaaagatatgaaaaacgaagtgttcgaaaaaggagaataacattatgcaatatacggataaagtcatgaacgcctttcaaaaccccaaaaacgtgggcgagatcgaaaacgccgacggcaagggcatgatcggcagcgaggcgtgcggcgacatcatggaggtttccatcaaagtggaaaacggcgtcattaccgacgcgaaattccgcacgttcggctgcgcggcggcgatcgcaacctcatcgaccgcgacggaaatgatcaagggcatgacggtggaagaggcgctttccgtcaccaacaaaaaagtcattgaaacgctgggcgggctgccgccgcaaaagatacactgctcggtgctggcggaacaggcgatcaaggcggcgatcgaagattaccgttccaaacagtctgtccgtgcgtagggcggaacgggcgatcgcgggcgcggacgacgtgttcgaaacgctcctccgctgcgacgcgctgagccttgccctttgcggcgaagacgcgccttacgtcgtgcccgtaaatttcggcgccgaacgaaaagacgggaaaatcgtcttgtacctgcactgcgccgacggcggaaaaaaactggaacttctgaaaaaagatccgcgcgcaagtatttgcgcctttcggcaattcggcgtgtacggggcggattcgccgtgcagttataccgccgattacgagagcgtctgcggcagcggcagggcggagatcgtgacggacgagccctcgcgtctgcacgcgctgcgcgtgcttttgtcgcactacaccgaccgcgttttcgaaaacgaaagtttcgaaccgcgcgcgctcgcgcatacggtcatcatacgcatcgttctcgatgcggtttcgggaaaacggcgcattgtccggaaatgagaaagacgcggaaatatccgcgtctttttacgttgtctttttattgagttcgcccgcccattgaaaggctttttttgcgacgatcacggcgatgatctcgttgatgatggcggccgccgcgatggtgccctgaatgagcgccgcgcactcgggcgcggggaccgcgagcatggaggcggcgatgcccgtaaacacgagcgaaacgcccgaatgcggcaagagcgtcagtcccaggaaattgcgcacggtcttgggcgagcgcgtcatggcggcgcccgcaaacgcgccgaggtatttccccgccgcgcgcgcgaggatatatacggcggtaaacacgcccgcgccgaggatcagacggaaatccagcggcatgcccagattcagaatgaccgcgatcatggaaaatgccagaacgggcgaaaatcccgcggtgatctcgtgcagtttttcttcggaaaccatattggagaacacggcggaaaacgccatgccgatgagcatataattgagcatgggggcgggcatcagaagatagtcggcggcgaaccccgcgcccgccgaaaggagcagggtacttatgagcacgagcatcagtcccgcgcgttttttggcggatttgaataaaagccccgccaaaaggccgaaaagcacgccgatgacgagcgggagtacgacggagagcacgaccgcgtacacgggcaccgccgccgcggacaggcgggaggacacgacggaaacgacggtgaagaacacgacgacgccgatcatgtcgtcgagcgccgccatgggaaggagcgtatccgtaacggggcctgcggtcttgaattcgcgcacgatggaaattgcgggcgcgggcgccgtggcgagggcgatcccgccgaaaataaagccgagatacaggggcacgtccgtaaagaaaaagatgatatcgaataccagcgtcaccagcaaaaacgtgccgatcgactgggtaaaggtggtaatgaccgtctgctttcccgtcttttttatttttttccacacaagttctgtgccgatcagaagccctacggcgcattcgagaatatgtatcgcgctctcgtaccatacggcgtccagtatgggtgcgtcgaccagtttcagcgcgaacggccccagcgccatgcccgcgatcagccagccgagaatggcgggcagttttataagcgtgaccagttttcccacgccgaaagcgataacgatggcggcgagaacgcgcagaacggataaaaatatttccattattgctccttttcgatcacgccgtaaaagaggatttccagccacttttccaaaagttcttcgtgctttcccgcaacattttcaggctcttcctctttttgccgcatggaaagatgaaacatctcctcgaaagaaacgagataccccaaagcatcctcgcccgtaacgcctttccgaaggcgtgcgttttggaggagtctgccgaaatattgcacggtaaaatcgtccagagagcgctttgcttctttcactttgtcataaagcgctttgggcgggttgagcagcgtctggaaaaacagcgcccgttcgggcgcgttctcgtcgaaaaacgccctgcgcgcgccggtaaacgcgcgtaatcccgctttcaggcccttatcttcgggaagcgccgcgcgcaggcacgcttccattttcccgaaacagcgcctaagacacgcgcagaacagcgcctctttgctgccgaaataatggtagatcagccctttgctgatcttattttccgcgcacatgtcgttgacgctgccgccgtcgtacccctttttcccgaattccgcgatcgccgccgaaagaattttttcgcggctcaattcgttcttttctttttgctgcatttcttcgctcctttaaaagttgactacgcggtcgattatatcaaaaacagaccgaacggtcaactttttgaatatgaaaaaaccgcggaaaatttccgcggccgaaaatttattttttctgtacgccgtaatccgatagggcgtcggctaaattggcaagtcttacgggcgagagcgtttcgccgcgcgccatctcgggcacgtccgcgcgccgcaggatttctttcgccttttcgcgggaaagggaaaaataggagatcagattgttttccagcgtcttgcgccgcgaaagaaaggcgcagcgcaccgcgtcgcggtacattttccgatcctttacgggaatgcggttttcgcgaaacgtgagttttacgacggcgctgtccacgttgggcacgggataaaacattttccgcggcacgtatttgacgatctcggcgtccgcgcgcagggcgatcgccgccgtgatcgcgccgtaatcgggagtatcctcgcgcgcgcaaaagcgccgcgccacgtcgtcctgcaccatgacgaccagtttttgcactttttccgcctcctcgacaaagcgcatcacgaggggggaggtgatgtagtagggcagattcgccaccaccgaatagggacccgtttccttttcgaaagactttaggtccgcgcgcatgaaatccgcaaagcggatctctgtattgtcgcgatccgcaagcgtttccgcgagcacgggctttaacttttcgtcgatctcgaacccgatgacttttccggctgccgcggcgagcgcgcgcgtcagggtgcccgcgccgcagcctatttccacgaccgtatccgttttgccgatgcctgcgagggcgacgatgttttccaaaagattcgtgtcggaaatgaaattctgtccgaactgctttttaaaggaaaaaccgtgtttgcgtaggattgttgcgagattttccaaggattccctcccgattttgcgcatagcggggcggttcgcgccgcatactggtactgtaaactccataaatccgaaacgagcggtaagactttttgtccgagacgctatgaattttcggaaaataagagttttgccgaacggggacgtatctccccgcaccaatgataaagaaaagccgaaaagacatttttcggcttttcgtcatatgtttttttaactgtccgtgatcatttcccgcacgcggagaggaacgccgcaggattcggcgatcattcggcacttggcgatcttttcttcgccgatgcagtccacgacggaaaaccatacgtcgatgccgttctttttgcacccgcgcgcaaagtcctgcaaggcgccgaacgcggctttcccgaaagcgggtttgcacagcgtttcgtacgaatcctcgtccgcttcgttgaggctcacgttgatcttatccactttcccagcaagttgcgcggtaatatcgcatttatgaatgagatttccctgtccgttggtgttcagtcgcgtcacgccgccgcggcccttgacgtaatccgccacgcgcagaagttcggcaaggcgtatggtcggttccccgaaaccgcaaaagacgatctcgcggtattttttcacgtcggggatctgcgctatgacctcttcggcggtcggctctttatccagccagagtttgtatccgtaataactcgccttttcgttccgcacgcaaaacgcgcagtcgttggtgcatttgttggtcagattgacgtacagattgccgtccagttcgtaagtgtaggtgttcatgtttcagcctcggttcattttataaaagagcgcgtgcgcgttccgtttgatgtccgccgcggtcttttctacgctttcgccgcgcagttccgccagttttttcgtcacgagcgcaacgttcgcgggcgtgttcagcgtgccgcggtaaggttcgggcgcgagataggggcagtctgtttccgccaagatcctgtcggaaggcacgattttcgccgtttccgccagtttcttcgcgtttttgaaggtgacgggccccgcaaaggaaatatacagccccagtttcaacagttctttcgccgtttccgcgctgcccgaaaagcagtgcatgaccgcgccgtataaaagtttgccgcggttttgtttcaagagggaaagggtgtcttccgccgcgtcgcggctgtgaatgacaaagggcagcccgtgcgcgtgcgcgatctccatctgccgcacgaacgcggccttttgcgccgcctcgtccgtgccgtcgtaatggtaatccagcccgatctcgcccacggcgaccgccttttcgtccgaaagtagcgcctcgacgccgtcatagtcgctctccgccgctttcgcggtatccgagggatgaatgcccgcggcgaaatatacgccctcgtatcgagtcgcaacagcctttgcgaggcgcgacgacgcgagatcccagcctactgcgatcacttcgtccacgcccgcgtcgcggatgttttccatcagcgcgcgctcgtcgccgtatttgttttcgtaattgagatgggcgtgcgtgtcgatatacatagtttttccttaaaaaatgccgctgccgtcctcgatatccttttcgggagcgagaagccgcagttctccccgctcgttttcggcgcagaggatcatgccctcgctgacgatgccgcgcagttttgcgggcttcaagttggtgatcatcaccactttcttgcctatcatctcttcgggggtatagaatttcgcgatgccgctcaccaccgtgcgcgtttccgcgccgatctttacggtagattttaacagtttgtcggatttttccaccttttcgcaggcgatcacctccgcgatctgcatttttactttggcgaaatcgtcgatggaaatttccgcggggtatgcgggttcgttctttttcttttgttcgggcgcgctcttttgctcggtttcggggtgcatcgccgcgtatttcgcctccacgtccttataatcccggcgcatgaacagtttttccgcgtccgcgatcactttcgtgccgtcgggcaaaagcccgaacgtatcgagcctgtcgaaattgcgcagggaacagccgaatattttggcgatcttttccgcggtttcaggcaagaagggcgagagcagcgaggcggcgatgacgatacattcggaaagattatataaaacggtggcaaggcgcgcctgtttgctctcgtcctttgccaaaacccaaggagccgtttcgtcgatgtatttgttgcagcggcgcaggagagaaaagatttcgtccagcgcgtcggaaaccttgaattcgtccattttcgcggcgacttttttgtagagggaaaccgccgcgcttttcagttgctcgtccaaaggctcgctttcgcccgcgtcgtgcaatacgccgccgaaatatttgccgctcattgccgccgtgcggctgacgagattgcccagattgttggcgaggtcggaattcacgcgctcgttgacgagttcccaggtgatattgccgtcgttgtcgtagggcatatcattgagtacgaaatagcgcaccgcgtccacgccgaacacctttacgagttcgtcggcgtaaatgacgttgccgcgggatttgctcatcttcaatccgtccatcaaaagccacgggtgcccgaaaacgtgtttgggaaggggaagatcgagcgccatcagaaagatgggccagtagatggtgtgaaagcggatgatatccttgccgatgatatgcgcgtcggcgggccagtatttttcgaacagttcgccgctgttgccgtcggcgtcgtaaccgagtcccgtgatatagttggtcagcgcgtccagccaaacgtacacgacgtggcggctgtcgaaggaaacgggaatgccccagcggaaagtggagcgcgaaacgcacagatcctgcaagccgggctttaaaaagttgttcatcatttcgttcttgcgcgaagcgggctgaatgaaatcggggtggctctcgatatattcgatgagtttgggcgcgtacttgctcattttgaagaaatacgcctcttccttggcgggcttgacttcgcgcccgcagtcggggcacttgccgtctacgagttgcgagggcgtccagaaggattcgcagggcgtgcagtacagcccttcgtattcgctcttataaatatcgccctgatcgtacagttttttaaagatcttctgcacctgcgtttcatggtcgacgtctgtggtgcggataaagcggtcgtaggaaacgttcatcaggtcccagatctcgcggatctgccccgccactttgtccacgaattgtttgggcgtgacgttctgctctttcgccttgtcctcgatcttctgtccgtgctcgtccgtgcccgtctgaaagcgcacgtcgtatccctctttgcgtttgaagcgcgcgaggcagtcggtcagcacgatctcgtacgtgttgccgatgtgcggcttggaggaggtgtacgcgatcgcggtcgtaatataataaggttttttctcgctcataactgactccgttttgattattctcctgtattatatcgcatttacgccgcaaagtaaaatttttttcgggcatatcctcccgcttttgcgcataaaattcaatgagcggggtggtttttccttgaatattttatttttagcgatgtttatactttctgccgtcgccgtggcggtcagatctcccgacgcctttcttccggctcttttggaaggggcggggaacgcggtcacgctgtcggtcgcgctcgtttcggtgtacgctgtatggctcggctttttgaaggtgtgcgagcattgcgggattttgaacggcttttccaaattggtcaagcccgccatgtcccgattgttccgcgtgagcgatgaaacggcgctggggctgatcaccgtcaacgtgacggcaaacatgctgggcatgggcggcgctgccacgcccgcgggcgtttccgccatggaacggctggacggcatcggcagccccgcatactgcaagtccatgctctttgtcgtgaataccgcgagcattcaacttctgcccacgacggtcatcgccctgcgcgcgcagtacaattccgccgcgccctatgatattttgctgcccgtgctcgtttcgggcgccgcggcgctgatcctcgggatcctcgcggtcaaactcgtgtacgggagaaacaagacatgaatctgttcgtctatctgatccccgcgctcttcgtcgtggtgttcatcgtcgcggcgatccgcaaagtgaaggtgtacgacagtttcgccgagggcgtaaagggggcgatcccgctcgtcgtgtcgctgtttccgttcgtcgccgcagtattgatcctcagtcagttgtttgaggcgagcgggctttccgacggactgcaaagtctgctcgcgcccgtctttcggctggtcggcgtgccggaggaaatcggaaaactcgcgctggtcaagccgttttcgggcagcggcgccaccgcgctcctttcggaaatttttcaaaaatacggcgcggacagttatatcgcccgctgtgcctgcgtcgcgtacggttcgagcgaaacggtcttttacgtggcggcggtatactttgcttcggtcagggaaaaaaaactcgccgtccccatcgccatcgccctatgcgccaacttcatcgcgctcgtgttcggctgtttcctatgccgttttttttagccggcagaaaatgttaatttgcataaatatttctgtttcttatcatttttgataaccgaaaaaacaattaataatgttaaatatagacaaaaaagccataatatagaaatatttgtcgaaaaaatgattaattcaaacaaaaaatgttaataaaataaagaaccgaaaaattttaaaaaaagtttttttttgctggactttttgggtaaaatcgattaaaatatacgtgtaatcaaacgaaagacggaatgccttccgtgtggttaccttctatagctcatcattttcccccttatcatataatgggtcgggcacagtttctgcaaagaaactgtgcccgattcattttatcgcagaataaaaggaccgcgaagaattatccttcgcggtccttttcattttccgaacacctcttcggcgatctttacgctcgcgttggcgtccttggcgtaaaagtcggcgccgatctttttcgcgtactcttcgctgagcaccgcgccgccgaccatcaccttacagcgcgggcacgccgcgcggagcagtcggatcgtttcttccatattgggcacggtcgtcgtcatcagcgcggaaagtccgcaaaggcgcacgttttgcttgcggcaggtttccgcgaccagttcgcagggcacgtttttacccagatcgagaatggcgtagccgtaattttccaaaaccgtcttgacgatgtttttgccgatgtcgtgcacgtcgccctgtacggtggcgagcacgatggttccccgatttgcgctttcgccccctttgaagtgcagtttcacctcttcgaaacatccctttgcgctctccgccgcggcgatgagttggggcaggaacaatttcccgctctcgaacagatctcccactttattgagcgcggggatcagaaattcgttgatgacggcaagcggttcgcgttcctttaaaagttccgccgttgccgcgcgggcgcggggcaggcccttttcgatacagtaaaatatatcccgctccgccttgccgtccgaaaggggcgcgctcttttgcgcgggttcgggagcggctgcgaacatttgcgtaaaggcggcgcagttggtatcccgtcccgtcagcacgttgaacgccgcgaccgcctgcctgttttcggcgacgttcgggtttaaaatgggcagatccagccccgcgtacagggcggcgagaaggaacgcgtggttgacgacggggcgggcggggagcccgaaggaaatgttgctcacccccagcaccgtctttacgttatggcggcgcttgatctcggcgatcgccgccagcgtttctttcgcctgcgcctgttcggcgctcacggtcagggtaagacagtcgatgtacacgtcctcttcggggatgccgtattctttggcgcgcgcgatgatcttttccgcgatggcgacgcgctccgcgcacgttttcgggatccctttttcgtctatggtcagccccacgacggcggcgccgtagcgcgcgacgtgggggaggatcgcgtccatcaccttatcctcgccgttgacggagtttacgatcgccttgccgcaataataacggagcgccttttctatggcgtccgccttgccgcaatcgatctggaggggaaggtcggtcaccgtctgcaaatgcctgacgattttgacgagcgtctttgtttcgtcgatctcgggcagccccgcgttcacgtccagaatttccgcgcccgcctccgcctgttcgagcgcctggcgggaaatgaaatccgtgtcgcccgtaagtagcgccgctttcatcgcctttttgcccgtgggattgatgcgctctccgatcaccttcacgccgtcgacgacgacgcgctttctcgccgaacacaccgcggatacgcgtctgaacggcgtcggctgcggtttggcagcgtccgcgatctctcgcagtttacggatatattcgggcgtggtgccgcagcagccgcccacgatgcgcacgcccttttcgataaacccttcacacgcgcgcgcaaattcgtccgcgctcacgttgtaatttcccgccgcgtcgggaagtcccgcgtttgcctgcatgataacgggcttgtcggtaaactccagaatcttttccgcgacgggcagaagttgtgcgggaccgagcgagcagttcacgccgatcgcgtccgcgagcggcgaggcggtcagcgcgtagcaaaccgcgtcgcagcccataaaggtgcgcaggttctgttcgaaggtcatcgaggcgatcacggggagatcgctgtgctccctcgccgccagaagggcggctttcagttcgtaaagatcggtcatggtttcgaggaggatcaaatcagcgccctcttttcccgcctcgacggcgtgcgcgaaaatatcgtacgcctcgtcgaaggtcatgggacccgcaggctccatgagttttcccacggggcctaaatcgagcgcgacgaacttgtccttcgcagcctcgcgcgccagtttcacgcccgcgcggatgagttttccggaaagttcataacttcccgctttgtaggcgttcgcgccgaaggtatccgccgagatcacgtccgcgcccgcggcggcgtattggcggtggatctttaaaacgagatcgggcctttcgatattgacgagttcgggaagggtgccgacgctcgtttctctttgcagcatggtgccgaaagcgccgtcgaacacgacgatattctcttgtaaaaaatctttaaatcgcatggatcattcctttctgtaagcgcagccgccgtgcttgcagtttccgcacttattgccgcacccgtgttttttttcgggcgcgctttgctttgtcacgccgatgagcgccgtcaccgatttctgcggggacaagagaaaactttcgtccgagcacaggccgatcttggtgtcggcggaaagaagccgcaggatcttcggctgggcggaaaggggaaaatccccgtatccgcaggaaaagcgttcggtcagggcgaatgtttcgcccgcttgcagatcctcgcagatctcgtccgcataactttctacggcgcaggtcgcggcgctgtctaaaagcagggcgtcgttcgcctttcccgccgcgaacaggcgcgagatttcccgctccgcgtccgcgcctacggtcgcggcgaacagatacagttccgtacagcccgcaagatgcgcggcgacgtcttgtccctccaaagcgaaatctcccgcgatgcgcatatcggggccgattgcgaattttttcaccacgcagcgcggccgcgcgagttccatgcagcgtttcgccgcctcttcgagtttgttttgcagggtttcgtcgaattcctgtcccttccagccgaggtaacggagaagttcggtttgccgtatttccatataattattgttggttgagttcgccgaggatatacccgatattctcggttattttgcgcgccacataggtattgttcatcacgtacaggtgcacgcccgccgcgcccgaagtcaaaagatcgatgatctgttcggtggcataggcgatacccgcctccatcagcgcttcgggtttgtcgtaaaagcgggagatcatgcgcgagatcttcgcggggatcttgccgcccgaaagcgccacgatgcggtcgacgtgattttttttcacgagcggcatcacgcccgcctgtactggcacgtcgatgcccgccacgccgcacaattccataaagcggaaaaagtcctcgttgtcgaaaaagagttgcgtattgagatggctcacgcccgcgtccactttgattttcaaattgcggatatcctcgcgcacgttttcgctctcgggatgcccttcgggatagcacgccgccgcgatatcgaacgcatagccctgcgcgcggataaaggaaacgagatcgctcgcgtagcggaaatcgggcgagagagggcgcccctcgatgcggtcgccgcgcagagcgagtatgttttgcacgccgtttcgggaaagttccgcaagcgccgcttccacggcggctttgtccgaatgcaggcaggtcacgtgcgccagcggctccacgccgcactctttcacgagtttggcgatgcccgccgtgcccgcgttgttcgagccgcccgccgagcaggttacggaaatgtaatcgggcgaaagggcggaaagttcgcgtatggtattttgcacggcggaaagttccgccgtaggcttgggcggaaatatctcgaaggaatagaccgcttttttattttgaaacagtttcgaaaggatcattgtaaaaactccccgtgcgaaaaaagtcgcactatatatacattatactaaaaaggtcgaaaacgtgcaaatagtttgaagatttgttcttaatttattttcaggcgcatacagtaaaatatatctttcgttcgggaggaattattatgagtgaacggatcgactatgcggaaatgctggaaatacccgtcagcaccgtcaacgtagtcagaaaaaaaagcaagaagaagcgcgccgagacggacgatctgaaagaccaggtcgtcaaagccgtcaacgagcgcgtgagcgagggggacttttccgaagaaaaaagcgaagaagtgctctctgaaacgcggtacgccgcgagcgaggatctttccgaggaatacgacctcgaagagcccgacgccgcgcccgtcaaagttaagggcaaatttttcgacagtaaaattttgctcgcgcagttcgtcgccgtgctggcgctcgccgcgaccatctttcttaccaacattttctggaaagagagcgccatcaatacctttttcgcgggacttttgaatccgaccgaccaatcgcagtcggtggacgacgaccgtatctattcgcagttgaccatgggctcggtcgtttccgacgatgacatcacctgcaccgtgtccgatacgggcgtgctctccttcacgggcgaatgcagcgtctatacgccctgcgacggcaagatcgtttccgtcacggaaaaagacggtctgtacacggtgaagatcgagcataccaagtcattctccacggaaatttccaatctttccacggcgtatttcgccgcgggcgacaaggtgttttccactattcccgtgggctatacgaagggcgcgtcccccgtttccgtttccatgttcgacaacgggaatctgatcaaatcctatacggtcaacgaggcaaacgatattatttggaacgtgtaagccataaagagcggttttatttcacgatacatccgctctttctcctgttcggcgttttttacgcgctgaccggacggttttttctgtttctgacgtacacgctgacggctgtcatgcacgaattcgcgcacgccgccgccgcggcacgggtggggtaccgcttacgccgcatcgttttaatgccgtacggcgcgatcatccgcggcgatctggaaggcatctctttcaaagacgaaattttcgtcgcgctcgcgggtccgctcgccaacgccgcggcggcgctcggctttatcgcgctgtggtggctgtttcccgacgcctatccctacacggacacggcggcgttcgcctcgctcgggattgcggccgtcaacgtactgcccgcctatcccctcgacgggggcagggtgcttttctgcgcgctcgccaaaaaaaagggggaaactttcgcgcgcaagttgtgccgcgccgtcagcctcgtcatcggcgccgcctttttggggttgttcgtgtacggctgttttatcgaagtcaatttttctatgctctttttcgcctcgttcatcatagcgggcgcgttcggcggcaacggttgccgctacgacaggatccgctatgacgtcacgcggacgctcgcgcggggggcggagatcaaacgggtggccgtgttggaaagttgtcaggtcaaaaaaatcatcggatatatggaacggggcagggtcctggaactgtgcgtctattcggacggcggcgaacttctggagatcctcgacgaaaacgagatcgtggaacttctggaacgcgccgacctctacgcgcccctctcggagtgcctgaaaagtcctgtctgatcaaaaaaagcgccgatttttcgcgctttttttattttgctcttgcaaagcgtgtatttgtgtgttaaaataatagacggcaatgctcgatacggatacgcaccttttgttttgtttaattttaacggcgcgcgcggcgcgcggggatttttgatagatgaagaggaatatgtactttgactacttcggcgacgactgtttcgcggcgctgaccgaaggggacgaactcgtcgagtttcatctcgatgcgggggaccagagcgaaatttcgggcaacatttacaagggaagggtcgtgaacgtgctcaacggaatgcaggcggcgttcgtctgtttcgggcaggcgaaaaacggctatctgtacgcgggcgatatgcccgcagaggccgccgccgcaaattccgactcgcgtctgaacgtgaagatcggcgacgaagtgatggtgcaggtgaccaagtcccccatggggaccaagggcgcgcggctgagcatgaacgtatcctttgtggggaaaaacctcatttatcttcccgccacgccctttttgggcgtttcgcgcaagatctgcgaggaagaggagcgcgaacgccttctggaatgcgcgaaaaaactcgctttcgagggcggcgggctgatcatgcgcacccactcgcgcgcggcgaatttccgccagctgaaaaacgaagcgaaatatttgcgggagatctatctttccgcgctggaaacatataaaaacgcggaagtgggcgacctcgtttaccgcgccgcggacgcgcatatcaaacttctgcgcgacgtagatgtggacggcatcgacaagatttatgtagcggacgaagcctcttacaaaaaagtcgaaaggctgttgaagacgatcagccagaaaaacaaattggtgcgctatactggcgcgcgggaaatgtttgcgcagttcgggctggaagaggagatatataaactggtcaagagccgcgtggaactgaaaagcggcgcgtacctgtgtttcgacaagacggaggcgctcaccgcgatcgacgtgaacacgggaagttttacgggcgaaaacaacctcgaagacacggtgttcgccacaaatatattggcggcgcgcgagatcgcgcggcaggtgcgccttcgcaatatcggcggcatcgtggtcgtggattttattgatatgcagagcgaggagcaccgcgcggctgtcatttcggaactggaaaacgccctcaaagaggacagagcaaagtgcaacgttgtgggcatgagcgctttggggctcgtgcagttcacgcgtaaaaaggaaaaaaaggacaatttgtccctcatcacgaaaccctgcccctactgcaaggggagcggcagcgttctgtccgactcctatctcgcctaccgcatcaagatcgccatcaaagatctgttcgcgcgcggctacgaaaacgcgatcgtcgaactcaacgcgggtatttttgccatgatcgtcggaaaacattatttttctggcgccgtcgcgggcgaatggcgttcgaaacgcatctacatgatcccgcacaagacctttcatgaagaatactttaccgtgcgcggcgacaacaacaccgttttgaccttgcccgacaacgcgcaacttttatattgaattgaaagaaaaccgcattcctgcaaaggaatgcggtttttttatgttgcctgcgccgcggaaaagcaaaaatccgcccgttcgcatagaatgtaatgattttctttttgcgggagggcaggcatttgcaaaataaattccccaacgttcggtttctcgcgcccgatcgggtattcgtttcggaggaagcgacgatcggcgacggcgcaatcatctatcccgataactacatatacggccgcacggtcatcgaggcgggcgcggtcctgcgccccgaaaatatattggaggacgcctttgtcggcgcgggttccgagatcgaaaagagcgtgctgcgcggcgcgcgcgtcggcaaaaactgtacggtgggtccgttcgcccacctcagaaagggcgcaaacgtaggcgataactgccgcgtgggagatttcgtggagatcaaaaattccgtcgtgggcgcgggtaccaaagtgagccacctcgcctacgtgggcgacgcggacgtgggcgaaaactgcaatatcggctgcggcgtcgtgttctgcaattacgacggcaagaacaaacaccgcacgcgcgtcggcaacaactgctttataggcagcaacgtcaacctcatcgcgcccgtggagatcgcggacggcgcgttcgtcgcggcgggaaccacggtcacggagggcgcgggcaagggcgatttcgtgatcggccgcgtgcgccagcagatccgcgcaggcggcgcgaaacgttatttgggaggagaagaaaaatgagcgacagattcggaacggacgggatccgcggcgtcgtcaacgaaagtctgacttcccgcacggcgttcgcgctcggaaacgcgctttgcagactgtacgcaaagccgaccgtttttatcgcgcgcgataaccgcgtttcctcggatatgctcatgctcgccattgcggcgggcgtgacggtgggcggcggaaacgtcctcgacggcggcgttcttcccaccgccgcgtgcgcgtatctcacaaagcgccacgccgccgattgcggcgtgatgatcagcgcctcgcacaatccgcccgaattcaacggcatcaaggtgttcgacggcgcggggtgcaaattcgacgaaaaactcgaacgccgcctggaaaaatattttatcgaccgcctgttcgcgccctctctgtcggtagggcgctacgaatacgtgcacgaggcgggcgaagaataccttcgtcacctcggcggcgcgtgttcgcgggggctggaaggattgcatttcgtgctcgactgcgccaacggcgcggcttccgcctttgcgcccgccgcgttcgagcggctgggcgcaaaagtgaccgcgtgcaatatcaagacggacggcctttccgtcaacgacaactgcggcgcgctctatcccgaacacctttcggaattggtcgcgcgcctccgcgccgacgcgggcttttgctacgacggcgacgccgaccgattgatcgcggtggacgaaaagggcaacgttgtggacggcgaccgcatcatctgtatatttgccgacaaactgaaaaaacaggggaaactgacgggcggtctggcagtgggcacggtgcacaccaatacgggcgcggaagtctggctggcggcgcgcgggatcacgctcgcgcgcacggatatcggcgataagtacgtcgcggaatatatgcgcgcgcacggcgcggcggtgggcggcgagcagtcgggacacgtgatcttatccgaatacgccaccacgggcgacggcattttaacttctttaaaacttgccgaacttctgacggatacgcccctttccgcgctttcggatattcggctatatccccaatacaacgtgagcgtgcgcgtcaaagacaaggtgcgcgtgctcggcgacgagggcgtgagcaacgtggtgcgggaatgcgccaaccgcctgaataagggcaggctggtcgtgcgcgcgtcaggcaccgagcccgtcatccgcatctttgcggaggcggaaaacttgcaggacgcgaagggcgcggcggagcgcgtacgccgcgcgatcgcgcagttgaaggagtaaaaatatgtgcggaatcatcggatgcgtgcagcgcgggggcgattgctggccccgcgtgtacgacgggctcaaacggctgtaataccgcggctacgactccgtgggcgtggcggtactcgatcagaacgccatcggcatacgcaagaaaaagggcggtgcggatgcgcttgcggacgcatatctgaaaggcggcgcgggcatcgggcacacgcgctgggcgacgcacggcgcgccgtcggacgaaaacgcccatccgcacgcggcgggcaaattcgcgctcgtgcataacggcatcgtggaaaacttcgccgcgctgaaagaagaattggtcgcggcgggagaggtctttctttccgaaacggacagcgaagtgatcgtaaaactcatttcgcgcgcctatacgggggattttctgcgcgcggtgcgcgacgggtgcgcgcggctggaaggctcctatgccatcgccgttttatgcgaagattttcccgataccgtcgtctgcgccaaatgcaaaagcccgctcgtcgcgggcacgggcgcggacggcgtgtacgtgtgcagcgatatccccgccctttcgggcgtgtgcggctcgatctgccccgcgtcggacggggaactcatctgtcttgtcggacagcgcgtgctgttttacgattttaacctgaacgcggtcgacaagacgttcacgccctccgacggcggctccgccgtgcgcgaaaggggcgcgtttacaagttatatggaagaggagatcgcggatatcccccgcgccctgtcggatacgtacgccgccctgaaaggcatggatttcaccgcctgcgcgcgaaaactcgcggcggcggagcgcatcttcgcggtcgcctgcggcactgcgttccactccaccctctcctttcgtttcgtcgcggaaaaatgcctcggtgtgcccgttatctgcgaacgggcgagcgaattccgctataagacgcggctgattcaaaaagacgacgttctcgtcgcggtcagccagagcggagagaccgccgataccgcggaggcggtcaaacgcgcgaaagccgcgggcgcgtacgtcgtttcggtcacgaacgtgcgtcattcgaccatcgcggcgctgtcggataccaacgtgcccatgcgcgccaacgccgagatcgcggtcgccgcgacaaaaagttacaactgtcaactcatgtgcctcttcacgctcgccgccgaggcttgctgcaaaaaaacgggcgtatatccctccttttattacgatctgcccgcgctgtcgttcgcggcgcgcgaagcgttttcctgttttcccgaagtggacgcgctcgcgtcgcggctcaaagaaaaatcggcgatgtattttctggggcgcgacgcggacttcgttaccgccgtcgagggcgccttgaaggtcaaagagatcgcctacgtgttcagcgaggggtatcccgcgggcgaactcaaacacggcacgctcgcgctcgtcgaaaagggctttcccgtcatcgccatcgtcacgcagaaatcgctggcgaaaaagacggaaaacgccgtggcggaagtcatcgctcgcggcggatacgtggcgctcttttcgccgttcgaaagcgttttgaaggagagcgcggcgcagttttgctgcaagatccccgccgtgcgtgaagaactcgcgggcgccgtttccgtcatacccttgcagtattttgccctcagaatgtgccaactgcgggggcacgatc

SEQ ID NO: 3565 - DNA, 1996 bp, Unknown
  16S sequences of unknown bacteria
ctaccagaggcagcagaatgacagcgatcatattaaattcaattggcatatttcaaaatcctccagggctgctcagcgttcgacaaagcccacttttttgtagaccttgcgcagtgttttgcctgccacataggccgcgcgctccgccccggcgcggtaaatcccctccagatatgttttatcggcaagaatacgctccgtctcctcgcggatgggacgcagcgtttccaccacggcttctcctacagcgcccttgaattcgccgtatccccggcctgcaaactccgcctcgatggcatcgaacgtttttccggtgcatacagcatagatctgcatcaaattcgagacgccgggcttctgttccggatcaaaacgcacgcaggcttccgaatctgtgaccgcctttttgaatttgcgcaaaatgtcctcgggccgctccagcatatacacgcagccattctggtctttatcggatttactcattttgttttccggactggtgagactcatgactcgtgcacccaccttgggaatatacggttctggcagtttgaacacatcgccgtagatcccgttgaaccgggtagcaatatcgcggcagatctccacgtgctgcttctgatccccgcccacgggaaccagatccgcctgatacagcaggatatccgccgccatcagcgcaggataggtaaagagtccggcattgatattgtcagcgttcctggcgctcttatccttgaactgggtcatgcggctcagctcgccgaacatggtgtagcaatccagcacccaccccagctgtgcatgggccggtacatgggactgaataaacagcacatttttttccgggtccagtccgcaggcgatatagaccgccagctgcgtcagcgtgcggcggcgcaaatcggcaggcatttggcgcaccgtaatggtgtgcatgtccgccagcatatagtagcagtcgtattcctccgccagcgctgcccagtttttaattgcaccgagataagatcccagcgtcagatcgcccgatggctggataccgcttaaaattcgttttttctgtacttcttccatggtgatatacctccacagcgggagcattgtgctcccggatctcttttgttgttatttctgtaaaaaatcccgcagcaccgcacccatgcgggcgacgccttcgtcaatctcctgaagcgaaggcaccgaaaaattcatccgcagtccccgatcgttttcaatattatcggcaaaaaacggcttgcccggcaccgccgccacgccggcggcagtggtacgctggtgcagttccatgccgctgcagccttccggcaatgtgatccacaggaacaggccgccctccgggcgcgtaacagccacttcagcaggaaaataccgttcaatggccataagcatagcatcgcgcttcacgcgataatggtcgcagcactgccggatatgcgcatccaaatcgtaccgtgtcaaatattcgtacaccagcacctgagagagcatattggtatgcacgtccacacactgcttggccacaaccattttagccatcagctctttcggcgcacacagataagccactcggatacctggcgcaatgattttggaaaaagagccggtgtagattacccgctcgcttcggtccagcgttttaatggcgtccaccggcgtaccggaatagcgcagcctgccgtagggatcatcttccaggatcatcacatcgtactgctccgccagatcatacatccgtctgcggcgcgctgcgctcagcgtcacccccatgggattctggaaatttggaatcgtataaatgaacttcacgctcttctccagccgcaaagcctgctccagcgcgtccatatccatgccctcgccatccataggcacacccactatgcgggcgccataggtacggaacgtgttcagggcattcagaaaagtgggagcttccgtcaaaacggtatcgccgtcgttcagcaggcacttg

SEQ ID NO: 3566 - DNA, 3126 bp, Unknown
  16S sequences of unknown bacteria
cccgcgccatttttctttgtgccgctgccactgccgctgtgaccgctgccgccgccgtggaatccggaaccgaaacgtttatgttcacgctcgtaaaggggggggccgtgctccggagtatgtaccggctcggcctggacatagggggggcgctgcgtgctctggggttccggagggggctgctgcgggttgctctggggaaaagtttcccgtgcgccggcgccgctgcggtatgcgctgctttccggcgcgggggtattccagtggtaggcttcgtttgcgttctggtcgccgtttggtttgctgttttgcgctttgttctccttgttatgttcatcgtacatgatccgggcctccttcaagttccttccaatgcaggagggagcggcgcaaatgctgcgcgctgcgtttcttaccgtcctgcgatggtgatattgtatcgcgcatttgtgtctaaagtgtgaagaatttatgcatatttttcaaacaaattttaaagtgagacacagcggaggcatccaatgatgcctccgctgcattgtgtgggaaaaccgtggcggacagttccgatcagttctgtttttggatcaggcgaatcatgcgccaggtggaatcgattaccagaatgccgatggccagagcgcccgccatggccagggtatgcaggccctcggtgatgaaagcgccggtgttgccctgaatgcagtattccatcgtgtgatagatgcctgcgccgggtaccatggggataatgccgatgaggaggtatgtggtcacggtgcgcttctgcacccgggccagcacttcggcataggcggccactaccgcagcgctgacaaagccggcgaacacatccggaaacgccagcagagtaatcagataagcgagccagcccaacgcgccgccggcggcggcccagaacagaggtgcgcgcccgtggaggttatagagtccgccaaagccgaggctggcaatgaaggcgtacagtaccggcaggaaataagtccaatccattgctttaccctccttaaatcagcgccagcacgatgccggtgcccagggcgatgcccgtggcaatcagcagcgcttccaccagctttgtaatgcccgtcagccagtcgcccacaatgatttcgcgcatgaagttggtaatcatcacaccgggcagtagcgtcatgaatacgccgatgatgatttcgctgcgatgcacgccaaagccgagaaagacgaaaaagcatgccagcagtgcgctgagggcgctggccaagatgcttttataaaaaaggttcgtatccagcttgcccatgccgtacatggccacagccaccgcgcagccaattacggctgctgcagcgctgtccagcgcatttccgccccaaaacagggcgaagccggctgaacccactgcgtaggaaagtatttgaaggggaagggaatactgcggggcgctttcgatttcatcgagccggcgcaggatttcttcggttgcggggcattcctgagcaatggagcggcacaaagcattcagtgcattcagtttttcgagatccacacttttcatgctggaggcgcgggacatacaggagtgggttacgccatcctgatcggtcagatcgatatgcaggtagtttggaatcgagaatacatggcagctgcccagatcgtaggcttcgatcacataatgcacggaattttccacccggtacgcttcagcgccggattccagcagcccgcggccaatgcgggatgcgatttgcagtaattcttcacaggtcatggcgcttcctcccggaggataggttttttcggggcgcagcgttgacggcccagatcccggcgcataccagggccagagcggccagtgtggtccagcccagcagctgcgcgccttcccgcagcagcagcgctgagagcgccgcgccgaacaccggcgtcataaaactgaatacggtgacgcgggatacaggattgtatttcagcaaaatgccccacagggaataggctactgcactgatgcacgcaagatacagcagcatcagtcctgccgggggagcgagaggggcgatccggccgccgcacagaaggcttccggccatcatcactgcgccgcccacggcaaattgccagccggagagcagcaccgggtcgtcctcggcactatagcgtttcagaaagacagaagaaaaagcgtaagagatgctggaaaggaaaacaaagccctcgcctgtgatctgaaaggtaccgtccagaccgccttgacccagattgaccagcactacgccggaaaagcccagcacgcagcccagcagtttgcgccctgtcagcgtttcctgccggaaaagcagtgcggcaatcagcagtgcggcaaaggcgttggaagcgccgatgatggaaccttttacgccggtggtgtgggccaggccgatgtaaaaaaagatgtattgaaagatggtctgcagcaggctcagatgtagaatatggcgccaagtgcgccggctgcggggcatcaaaggctttcggattgtgacagagccgatcaggatggccagaataccggcaagaaaaaaacgcgtgccggcgaacaggatcacggatggcacatgactggtatccacggaaaaaagcacatagccgattttgacgcaggggaaggcgctgccccacagagcgcagcaaataccggccagcaggcacacgatgggaagctttgtcaaaaaacaggaaggggatgggctttgtgtgctcatacgctgcctcgtttctcgcggttcagaaaatcgcggatgcggttttcgcggccggtaaaatagcggccctgccaggttccccaatggtccagtgtctgatcgataccacccagaacacgcagtttgtccgctgtccacagcggagcgatcagatcttcttttttcccgtctccggtgagccgttcgattacagtttccggcggaagcacctccaattggcagcataccagccggatatattcgtcacgggacaggggacggtacttttttctccggtacagtgtttccatcggagtgtcccggagcacgtggagcatgtggatcttcacggcttccggcctcaattggccgagataggcggcggattccagcctcatcc

SEQ ID NO: 3567 - DNA, 32759 bp, Unknown
  16S sequences of unknown bacteria
tttgagtttgttgcagggttgttataacataaaagaaattgctatgtaatttctaacagaaaagcgttaaaacgttccagcaacaatcaaaatctgtgattttgagtttgttgcagggttgttataacataaaagaaattgctatgtaatttctagaaggaaaacgtttcaacgtttatcagttaaaaattgctttgcaattttttctatgctataataatctaaaatttcgacaaaaggagattttatatggatagtatagccgaacagccgtctttaaggctggagttaggttctatggaggacttgcctaccatttttcattgtttgcaagagcaatttcctcccgatgaattttataattatgagcgtatggagcagatgatgcaccacaatcaatataaaattttattgtataaacgtggagacgacttaattggttacgctaccgtatgcagtatggtagaatctcaaaccctatggttagatttgctggctattttaccgccatatcaaaatgacggctatggaggtaaattatttgaggcaatctaccaaaaatactgtggtccgtttaacggcgttttactttgtgccgaacgtgtcgattctaaagaccctgactatgcattacagcaggaacgccgattaaaattttatgaaaagcatggcgcttaccgcttgaaaacggattttattttgcctaccaaaacaggcggtatgcacatgtatttgtattataaaccgcataaaggaatttttcatatttcacgtcgagaccaagtggaaatgataacacaaatgtttgattattgttattcgcatattaaacacgcgccgcagttgctgcacgactttaaccaaacaattgtagatgaaatatttaaagatgaacgcaaagcaaaaaaataaaggagtaaagatatgttggaccaattctggagcagcttaaaaagcggaacggatattcgcggtgttgccagcgagggcggcggatacgaaattaatttaacagatgatgtggtaaaacggatttgtaaaggttttgccatttggttggaacaaaaatttcacatgtcatctgattgtcttgtagttgcagtaggacatgactcccgtatttctgctggccgcatttcaaatgctgcgatgacagcgttatctgaaacaggagcaagagtattggattgcggattggcttctactccttctatgttttttgcaatcgaggaatttggatgtcaaggcgcaattgaaattacagcaagtcatcatccgttttatagaaacggcttgaaattttttacaaaatacggtggtttggacagcaaagatatcactgaaattttgcaatacgcacaagagaacaaaactccgcttaaaaaagaaggaattgttgaaaaaagtgattctatggacagatactgccatagattacaacgtatgattttggaaggtgtgggagccaaagaaggggaactgcctttaacaggattccatattgtagtagacgcaggtaacggagcagggggattttacgcacatcgtgtgttgaaacctttgggagcggacattacagggagtcaatttttggagccggacggtatgtttccaaaccatattccaaaccccgaagataagaacgcaatggagtcggtgtgtaaagcaactgtaaaagcaaaagcagacctaggggttatctttgatacggatgttgaccgtggaggtgccgtagacagcacaggagccgaaattaatcgcaaccgtttggttgcactggcttctgcaattgctttggagcagtgtccgggtggaacagttgtgacagattccatcacttccagtggtctaaaagtatttattgaacaacatttaggtggtaaacatcatagattcaaacgtgggtataagaatgtcattaacgaatccatccgtttaaatgaacagggaatttcttctcctcttgcaattgaaacttcaggacatgcggctttccgtgagaatcaatttttagatgacggtgcatatcttgttacaaaaattgtcattcaaatggtaaacctaaaaaaagaaggcaaacagctgcaagatttgttacagtctttacaagagccaatcgaaactgttgagttgcggttaccgattacagaaacggattttcgtagttgtggtaatcgtattattcaacagttaaataccttcgctgagaaaaaagcacattggcaaatcgcgcccgataatcatgaggggatacgctgttcctttgacaaagggaatggggatggatggtttttgttgcgcctaagtgttcacgaccctcttatgcctttaaacattgagagtaatcaaactggcggcactaaattgattgcacaagaattggaatgtttttttgaacagtgccaaggattagatattacatctatcaaagaatttatcaagtaaataattgcacaaaaaaagacctaccttattataggtaggtcttttttcccgttttcaaaattttcgacagagcgatttaggagtaatcatgaaaagggatctacatgcgtatccgtgatgttgaattttcattactttgtatttatttaatgagagagagaaaaatgggagagagtacaaaataattgaaatataatcgtgttcatcgcactaaaaccggttttgttttggtgtcataaaaacaaaactttcaagatacacgcacgctatcacagtaaggaggataccagcaatattgtatgatactgttcgtacctccttttaacacttattattttattattaataagagctaaaaggaagtgtgaatttgcaagttaatttatattttcttgcaaaaaataaattggtttttaaaaataataaagaagatatcatctatgcttaaatatatacaattttgcatttttaatataaaaagatatattcttctttatgactatgaattctattatagaccagaatcacaacaaagtcaacaaaaatttagaaaatatttttgatatttctcacaatccattttttgtaaaaaaaatatctcttttattattgagaaaaaaatagaatgatatttcatgcaataatacttatgtttattataattttacaggatttgaattatttcattcatattattgagaatatatgtcttacttacacctttttatgtgccaactgacagtttgcaaaatgaatcatgtcataaatttatgcacatttgttgcagtaaaaatatttttactgcaacaacacaatatttcattttagagatggaccgaacagtttcatattaatacaaaaaacattaccacaatattttatctatgttataataacctcaaaacagcaacaaaacaaaccttaaaaatatctttcaatattcataattttggttgttaagagagcggttttaatgttctgtcaattagaaattactttgtagtttcctgcatgttataccataatttattaaaatgaggaagtgtgaaacaaaatgaaacaattgtcaccggatgaaaagaattttatttttcaaattgcgaatcgtattcgttatcctatcgtaagactggagttaagaagctcaaaggaacgttctttaatatcaactgcattaaaccatgtgcatttagagacaaaatatgatagcatggaaattgtcaaacaacgtgcatccgttttacaatctttatgtgaaaaaggtttcataaaaataagttataaagtttttattaccgtccaatctgattacgcaatatatgaggtcagcgatatctttttattgttacatcagttagtggagcaaggaaagaaaaatccggattatttatttgatataccttatatcaaacgaggacaggttatgttaactgaaatgggcaagtcttatgtcgcacaagataatctaaatcgttaatatttaacattttctatgtgatattttgcagaaatcttgtataaaacgtgttcttatgttaaaatatagatagatttaagagatatgggggaatgtcaatggaatggtattatgcactgattattgcggttttagcggtaggggtgattggagctcttatttatgttcgtacaaaagtttctaagaatgttattaagcatgtacgtgcaaaattggctcgtacagaaacagaacgttcagaatttgagggaccagatgggaaaatctattcgaaaataactgctatggttttagtatttttggtagaagatggaactgaattgaaatttgctgttaacaataagatgaaaggcagagtacaagagcaacagtgggggtatttaatgtattgcggagataagctgcttaaatttgaatgtaaacaaggcaaaataggtatgaaacgttatttgaatgacggtattctaaaatctaaatattttcgttcttaatattagaccaaaacaatccggcattatcgtatgaaaagcattttcctaataatatacgttaatttgaatttccgcatataacttatttggattaggatgcattttctaattgtgattaacatatacagtactgtaaaagcatatgggggctcaatgcaaattgagaatgtttttggggattgttaaaaataaaaagcagtttacataattttgattttttgttttaaataaaattaaaaagtctaaagttttatttttgatattttgtactgaatatgttgtcaatataattgattgccagagggcagtggggagtattgatgggctgtgaaatataaatgtactgaagtaacaagaaataaaattaaaagagcatttttggagttaacaaatatcaaacctgcgaataagatttttgtaaaagaaatcatccaggtagcaggtatctcacgagcatgcttttatgtgcattatgaaaatatagcggcattgattcatgagataggcaatgatactgtaaaaagtattatggaaataacagaagagaaaaaatatacagcagatatgtcacgcgaaattgcatgtaatcgtgcattggcacagtatgtacaagaaaataaaaagaccgtatctattttaatgagtgagtacggagatcctgattttttaaaagaatggcatatccatgtgaaaaaacaagttttattgcgtttggaaaaggatcatattccaattaatcatgatatagaggatatggtagaatttgcaatgaaccgtgtttttgataccatactgcaaaatctggatgatccttttgatgaagtattcaaagcgttaaatatcatggataaatttatgctttgtttggtggtaagtacacattacagcagattaaagttataataaaaaacggtaccattaggtaccgttttttattgtttgatttttatatccgtttgcttttgggataggcgggtttgccaaatttaaccgaattaaagctttataaatgccgtcgtcaaaaatagaatctgttacaaaatccgcagcttgtttcgcctcttctgtcccattgcccatggcaatgccgcaatggactaattttaacatagatacatcgttatttccgtctccaaaggcaatcgtatctttcaggtcgatatttgcatgtttggtcaacagtcgaatggcatttcctttatcatttcctacaaatgccaaatcagcagaagcattccccctatgtctgtttagtatcatgctgccgtcaaatgcagttttacagcggtcaaattcttcttccgtatcaaacataaactcaaggctgtttgcagttacatcaccgggattccattctgtctttgcaaaatcattcattccatatatgcggttaaaatagcgaatagagtccgggtccatatttctgcaccaagcacaaacttttccaatgaacgcataccgtgcttttacattatcaaaatgcttcatcagataagatacttcttcgtgagaaaaaattctatcgtaaatgatatctccttgataaacaatgtgagaaccgttcatagtaatataactttcaaagatattaggaaaatattttttcaaaaaggcctcgtgtctgccggtacaagcaatgatttggtgtccctgttgctttaacaattgaagtgcttgccgattactgtttggaatggtaaatggtttattgtgccaacaatccaataaggttccgtcaatatcgaaaaaaattgtttttttctgcacgtattttcatcctttctatattgtgcctctttctatagtataccttgcataatgatatgctattagggaaaagatagtcactgaggtgaaatttatggaattcttaatcgcatttgttgttggaggtcttatttgtgtggtcggtcagctattaattgattttaccaaattgacacctgccagaattttagttctttttgttactttgggagtatttctaacagctgttggtttgtatgaaccattggttaacttcgcgggagcaggtgctacagtgccattaacaggttttggatatacacttgcaaaaggtacaatggaagccgttgaaagtttaggttttctgggtgcttttacaggtggtgttacagctgccgcagccggaattggagcagcagtattttttggttatattgcagcattatgcgcaaaaccatcggataaaggataaaaaacaaatgcgagtaggcataatacctactcgcattgtttttatagattactggatagagcaatctaagtagtgctcaagatcctcttcgtctttctttttcttttcaagataaactacaacagctgctacagttgccgcgacaacagctgccaaagacagaattccgattagccagcgaaatttattgcaatgtttcatttatagagcacctccaataattataaatctgtgtttaagtatatgatacccaaaaatattgaaaaagtcaacctatccacataatttgtcatggagaaaaaaggaagtaaaaactaggaaatttttaggctttgctacagtccttgtcattacaaaatgcaaaaagcagagccctcggctctgcttttgtgttatgcatagcaattatgcgttaacagcgttaagcttttgtgcaagcgcagatttttttctggcagcagtattcttatgaagaataccttttgcagtagctttatcaattgctctgattgcaactttaacagcctcagctgtatttgcgtctttattttcaagtgcaatgtttgcttttttaatatcagttttcaaagctgtgttaattgctttatttctaagagttttagtagcaatcacttttacgcgtttttttgcggatttaatgttaggcataattccacctccttatatatttgttcacgtacagataataataacatggacatgctaaaaaagcaatatatttttgcttttatccatagattttttaacagaatgattataacagaaaaggagtcagattgcaaatgttttttcgtacagacttagcattggaattaaaagaaggcggacaatccgaattgtcggatgtaccttgtaaaatcaaagagaaggactgctgtaaaattagtcatattacggttccgtgtcatataaaagatacaggtatggcaccgggagaatacattaccattgaaatgcctcctttaagcgatgcattagacgaaaacaatcggtttttacaggtcgtttcagatgaaattaaaccttttttacctgaaaacggcgaagtgctggtagcaggtttagggaatgctgcaattactccggacgctttgggagaaaaggtaattgcacaaatattggcaacccgccatgtaaaaaaggaactggagcgtattacagggatatcggagctccgttcggtagcggctgtaagcacagatgtattgggaaatacaggaatggaaacagcagaaattttaaaaggcttaacacagcaattaagacccaaagctgtgattgtaattgatgcaatggccgccagaagtttagaaagattgggcaaaacagtgcaaatcagtacagcaggaattgcaccgggagcaggtgttggaaaccgcagaccgcaaatagatcaggcattattgggtgttcccgtgatatctgttggagtacctacggtggtagatgctgcaacagttgctgtggatttacttggagaagaacatgtaacagatgaagaaaaagagaagctcagagaaatggtaagcccaaacggagctgctatgtttgttacccccagagaaattgatttgttgatacaacgcggggccagaatgattggtatggcaattaatgctgcgttaaatccttgttttaccgtcaatgattttgaacttttaacaaaataaaagcctcgacagaaaccgccgtattttattcaataatattaatataatgatagaaacgaaaaataatagaattctagtattacaggaatgtataaaaataggaggtaggcggttgcagtgaaacacttcgggaggttgtttatggtcatagaaacaaaacgcggaagaaaactgttgctgcgggtaggcgctgttttagttaccaccgttgcagtagcttgtttttctattcgtcttgtaccggcattgttgtctaaccagaacaatacagcgttaacagccgcagggtttattatgcctgacggagctgtagaggtgatgaaaaatggatatgacgatgcatactttagcgtgtcagaagtagaagaaatggtttctcaggcgtcttctgtaccggaaattacagaaagtaccgttacatctgaagaaacggttgggcagtcatcctcagaagcgtatgtgcctcctgagccggattatacggtatatgaagggacagcataccctattaacgaaatgcagattgcaaatgtaggattaaaatatgagaatattacagttcgcaacgatacagattatgaactggatattgcacaagagttgggactttcacctgatgtaaaaattaaaaaagacggaacaccgcaagtactaatttatcatacccatacgggagaatcctttttaaaaacggaaatgcctaatttttattccagtttagatacacgctccagagatgagaatttaaacgtaattgcggtgggcaatgaaattacaaagaaactggaagaggcaggcataggagtcatacatgatacaacgattcatgatgacccttatacaggcgcatataatcgctcatgggaaacgattcaacgtaatttaaatgaaaatccgaccattcaagttacaatagacgttcatcgcgacgcattgggaggagaatctaccagaatcaaacctacaactgtgattaatggcagaaaagcagcgcaaattatgattttatccggctatgacggtgatggttccctaggttttccggattgggaactaaatttacgtttggcattacggttgcagcaaaactgtgcaaatattgaacaatcctttatccggcctctcaattttacaaatagtcgttataatatgaatgcaacacatggttcattgttggtagagttcggtacagaagtgaataccattgatgaagtaaaatattcggggcagctgtttggagatgcactggtaaaaacgttggaatcgcttatgtaggtgatgtatttatatcctctttacaatagatttgcaattgttcaaagaaagttaaaggaatgtgtcaaaatttttgctataatctgttataatagaaaaagtatgtatacacaaaagtataacaccagataagtgatgaggaatataaatgaaattagccagagggattgtatccattctaatgtttatgctattgttttcgtttatgagcttaccggtatttgcaatgcagacgcagagtaatggaagaaccggaagttcagagcaatccagcgtcggttcgaaacaaaatgtgtcaggaactatggaaacaggcagtgaggaaacaacgtctgtttcatctgaggattctacctcacaagataacagcctttctcaaagcagtgagatttctcttccggaagtttctgtagacagtgaggctgcaggtattatttcaaagggaaccgatgtaacgccatccaataccacacaaacttggttgggagttgtattctggatttgtattgcaattggtattttaattgttgttgtggtgattgtggcggcaaccagaaaacctccaaaaggaggaaccggtaaaaagagatatgagcgaaaacctatgacgccaaaaggcaaacgaattttgaatgaaaagtattatcgcaacattaagaaataatgcaataaaaagaggggtaaataaaatacccctcttttttatttatatttatgtttcaagttcgttgtaaaaatgacctaacatatcttttaaatcaatttcaagtatcaaacagaaacatgccagttcgtagtctgttacaaatctggcgttattttctattttactaatcatttgttgatccatgttcacattcatggtctgcattttagcggcaagttggctttgagataagttctttttcattctgtaaatttttaagttggtgctgataatatttttattctttccgtaaataattttcttcatgttgaacgctccacgtctatataacgtattttacttgactttagcatatgtttttcaatgaaatacgttatataaacgtaatttgatgaagctgatttaaaataatgatgtttgtttattcattcggtaaaaaatatgagataattgaatggttcatcaagtattatgttatacagtacttatttttatatcagaaagtttattttcatgttgagaaattacagaaataatgatatttataggagtagttctatcaaacaggcaatagtgaaaaattttaacatatagaggttgaaaaacactgatattatttattgcaaatatagattattttatacattttttctaaaaataggaagtgagagataacatataaccagatatttaaaaagaggtaattgtaaaattacaattacctcttttgattgttcatatgacgaaaagattaggaacttttcttttgttgtgatgtttccatagatgtatctacatttaaatcggttaattgaattggggtatcagaaaatcctaatataaaatcggcactgacattgtagtacttgcatagtttaatcaaacaatcaatcgtcatgtgtctgcgttttttctcccaatgtcctacggtagaatcagacacatcacataaaagggcaatatctttttgcccctttttattttgtatacgcagttcttttaatctatcgcgataatccatggtatcacctctttgaaaagattataacataaaagaaattgaatcacaatttctaacaaataaacgttacaacgttcttaacaacaaacaaaatttctaattttgaatttgttgaaaggttgttataacataaaagaaattgaatcacaatttctaacaaataaatgttacaacgttcttaattaacaaacaaaatttctaattttggaaaagttgctataacatagatgatttaaagcatttcctaacggaaaaattttcattttgctaccaataggaaagtgtgataacaatattaatttgcccagtaattttataagacaaactaccttataaaacattataaatgttaacataatatttataaaaaaactatctaaaaggtgattataattaacaacgttgttaattatttatttttttccacataagcatctatatgctgctgtacaacttgaaatggagctattccactttccagtaaagctgtgtggaactctttttcatgaaagcgacttccaagcacctgttgtgcgtcctctttcatgtttataatttcatgatatcccacataatatggctcaaatgcagcaggatttgcctgtaattgagcgtattgcgtctggatggatgcatcgtccagagaaaatccttttgattccataaattctttgaattcctcgactgaccagccatcataatggatgccgatatctgccagaattatcatacagtacgttgccaactcattttctttatatgcttccaaaagtgtttggtctactccatcaagatacgagagcgcttcatattgggcatagacggcatatccttccgtatacgcgctgatattggaaagagccttaatatagttgcttcctacattttcatacatatatgcatattggtacatgtgccccggaaagccttcatgtgctactgttgaaaaggtagaaatagaggacacatcattggagatagggttcacacgcaattgttttacggaatctccatccaatgttggaatattgaaataagcagttacaccggacttagaagccaattcttcattcatattttcaatatgataatttaaattgctcacaggcggaaactcttcggagataacgtttttcatatcatctaatatatcagtatagctgaggtatcctgtcttgggaagcgtattagaaattaacggttctacggattcagggttgctgataacaatttttgcacagttatataagtgtgtgctgaatgcttcttccatcatttctctgatatcttcaacagatttattgcttccaatgctctgttgcagaaggagctcataatactccttgccatatttaaattttgcaagcccttctgtattgtttcggccggttttctgaaaagtctccattgtagagcgaatgctttcaaatgcaggtaaaaacgaagaagaaaaggcttcttttaattgacttttgtatttttcggttttttctgtatctaatgacaattgttctacactggtattcatagatgccagtatcgcactgttctctccgggctgtaaaatactgtcacaatattcaataattgattctaaatccagcattaacagcccattttcttcttgtttctttgtatattccaatacactttctacatagggttttgtgtcgtttaacaaagtgattaaatcttgtacatctttttcatttcgtacttgccagtctgcaaatagagtgggaagttgaaattgaattccactcatgctttcaaaataggagccgtaatagtcgaatttttcgttgctcagcttttgggataaagaagcctgatattcgtaaatatcatagatatctttttgttcctcagtcaaagcattacgatgaaattgttgaaatgtgttgtaagcattatcactatcttgagctgttactatttctccgtcactgtttgggcgagcgcctaaacttacttctgttttacttaaatctattccaaacgattccggattttgcatgtatatatgagtcgcgacataatcattttccatagtttttacaaattcttgctggatgaattggtcaaactgtttttgttcctgagaagcatctatttgctgacatccaacaatagaacatgccaggatgaatacgaaagatagtaaagaaaatctttttatcattttcatatcttcttgctcctttatctttgtaacttcattatactcactttcataatgcgaagcaatattgtaaaaaggataccgtcaaatgttccaatgaatctggcactctgataacacgttattcttattttattctaacctaaccttacattccttatgattcatttttagcgaagatgcaaaaatactactaaaagtatgattttgggttgatttcctacttaaagtgtgatatcttgttattatcctactaaaagtagggaggaggaatagagatggcatatagaagaatcaattattatcgcatactgagtatgaatgtatcgggctatcgaaaattaagaggttggaaccaatatgaattggcggaaaagcttcatatcagccggacgtatctcagtatcattgaagctccaaacatgaaagtaaatatttcattggaaattttaattgcattatcagagcaattggacgtaccattaccaaaactgtttgaatgatggttatatcaaaggattgttttaaaatttgcttgaaaacaaacttgtttcataagataataaggtcaagtaaagaagaggagaacacatatgtcgaatcaaacaccattatattctgctttggtgcagcatcatcgtcttggaagatctgcttttcatacgccggggcattcaggaaagccgatttctcaattgaatcatttactgcaattggatgtaactgaactgccggatacagacagtctgttcgaggcagagcacgcgattttacaagcggaacgtcatgctgcacaagtatttgggacagcacgtaccttattttctgccggaggctgcactttatgtattcaggcaatgctgcgtcttgtttcggctgacagcaataaaaaaacaattttaacggatcgtatccttcaccgcagtgctgtcaatgctatggcattgcttgacttaaatcctgtttggctcctgccaagagcagatgcaggacttggtttccccggaaggattcatccggacgatgtagaatcccttttaaaacaatatccggatactgcggcggtatatattaccagtcccgattactttggtgttttgtccgatatcagaagcatttcagaagtatgtcaccgttatcatgtgccgttattggtagacaatgcacatggttgtcatttgtttttaatgcctgaacatttacatccgattcatcttggggccgatattactgcttgttctgctcataaaactttgcctgttttgacaggaggcgcttttttgaatatggcgtctgatacgtatgcagcaaatgcaaaagacgcaatggcgctgtttggttctacaagcccttcctatcctattatggcttctttggatttatgtatgcagtgggcagaaacaaaagggaagaatgcttatttacaattgcagaagcgtgttgtagatattaagaaaatagcagctgcaaaaggaattgctgtgcctttaggagaaacggaccctgtacgtatcactctgcaaactgcatcattagggattacgggagaagaggctgccgaaattttccgagctcactttgtagaacctgagtatgcagataatgcgaatcttgttttaatcgcaacacctttccatactgagcaagattttttacgggtagagcaagcaattcaggcactgcccaacagaacgccgttaaaactcaatgcagttcttccgtcattgccaaattccgttatgtcagtacggcaggctgtattttccgcgtgggaagaaatcaatttggaagacagcattggcagaattgctgcaactactgcttgtccgtgccctccgggtgtgcccgttgttatgccgggagaaatgattacagaagaaattgtgatgtttttaaagaactatagatttctgactataaaagtggtaaaataaattattacgggttatccgtaatcattcatagaaagggagggcctgatacatgctgaatttagaacaatgtactgtttccgaaccggtcaaaagaatgttggacacaatgtttgtgcaaaagcgtgtacctcaggctctcatcattgaaggagatcataccaagacgacagaactggcacgcgtacttgcttccggattggtttgtcggtcgcaagacaataaaccgtgcggaacgtgcagcagttgtatcaaagcacgtgccggttctcaccctgatatttatttggcagaaggcggcctgacgccgcgttcatttaaggttgaggctatacgcgcaattcgcagtgatgcgtatatacaatctcaggaaggcggatgtaaagtatatttgctgtttcgtgcggaaagtatgtctgcggaagcacaaaatgctttgctgaaagtattggaagagcctccggccgacactgtatttatacttacttgtcttacagcaaaccgcttgctgcaaaccattcgttcacgttctcagataattactttagaagatgatgcagaggaaaatccggaagccgtacgaattgcaggagagattgcgcaggcgttaattcatacgaaagaaatagaaatactgcaggcaacagcgcctcttattaaggataaagatttgctaaaagaggtattaaatcagttaacacttatatttcgtgatgcatgtatacagcgtgcaggtggaagcagctatttatcgactcagacagagcaagtaaacgctttatgccgcgcaataccaaaagcgaaattatttcagctgggacaagtagtaaccgaaatacaaaatgctatggtctttaacgcaaatatgacaattctggtaacgctgctatgcacaaaactgcgtacagcagcaggcagataatacaacattttacatgtatgggagggtaaaatggcacaagtaattggtgttagatttaaagatgtaggtaaaatatattattttgacccgttggatttggaaattataaagggcagtcgagtaattgtagaaactgctcgaggagtagaatgcggcgaagtagctatggaacggaaggaagtatctgatgaaggtctggtacaaccattaaagcctgtgatacgtgttgctacgaaagaagatttaaaaaaagtagaagaaaatcatgaaaaagaaaaacaagcgttcgacatttgcttaaaaaaaattgccgaccataaattggacatgaaattggtagaagttgaatatacatttgacaacagtaaggtattattttactttacagctgaaggtagggtagacttccgtgaattggtaaaagatttagcttctgtattccgcacccgcattgagctgcgtcaaataggtgtacgtgatgaggcaaaaatgctgggtgggcttggtgtttgcggcaagccattttgctgttccacatttttaagcagtttccaacctgtttctattaaaatggcaaaagaacaaggattatctttaaacccggttaaaatttcaggtacttgcggccgcctaatgtgctgtcttaaatttgagcaggatgcctatttggatttactgcgtacaattccaaaagtaaatgccattgtaatcactccggaaggaaaaggtaccgtaattgaccaaaacttattaacgggtattctaaccatacgtttggataaggctcccgatgcagcgcctgctacatttcatgccaaacaggtaaaggtaattaaagacggtcaaattagggtgaataaagaggaactagagcaattaaaaggcttggaaaagaattaaatttattatattgtaacaaaaaatctgcttattttttacaagatatccatggaattctattgatttttttaagatctatggtaaaataaaggtgaaaattagagggaggtgcttaaaaatggcatatcatattaacacagattgtatttcttgtggtgcttgtgcagctgaatgtcctgtaagcgctatttcagagggtgatagcatttacgttatcgatgctgatacatgtatcgactgtggtgcttgcgcagacgtttgtccggtaggtgctccacaacaagcataattcgccagtaaacaaaaagggcggtgctgcatgcatcgctcttttttctatgattagatatttttgtatgggaaaaggagatgaaatagatgctgttagatggcgaacgctgggaacctatttcaagtcaatatcaaattattgtgtcgaaacagcactgttttaatacagataccattctattggcgcactttgcatctcccagaaaaaaagatttctgtgccgattttggtacaggttgtggtaccattccccttatctggagcagcaggtatatgccaagacatatttatgcagtagaattgcaggataacgcatgcagtatggtacaaagaacattacaaaaaaataacttagaagccaatattacattgattcatcaagatttaactacattaaagccgggactaaccccttttactcaggaattggatttaattgcgtgcaatcctccttatcaagaggctggtacgggattggtaaatcctgacgatagtaaacgtattgccagacatgaaggtgcttgtacacctgatgatatttgtcgtgtagcttccaaattgttaaaatatggtggcaagttatgtatgtgccaaaggccgcaaagactattcgacattatggaatctatgaaaaaggtaggtattatgccaaagcggttacgccttgtccaacagagattatctaaggcgcccagcttatttttattggaagggcgaaaaggaggaaattctggtatgatagtggaacctgttttgatgatagaggatgaaaacggcgcattttctgatgagatgctacaaatttatggcgactataaacaaggaaaaaggggagcagtatggcaggaaagttaatcgttgtaggaaccccaatcggaaatttgtcagatttttctccaagagcgatagaaacactgcaaacatgtgattttattgcggcagaggatacgcgagttacagtaaagttattgaatcattttggcattaaaaaacctatggtaagttactttgaacataacaaaatggagcgcggggacattatctgcaaccgtatggaacaaggagaggtttgtgttctggtatccgatgcaggtatgccggcaatttccgacccgggagaattgttggttgcacaatgtgtacagcggaatatccctgtatatgtagttccgggtccaacggctgttatttctgcattggcggtttcaggacttccaacaggaagatttacgtttgaaggttttttaagtatgaataaaaaaagccgaagggaacatttagaggaagtaaaaaaagaacgaagaacaatggtattttatgaggctccacataaattggcatcaacattgcaagatatgctggcagcttggggagacagaagaattgctattgtgcgcgagattaccaaaatacacgaggaagtcatccgtaccacattaaaagaagctgtacaacgttattccaatgaaaatgcaaaaggggaattggtattggtgatagaaggtgctgagaaagaaaaagaggctcaaattaccatagaagaagctgtacaaaaagcaaagacatatctgcaagatggaatgtccgcttcagaggcatcaaaaaagtctgcacaggagacaggttataaaaaaggggatatttatcgtttattaaatatgaaataaaaatcgagcagtatgatgatttagaaaaatgattgtaaaatatgcgtaaacgtatggcatgcaaagaaaaatacagttgtaattattgactcaaaatggtatgattatctttgcaaaatagataggattatgtagaattcagtttaaaaatgtgtttatgggatgggataatcttgagtcgaattcaatcaaaaacctgtattgcggttacatgtttcataacagtgctcatgacgtgtgtcatttcagctttggcatttagcgccgatgctgcgcagtatacttcagtagatatgatacagccatatgcagccacagtaacaggttctgcttcttctgacgatgaatcagaaatattaagttcccaagactgggaagcattattgaatgtatcttctgaagagagtgagcctgtttcttcagaagctacagatacactgctgggctcgccgttaaaaaacggtataagtggggatagtttctttatttggggttgtattgctgttggtctgggtgttttgggaattgctttctttatttactcccagtttgtttataaacatatgaaagctgcatctgatacaaaatcggattaccatgaggaacaaacaggagcagtaaaaccaaaacgcggagattcctttaaagaacaaatttccaaagaaaaaccacaagagaaacaagatatgaacgaacatcccgggacatcgtctgaaacacaattggatgatattgattgggataaattttttgaggaacataaaaataatcatgataaataaaaggaggatatgcaaacattgcatatcctcctttttagttttgaggcgatttccattttggctgagttgccttttttaaacgaagcgcttggaaaaactcctttaatatattactgcattcttcttccataatgccaccgattaattccggtttatggttatacggcaattcaaataaattaataatagaaccgcaggaacctgctttttcatcttttgccccatagaaaacttttggaatgcgtgcattgataattgctcctgcgcacatagggcacggttccagtgtaacgtatagctcacattgccatagccgccaaccaccaagtcgtttacaggcattgtcaattgcctctatttctgcgtggcatagggcattttttccttgttcacgccgatttcttcccgttgcaattacaataccatcttttacaaccacggcgccaacgggaacttctccttcatttgccgcttcacgagccaattgcaatgcttgattcatatattcgttcatcgttaaaacacacctagtctggagatagattgaatgatgcaaatacctgtgaaaattaatatgcccggatttgcaaataaattgcccatactgctacctacggataacgctcccggccgaaattcggataattgttttttctttagcagcagatataatacagaaaacaaagacataaatatcattgctaaaataataatataaaatacggcagcataagtagtggcgctacaatgaaaacgaacaatatttaataagacataaaatccatttacaaacatatgaatgcctaccggaatccatatattatttgttctaaccaaagtaattcccagtgccaaaccacagataaatgcaaacactatttgcgagaaattgcggtgtaataaaccaaataacaaggcagatgcaataacggcaaagaaatctccgtatttacgaaattgacttaaaataacacctctaaataaaaattcttctacaaaaggcggaactactgcggttgccaacgcattcataatgtaggaaggaatggtaggaaccacaggtatagactgtgagctaccttggaacccaaaattttccaatatagcagatatccaattggaaggaaagttggccaatagacaaatagtagtgcctataagaaagaaagaaattccaacggcaggtttaacttgtttggttataatgatgtttgtgggctgtagtttaaagattacaataaaaataacagcgggcaacaacatgcttaatatactgacagagccatttaacaggtaatttaaaatagaaattgtttcgttatacgtagatttttgataacctataccaattaaaaaccattgcagagcataagaaaataagtacatagcggcaatggcagcgcataacaaaaagcctattttatttgactgcttccttagagagtaatcaggtgcctcgtacaaaaaggaattattttgtttttgaaaaggaaacacatgcttcataaggcacctcttttctctcataacaaatgaactaaaatgttaaactatattataacaaattttaaagacaaaacaaagttgaattttatatttatattctttcttattagagatatgtatttacgcacacgatagctttatgcggaacatcaataagatatgctccatatgagaggcatttctcctgtcatttaaggcaaaagaagagcgaaaacctcttgttttcgctcttctttttaggtgaaagaataacacactttacaaataaataaccattttgagttataattcagttatagctagtatcaatcattggttaaaagtgtttcaatactaacatttagtactttggaaagcacgaccagttctatatctgtgacaaatcgttgaccactttcaattctttgaacggcatttttatctacatctaaaccggcaacttgcagtttttgagccagtgcacgctgagagacttttggtttcatgctttttcttaaagctgcaacttttctgccgcaaacattattaagaccatctttggatttattgataaacatatgctacacccaccttgacattccgttcttgtcattgcttgtattatatgttaaaatgattgataatatgacattcatagaatgttatttttaacatataaaaattataaacgaatttaatcagagaaataaatgaactggatgaattgttcaaattattgtctgtatagcacattttgtttttaattttgtcatgttatatgtctctattacagaagttttgctaagacatcacgttattttataaaataactgttattcacctcgaactgaaatattgaaaccatatgaacaggtacttgatttatacttaatggagttgatgaatatgtctgtacagtttggaaaacgttgtaaaatcttaaggcaggaaagagggcttacacaacagcaagtggcagatgcattgggtatatccaggtctgcatatgcctattatgaaatcggcggcagtgagccctcgctttctgtattatgggaattggcgcagtattttcaagtatcggcagactcattgttagacacttctataaaatagctgtatgctatcataatttttttgcaggactgcatattttaaactgctatcaacataaataaagccgtttataatgagtgaaataaaaaatatttgaatagaaatgtgaaaaatatagacgaaaatttaaaagcttgttataatgtaaaggtaaaatacgatgtcattttttgattcatttatataaaatattggtatataacaatattgcataaggatgagttaaataggagattgaatcatgcagtttaaaattacaaccgattatgcaataagaacagtgttatatttggcaaccaaaaatgagataactacttccggagaaatttctcaagtaatgggaattccgcagaaatatttaattaaacttttgggagaattaagacaacataaattggtaagagttcatatgggagtaaagggaggttatactttaaataaaaatcctcaggatatttctttacttgatattgtagagattaccgaaagtacagtgaaaataaacagatgtttggagccggattgttactgcagccgtgaaggggcggagtgctgtcccgtgagaaagtactatacagttattcagaatcatttagaaaatagtctttccaaaataacaattcaggacttagttgaaggaaaaaatgtagatttataatcatgggaaatacaatacataatatttttctaaaataactagatattatttttgttaatttattgtattttagttaatatttatgttaaaattaaaaaatagtaagtattcttgttttaaaatataaaggcattcaaatgatgagatgataaaataaataatttctatgcatatgattggtaatcacttttgttggaaggaaatcattatgcagttgaaattgacaacagaatatgcaattcgtatcgcgttatatttggcagaacaaaatggggtttgtacatcaaaggaaattgcggaatatacgcaaatatcccctaattacgtattaaaaatattacgtgttttagcaaaagcgagtttggtacaaaatcatattggcgtttatggaggattttccctttgcaaacatccgcgagatattactttgttggatattgtgtcatccacagaatccacaattaaaattagctattgtttggaacaaaacacagaagaatcaaaagaaggatatcaaacggttcgttccatgtacaatttttatcatgatttacaggacgaaattgaggaacgcctttcccacaaaacattggaacagttactgagtgaaagttagccgtagtgggaaaatttagccttatttataatagaaagctctgttttaaacgttattttttcaagttattataaaaaaataggagcagtacgaaatacacagtactgctcctattttctattcttatttattttttattattgtcaggttgttaaagtatttgtaaaaatgaatgacaaccattttcttgtttattgcataaaaattcactgctttttaaatagttaaaaaacagcacaaagaaaaatgttatatttttaattgaattgatgatgatggataaaataaatagcttctgttgcattttggttaaaaaagtagactttttttcacataacttatattacatataatggaaaaattcagacgtatttaagcctttttttatattaacatagttgagattaaaagtctactttaagtctacttttttctccagatttctataaatatattcatacatctgtatattttgctaaaatgttttatttttagacaaaacaaaacagctgcaagtaactcctgcagctgttttgttgggcttgcactacaaaaaagatacccgctacaaacgcgggcacaaaagtcaacagaaaagaaaaacctgcggtgcgcgacttgctcaccgcaggtgtggcaccccctgcgtgaatcgaacacacaactagcccttaggaggggcttgttatatccatttaactaagagggcttaattattggctggtaaaatccaaaatattttacaataaatatgttcttttgtcaacgaatttatctgtagatattcttttaaattaagacgtattttaacatagtttttgtttttcctctttccctcttcggccatttatggtagaataggagaaatgtgaggtggagtataaattgaaaattacatataagatgaatgaaaaagaactatatgattataatatgtttcgtatgacgcataaatcaggcagtgtggtggcaagggcggtaattgtagcatgtatttatgaagctatgattttacttgtagcttggtttacaaagtttgaactgtacatgtattttattttttgtcccctgggcattttaatttttgcaggaacattgttattcaccaaatttaaaatgaagcaatctgtaaatcaattattgtatcgcgccaataaagaagcactgatgccggaaacaaccatcgagattacagagaatggactgcaaattacaacacccggcagagattctgaaatactgtttcgagaaatagaaaaaattgaggttggaaagcaattcatttatttgctcattagtgaacatggtgaggttggtattccccttagggtatttgaaaatttggataaagcaaaggaatttgcattggcaatcaggaatggtgctcctgaggctgttcatattggaatttaaccttaaagttgtatgaaaaatcatacaacttttttattgtctaaaactgtttgtaacaacatacatcatatgtgaaaaattagagtaatgattataaaatttttccaaaaacagcgaaaatactagtacaatacagcaaataacattgacttaaatcctggaacatactataataattgttacgatatattttgaaaggagggctatttgtgataagtggagcagaaatgatggtaaaatgcctacaagcagaaaatgttaccattaccttcggttatccaggcgcagtaatttgtccattctatgattttttagagaaaacggagattgagcacgtcctggtcagaagtgagcaaaacggtgcccatgaagcaagcggttttgcacgtgccagcggtaaagcgggtgtttgtattgcaacatccggtccgggcgctaccaatctgattacaggtcttgccactgcatatatggattccattcctctggttgcaattacaggccaggttaattctgaactgttaggacgtgatgtgttccaagaagcagacgttacaggtgcttgtgaatcttttacaaaacacagttatcttgtaaagaatgttgaggacattccacgcgtctttaaggaagccttccatatcgcgacaaccggccgtccaggtcctgtgttgatcgacgtcccttacgacattcagcgggcccaagtggaagagttcatctatcctgaaaaagctgaaattataggttacaagcctcgtacgaagggacatagtatgcagattaaaaaagcagcaaaactgcttgaatcagccaaacgtccggttatctgctgtggcggcggtgtggtgtctgcaggcgcaagagatgaaatgatcgctttcgcaaagaaaacaggtattcctgttgtagcaactatgatgggcctaggggttattcctatggacaacgaccactatattggtatgattggttctcatggaaaatcctacgcaaatcgaatgatgaatgaagctgatgtcattgtgctttgcggtgcaagagtcggcgatagagcaattcccaacccaaagggtgtgaaggcctctatcattcatattgacattgaccctgctgaaattggaaagaatgtgaatgcgcatattccaattgtaggtgatgtaaaatctgttttgcgtgaatttacaaaagagattgaagcttgtccttgtgacgagtggctaaaaaaagtgcaggctgcaaagaaagaggctcctttaagaggagaacctcgcactgactttgtggaaccaagagcatttatgcgtgacctttccgccatgatggaagatgatgctattttgactgccgacgttggacaaaatcaaatttgggcagcaaataacttcaataccaaagaaggcagatttttaacttcaggcggtatgggaaccatgggatacgcacttccggctgcaattggcgcaaaactggcaaagccaaaacgtcaggtagtagcagtttgtggtgacggctctttccaaatgagcatgtgtgagcttgctactgcaaatcaaaaccaagtacctttaaaattggttgttatgcgcaataaatttttaggtatggtaaaagaacttcaggataatttgtatcaaggacgccatgtggcaacaccactgaacggtgacccggatattgttaagctggtacaagcttacggtattaaggctgtttttgcacaaaataatgaagatgcgaaaaagttggccaaagaaatgctggagtctaaagaagcttatgttttggtgtgtgatgtagatccaaacacaccgtctatataaagggggaagcacagatgaaatataccctctcagttttagttgaaaaccaaccgggtgttttgtcgaaagtttccggcctattttcacgccgtggctttaacattgacagcttagctgttggtgtgacggaagaccctgctatctctcgtatcaccattgtggtggacggagatgaacatattgtagaacaagtggaaaaacaactgaacaaattgattgccgtgattaaggtaaagaacttaaccacatccggaagttatgtcagttgtttgttaatgctggtaaaagtaacttgcagcacaaagcagcgtttggaagtgatgaaaattgctgagcaaatgaaagctgatgtagtggacgtggccaataattcacttacactgcagtatgcaagtacgttagaaaatattgagactctaaccagtttactaagaccatatggtattaaagaactggtccgcacgggaacagtcgctctggagagaggctcttccacagcgcataaataaggataagcctggcgccctgcgtaagacttagaacatttttagagaatacataaaatttaggaggaacattccaatggcaaagattttttatcaagcagactgtgacattaacgttttgaaaggtaaaactgtagcaattatcggctatggaagccaaggtcatgcacatgcattaaacctacatgaaagtggtgttgatgttgtagttggtctttacgaaggcagcaaaagctgggcaaaagcagaacaagcaggcctaaaagttatgacagcagcagatgcagcaaaagcagcagatgtgattatggttttaattcctgacgagagacaagcagaaatgtataaacaaaacattgcacctcatctgacagcgggcaaagctttgatgtttgcacatggttttaacatccactacggtcaaattgtaccgcctgcagatgttgacgttttgatgattgctccaaaaggtcccggtcataccgtacgcagcgaatatgttgaaggtaaaggcgtaccttgtctaattgctgttcatcaagatgctacaggtaaagcacaagatattggtcttgcatatgcagcaggtattggtggtgcaagagcaggtgttcttgaaacaacattcagagttgaaacagaaacagacctatttggtgaacaagctgttctttgcggcggtgtaactgctttgatgcaagcaggcttcgagaccttggtagaagcaggttatgctcctgaaaacgcatactttgagtgcgttcacgaaatgaaattgattgttgacctgatttatgaaggtggtttctccagaatgagatattctatttctgacactgctgaatacggcgactatgaaacaggtaagagaatcattacagaagaaaccaaaaaagaaatgaaaaaggtactttcagaaattcaagacggtactttcgcttccaaatggattagcgagaataaatccggtcgtgcccactttacagcttgccgtcgtttaggcgcagaacatgaattagaagctgttggtaaagaactacgtaaaatgtattcttggaatgacgagaaataatttcatcatataaaaatcctctgcatggtaattgtccgtgcagaggatttttttggtttgatttagtgaatgaaattggtggagtctgcaacatcaggttgaggttgtggaatattgtgttgttttgcacatgcaatacattgcagcatccatgccatattttttccaatgttgcgcatcgtttgcagtccttccttatcttgcattacatcttcaggggtaagaccatgtaccatgttccaataggtggaagaaacaataggcatcatagcaatggaaaaatatttattgatgacatcaatggaagcggttgttcctgcccgtctggcagaggcaatggcagccgccggtttgaattgaaacggtttatatatgcgagaagaagcactgctataaaatgctctgtctaaaaaagataataatctgccgcttggatgtgcgtaatagacgggagttccaaacacaaatccgtcagcatcttttgctttctgaataaattcgttgaccatatcgtcgtcaaagatacaaccttctccatgacaacgattgcaattaatacagtctctgataggctgttttcccaattgcataatctcataatcaatattttgctcctgtaatgtttttcctatctccgtaagcgccgtaaaggtgcatcccttggcatttggactgccgtttatcatcagtacattcattttatcgtcttcctttctggaatcagtcattgactttacgttatctacatactaaaattataaataaaataagcgaaaaaacaagaacgcactaaaatgtaagatactatctaaaaggagagtataacatgaatcagacagataccaatatctgtgaaaagatagatatcaaaccctttgcatacgctgtttctctttttaacggtaagtggaagatgcacatattattttggctttggaaaaaagaagtcatgcgttacagcgaaatcaagcgggagttaggaaaggtaacccataagatgctttctacgcagctgaaagagttggagagagatggattgttgatacgtcgtgaatatcctcaagttccgcctaaagtggaatatagcttaacggaaaagggacaatctattatgccgattttacaagagatttgtaaatggggacatgaacatataccagagaatacttaaataaaaaaggcagcaactgctgccttttttattttttttgtttttccgctacataatcataaatatcttttgcaacactgtcttttccttttaaatgtacggggccggcaaataaataaggtgaacggattaacgtatcaaaatcttttttttgccagacatagggatttccttgtttatagtcgatatagcgcatagttgcatttgaccaattatcatattgatgataataaatattttgtttcatcatagagttacataaaatcgtttggaaaaacagttcgcaaacaccacccattttagatagatattgctcgcaccatggctcttttaataaaattaagctaactaagtcatgggtaatactgcatgcatttatgccggcttgcagctgaaatcctgcatctgaagaaatctttgtttccggattcagctttgtacttaatgaccatggatattccagtttttcagatttgcgtccaaataggcgaaaaccggcatcaaatgcttctttgatataattaaaacgtctgcgcataccgtctgaaaagttttttccataaatattgacaaattctcttccttgatgtgattcaaagaaatccaaaatgtgttcttgggtacgtaaaggtaaatcacagtcagacaagaagtggtaataagaatatttttgctttgcagcttgccgcattaattcaaattggcattgaatttgagtataagaaccgtatgaaacagcggtactgttgataaaaaagattttggattccttcaccaaagattttagagattcgggacgacacttctttgcttttttgtctatatggatatataaatctactcgtgcgtggtctaataatggtagttgatattctaataattccggttggttttgtactaagattaaataagcatgcttattcataatttctcctaatcaattattgttttctaaaatattatagcttgaaatcttatataacacaagagaagaaaacagcaaaaaagaaaaaggaagatgatgtatcatcttcctttttcaatcagtgatagagcgttttactgcaaataaataaagggggaatggattcttttattaaaaggtatatgtttccgttaaggagggaatttgtaaattttatttggaaagcataaggctttattggggaatataaaagccggaaaataggagaatgtaaatacactacctttgggaaaaataaaagaatccggttaggtatgctattaaatatattaaaactataatatatattagggagaatattacagtaacaaaagtttcattttgtagaaatatactacctaacaagatatatgacgaatttcatatcaaaagctttttcatacttctttcttaatttgcacatagctgctccatcatttttctacaattttcttttgttaagccttattatagcaatttatgattttatgggagcacttatgttgttaaatacaaaataatgtagtgaattacgggttatacgattttatagaaggtgatcgtttcgatgtttatcatgattaccgtgattaataccgcaaataccctcgtaatcttttgcttttctttttactaccaccacaattatgaaaagggcaatgataagtacagcaaacacagtaatcaaaatccaatttagcagtgtcattttgttttacccccgaatatatttttaatggcagcgtttttctttttattcacccattggaataaagtaaaatatggatataatatgataccgcctgcgacaattactccaatacttaacgttccgaatactgcatctacggcattaggtccgtgaaaggcagatggagcagacagcgaactggacatgtaattacgcaatacctgtagctgagtggctaacgattcggataaagcagatacttggtttgaggctgcaagatttacaggtgtttctgattttggaagaatttcagttgtttggtagtcgccgaaagcgcatgttgttgtgacactgccatcttgcgtatcggttggttcgatagtaactgttgataaatgatgtcctgtagcagggatactttcgatatgctgttcatgacagacggaacaaaccatggtattgctgccttcttgtgtacaagtaggttctgtcacagtataagtccattcatgtcctagtgcgggaagtgattcggaagaggtgaaaccgcatagagaacatgtggcaattttcaatccattttctgtacaagtgggttctattacagtagtagataaattgtgccccaatgcaggaatcactcttgtttcagaatagtcacagcgggaacaggcggtaacttcacttccttctgtaatgcagttgggttctgtaacaattgtagacaaatcatgtcccaatgcaggaatcacttttgtatcgaaataatcacagcgagaacaagtagttacttgacttccgttttctgtacaagtagggggagttgtaaccgtgtttaaatcatgccctaatgcaggaagtgttcggatacatacatcattgcatccgttgcagagcataatttcttctccttgctgcgtacaggtgggttcggtttttatagaccattggttggaccatccatgtccggctggaggagtctcatcaggaccgatgtagtgaatatttccgtcggtaatggataagtcatcttgtgtggacttctctgtatccgcattactcagtatgaacaatacagtttcttgtgcaacaatagtcgattcgcaaatatcagttgtgtaggaagaagcagtatcatgaacagacgatacagtagccgcgtttataacagaaaaatatgaaatggcagagattattataataaaagaaagtattaaggatatttttgctctcactacgcgtatcaccgcctttctttacgtttatatcatatattatttatac

SEQ ID NO: 3568 - DNA, 2975 bp, Unknown
  16S sequences of unknown bacteria
tgcttaaattgggggaatactatttttagtaaaataaagataaatgttttagcatttaaaagttaaaaattgcatcgcaattttttctatgctataattacagcaatcaaacagggaggaacaattatgaagtgtggcatttctacatcttgcctgtatccaatggaaacaaaagaatcacttcaaaccttaactgatatgggatttcaagagtttgaagttttttttaatacatttcgtgaaatacaatcttcttacacattggagatgcgaaaacgcttggatgattacggtgctgttatgcgttcgatacatccctttacatcaggatttgaatctgctttaatttttacaaattatcgtacgcgttttttggatggtttggaattttataagcagtattttgaagcagctaatatattaggtgcttcaatactggttctgcatggacaaaataattgcggcagatatggcggaattgaggaaaaggattatttagaaaaatatctggcgttgtatgaactggggcagcagtttggaattacagtagcgcaggaaaacgtaaatggatttcgcagtgccaatccttcttttattcgtcgtatgagagaacaattacaaaattgctgtgcatttgtgtttgatgtaaagcaagcagtacgtgccggattcgacccttatgacatgtgtgatgctatgggaaaaaatttaattcacgtgcatatcaacgataatgcaccttcacaggattgtttgctgccgggaaacggaacgatggattatcctcgtttattaaggcaattaaagcaacaggattatcacggctcttttattattgaagtgtatcgtagaaattttgagaaattggaagaacttaacagttctgcaatgtatttaaatgaaaaattatccaaatattttggataaacaggttgaagtttatagattttatatgatataatcttaaaatagtaatcaacatgtggagggctgttttatgaaatgtccgttttgtttttatgaggaaagcaaagttattgattcccgtccaacagatgagggagaaagaatcagacggcgcagagaatgcttaaagtgcggaaaacgttttacaacgtatgagataattgaaacagtacctgtcattgtgataaaaagggataagtctcgccaggtatttgacagaagtaaaattctaagcggcttgcttcgtgcctgtgaaaaacgtcccgtatccattgaaacattagaaaaaattgtggacgaaatggagtttacattacaaaactcgcctgatagagaagttccgtcggaacgaattggtgaattggcaatggaaaaattaaaagatattgacgaagttgcatatgttcgttttgcatctgtttatcgtcaattccaagatatacaaacctttatggatgaactgaaatctatgatgaaaacgaaataaattcaggtataaaaaacagagccatgtacatgcatggctctgttttttattggtttaaatgattctttcgatatagtgacagtaaaccttttaacattaatttatcatcgtaaataatggaatgattgcaatgttttacaatcattccggccaatcctcctgttgccagtaaagttggcatttcacccaaatcggcggcaatacggtctataataccgtctatcattgctgcggttccaaatataataccgctttgcatacaatgagttgtattttttccaatgatttgtgggggagcatctaagctgatatgaggcaattgtgacgcttgatttgacagcgcctctaaggaaagtcctacgcccggaataatcataccgccggcatagttcccttgtttatcaatgacagagactgtggtagctgttcccatgtcaaatattacaataggggtagggtatgattccaatgctgtgacagcatttacaatcaaatcttttcccaattggtcaggattatctatggttatggataaatcagttttgatttgattgctcaccataatcggttcttttccgattagcagtgcaacagcagacaaaatggtctgtgacaaatttggtactaccgaagatataatgcttcccgttatactggataacgcaacatgccgtattgcaaggacgtcttgaatcaatacagcatattcgtcaaccgttttggtatggtcagatgagatacgggaagtaaagacaatttcctctgtttttgtatcaataattcccaacacaatatttgtgtttccaatatccaatgcaaaaatcataacaatcccttttcttctattgtttttgacttcgttttagttttaataatacttttgcaatcacacacgtaataatgcctgcaatcactgcttccgcaaccccgttggtacctacaacaaacataatggtacccagcagagcatcagaagctatattgtttgcagcggcataactgtcgccaaacatcaggccaataagtcccataaccaatatagtgtttaccatggagccgcaaacgcctgctactgcaagtgagacaaattcagctttactgttgtgcttcattaatttttgtaaaccagcatatacaaaataggggacaattcccaccaaaatacgtggaacaaagcaaataattaagctgagccaacttccgtgttcttgtcccggcaacggataaaacggtgtaaaaacaaatgaagttaatgcgggactgactgtattggtaattaagctgcaaataccgaaaagtgcacctaatatggcgccttttttaggtccaagcacaatagaaccgataataaccggaatatggacgatagtggctttgattaccaccaaaggaataaaacccaatggggtgaagcctaataccaacacgatggccgcgaataatgccaatagcacaagatcgcggtactttacatttaatttattcaatttacattcctcctgctgctgctcacaaggatgca

SEQ ID NO: 3569 - DNA, 12510 bp, Unknown
  16S sequences of unknown bacteria
gtgttttaggattgcgagagcatgaaatgcgaagcaatccgtgtatcataggggcaaaagatattttgtcacaactcatacaggaggaaacttttatgcgaagcgaaaaaaaggaaacggctttgcccgtcccccgtactttaaaagagtatactctgatcactgccgctgtcctgatcatggatattggcatttatgtttttaaatttccaaacaacttttccttcggcggcgtatccggtatggcagttgtcttttcgaagttttcatccttctccgcctcgcagatcaacctgatcatcaacctgcttctgctcgttgtaggattcgcgttccttgggaaaaacttcggattgaagaccgcctatgtcactgtgctgtcttccattttgctgaacatttttgaaaaaatattcccgatgacgcatcccctcacggatgagatcatgctggagctctgcttcgcgatcctgctcccggcaatcgcggctgccatgctgttttttgaaaatgcatccggcggcggcaccgatatcatcgccatgatcatccgaaaatattcaacgatgaacatctcgacagcactgctctttactgacctgattgtcgtcattgtctctttcctgatctttgatgtgcgcaccggactgtgttccatcctcggactttttgcaaagacactgctgattgataaatctatcgaacgaatgaagctaataaattccttcacgatcgtctccaccaatccggatccgatctgcaatttcatcaccaacgacttaaatcacagcgccacgacctaccatgcagaaggtgcatattcccacaaggaccgcaccgttattctaaccgtcgtggatgtccggcaggcgatcctgctgcagcgctttatttccaggacagatccgacagcctttactgccatcacaaaaagcagtgagatcgtcggaaaaggatttatgcactacatataacatacgccaaaatgcttcgaccacccattcgggaaatcgaagcatttttatgttctatattttataatttatcgcttcacgttgaatgctcccatgcccggatatacggctgctgcgcccagctgctcttcgatgcggagaagctgattgtactttgcgacacgctcggttctggacggtgcgccggtcttgatctggcaggtgttcagtgcgactgccagatctgcaatcgttgtatcctcagtctcgccggagcggtgggaagagatcgcagtatagcctgccttatgtgccatcttgatcgcttcaagtgtctcggacacggaaccgatctggttcagcttgatcaggatggaattgccacagccaagggagataccttttgcaaggcgctctgtattcgttacaaacagatcatcgccgacgagctgtaccttattaccaagttctgcagtgagcttcttccagccctcccagtcctcttcgtcgagtgcatcttcgatagaaatgatcggaaatttttctacaagcttcttccagtgtgcgatcagctcatcagaggtgtagaccgtacctgccttcggcagcttatactctccgaccttgccggtcttccactctgaggaagcagcgtccatagcaatcatgaaatccttgcccggctcataaccagccttctgtactgcctcgagaatcgtctcgatcgcttcctcatcggatgccagtgccggagcgaagccgccctcgtcgccaacagaggttgcaagtccacgggatttcagaatcgatgccagcgcatggaagacctcggagcaccagcgaagtccctctttaaagctcggcgcgcctaccggcataaccataaattcctgtacgtccagcccggaggaaagtgcatggcagccaccgtttacgatattcatcatcggtaccggaagtcggttgccggagacgccgccaaggaaacgatacagtggaatatccagtgcggtagcagccgctctgcagcacgcgatcgatacggccaggatcgcatttgcaccaagcttggacttatcctttgtgccgtctgccgcgatcatcgccgcatctattgcataaatgtcagacgcatccatgccagtgatcgctgcattgattgcagtattgatgttctctaccgctttctgtacgcccttgccaaggtatctgctcttatcaccatcgcgcagctccaacgcctcaaactctccggtcgatgctccgctcggcgccatccctcttcctacagttccgtctgccagatatacctccgcttccacggttggatttccgcgggagtccataatttctcttccaatgaccttctcaatctccaagtaatccatgttcattcccctttcgtttatctgttatctcctgcatacgcagaaggaataaccaatacctgctccccggaccggcctgcaggtgcaggccgaccatccacggccggaggttcagcagtcgaccggccattgcaccctcgtgtcagcagtaacggcagtgcaggagctttaaaatcatttattcacgctatagttagattttactaaccataaattagtatacactaaccgtattcgtttttcaagtgctttttctatctttctaagctgctcttcttccgcttatttctgcgttctattcctgcgttcatgagcaagtagtgaagcgaattgcgaatgtccgttttaccaggatcctttacattataaaaaccctgtcgttctggctgagcaaggagctcagtgccagaccagcagggctatatcatacaaaatacaaatcagaaaataactaccgacatgcggatactccgccaaacctatttctgtgccgtaaaccgcaggcttaagcagcttaatccaccgtcaatcttgcgatactctgaagtatccacaaggattacttcatatcccgcgtctcttacgatctgcgctaccttcggaaaatgatccggcacgatgacttttccgttcatccagatgcagtttgctgcgtacgcctcatcctccgggatcacatatttttcatactttgcaaactccggcttgtcaacgaactcgccggatacgagcatcttgttattctcaatatagttcacaccggtctttaagtgcagtaccttctccagcttcacttcagaaccgctcagaccatatttttccagaattgcgatgaactgacggattccctcctcgttcgtccgtgcagaacgtcctacataaaaatgatctccaaccatcatgacatcaccgccctctaatgtacccggcgccttgatatactcgatgcagtcctcattgtaaaactgtttgatgaccggaatcattgcctctacttctttatttctggatgcagcgcccggattcgtgatgatcgcgcactttctcgtcagcacagcagtatcctccacgaagcaggaatccgggaagttttcatccgcatccagcacggtcacttccacgccgcagctctttaaggcttcgatataagcgtcatgctgctttaatgccagctcatagtccggcttgccaagctccggtgcggaggtgattccctctgtgatcttgctacatggtctttttacaattacattcttaaacatagtgattctccttttctatttccttttctcttgtatcatcacagtactttcgacagaaactccttcagacgcgggttctgcggatttgcgaaaaactcctgcggagtgttttcttccttgatcacgccctcgtcgatgaaaagcacgcgtgtcccgacctctctggcaaaacccatctcatgggtaacaatgaccatcgtcatgccctcgtttgccagctcgcggatcagatccagcacttcgccgaccatctccgggtcaagtgcagatgtcggctcgtcaaacagaagcacttccggattcatcgccagtgcacgcacgatcgcaatacgctgcttctgtcctccggataagcggttcggatactcgtttgccttatcctccaatccgatgcgcttcagcaggcgcattgcattggcattggcttcctcctttgtctgcagtccgagccggaccggagcaaaggtaatgtttccaagtacggtcatatgcgggaagagattgaaatgctgaaataccatccccatcttctggcgcattttgttaatatcgttttggggatcggtgatattcacaccatcaaaccagacctcaccctcagtcggctcctccagcagattcagacagcgcagaaacgtactctttccagaaccactcggtccgatgacaacgatcttctcgccctgcttgattttatagtcgattccgtttaggaccttcagtccgttaaattccttttttaatcctttaacctcgatcaccctgcttcagcctcctctccagaatgctcacgccccatgacagaatcatgacgcaggcaaaataaacgattgcaataaagaacaacggcatcatcggcgccatcgtccggctcctgaccagatcggatgcacgggtcagatcgacaactgcgatatatccgacaatggatgtctcctttaatactgcaataccctcattacaaagcgccggaagtgcggacttgaacgcctgcggcaaaatgataaagaaaatagttgtcgccgtactcaggccgagtgaccgtcccgcctccatctgtcctacgtcgaccgcattgataccgccacgtacgacctcggatacataagccgcagagttcagtcccatcgcaatacagcagaccacgattttgttcgggaagcctgccatcacgacaaatgccataatcagcagctgtacaacaagcggtacaccacggatcaccgccacatacagcgcgaggattttatctgccacccagcagatggcataccagagcttcgcataccaagtcacagctgcttttcgtttcatctgccggaatccgtaccgggcgatggcgatcaggattcccgcaatcagtccgacgcagagtgaaaccagcgtgatcaggatcgtatttttaaatccggtgacaaacaccttataccgatcgtcacggataaatgttttctcaaattctgcggtcagttcattcatccaattcatagtttttcctttctaatcaaatgatgttgcattccctgcagaaaagcgtttctgtgaaagaacacaaggaagtccccgccggtacattgcacccggaagggacttgccaatacacctattgtttttcttattctgcagcggtctcggtctctgctgcctctgaagcagcctcagtctcagtctcagactctgcttcctcattcagtgcagatgcctttgcgctctcatccaggatgtactggtcaatcgtaccgtcttccttcagcgggctgatgatctcattgaccttctcgatcaggctcgtctggccctttgccgccgctactgcatactgctccagtgtagagctgccatccgcataggtcgcttcgaagcacttcaggccatcattgatcgtgcagaggttctcggccagaagcttgtcacatacgatcgcctgtacatcgccggccttcaggcccatcgctgcgatcgtcagatccttgtactgctgtacgcttgcgccggtacctgcgagtacacccatatttacctcatccgatgcgaggaaatcgccagtcgtaccgagatgtacaccgatgatatagcctgccagatcgtcgatcgtctttaccttgtcatcgtcctcttttacgacaatatactgatatgcgtcacaatatggatcggaaaactccatgctctccgcacggtcctcagtcacggtgattgctgcaagcgccagatcagcctcaccattttccagatacatagaaagggaatcaaatgcgacattgattacttccagatctacaccgagaccatctgcgatgtcctgtgcgatatccacgtccacaccaaccacattttcaccttccatatattcaaacggaggccatgcagcgtcagttgccacgatcagctttcctctctccttgatgttatccagagcgtcatcggctgccattgccgtagagcctgccatcatgccaagtaccatagaaaccgcgatacatccagaaaccagctttttcataatttttcctcctcagttgcatttcctgcatatttatgcgacagattataacgccgctttaagaaaaaatcaagtggtttatgaatattaatacgagtttttttgtatattttcgcatacatatttataaaagcattgaaaacaggctgtccccgaaggatcacagcctgttttcattcacatatcggaaggatcttatacatttattcatgttccagtgtatatttatacttccttttatatttcgtttttatacttctttttattcgccttaccggatattcctttttctattcgacttagttctgcggtacatactgttcgatgtcattatccgcaaaggtgctcatgccgttgtaaacagacagggccagatctagcagcggaaagatcgctactgccccggtgccttcgccaaggcacatatcacagtcaagaaataccggaatatctattgcttcgagaagcattctggtccccggttcctttgatttatgggatgtgatgacataatccttcactgccgggcacatacggattgcgcataaggctgccacgcaggagatgaagccgtctgcgaccaccggcatatgcagcgccgcgccgccaagaaagagtccggtcatacctgcaatgtcaaagccgccgaccttggaaatcacatccacaacatcatttttatccggctggtgcttctggatcgccgtctcgatcgcgtgaatcttccgtttcataccttcggaggacagtccggctccctttccggtcacttcctccgggcgtttttcaaggagtacggaagcgatcgcactgctcgtcgtcgtatttccgatgcccatctctcccgtcgccaggatatcatatccctgctcctttttctcacaggccagcatgattccgatctccagcgcctgtattgcctcgtcgcgggtcatcgccggttctactgccatattttttgtcccgcgcgccaccttacagttgcgcacgctgctgtccggcaccattccgatatcgatcgggcagatgtctgcgccggtctcacggcagaagatcgccgcagtcgtattctccttcagaaaattttcagctacgattttcgtaacctcctgtccggtctgcgtcacaccctcggctacgacgccattgtccgcgcaaaatacgaccagtgcctttttatcaagctttacccgcggcgtaccggtcataccggcaatccgggtaatggtctgctgcagtcttccaaggctgcgcaacggcatcgcgatcgcatcccagtgatcccatgcctgtgcaatggcactctcggatgccggggtgatctgattcagtgcttcatttaatgtcagtgttgtcatttatctgttcctttcctgtcttgctcccttgctgctcacacgttcagaacatcaagccatggacagaagcaaataattttgctgctgctctgaactggttatttcatgtttgcgaatcgttctactactttggtgaatttggcgatggtggcatcggcatcaccgtgttcgatgccttcgcggacgcagttgttgatatggccttccatgacgatctgtccacatttgtgcattgctgacttaactgcgttcatctgggacagaacatcctcgcacggcacatcctcatcgatcatacggtcgattgcctgtacctgtccgattattttccgtaacctgcgatgcagattttccgtatccatgcatttcttcatataatttctcccatctgatacctctatgggtatgcgaagattatagctttttcgcctgataatgtcaattctgaggatatttttcaataatgtgttttgcccattttctaaactacactgcacaaggagaatccaccttgttatctgcagcaatgatagcactcagattatagtgattaatattatagcttttaccggtagcggtgatgagtgtaagatattccttcaaatgagtgaatgatactggcttcatgtttttcttttttcatacactcgcctcgatttctgcgatgatcttatcaatctcatcacataatacctacttcgcattataacaggagtggcttgtaccactcctgttacaatcacgtccctccccactgcttattgctctaggcaattgaagcaatatacttgcttgattcggttaaaaatcagggaatatatataatatgcggatttccatgattatcaacaataatctgcgtctcaacattgtagacctctcggatcagtttctctgtgagcacttcacttggagtcccatatgcataaacacaaccatccttcatcacgtaaatcgaatcacaatacaaggctgcaatattgaggtcatgaaacgcagcaagcaccgtctgacctatctgctttaccgtatttaacagctgaagctgatatttaatatcgagatggttcgtaggctcatcaagtatcaaccccttcgttttctgagctagcgctcttgccaaaataactctctgctgctcgccacctgaaagctcagcaaatgctcttgcctcaaatccttttaatccgaccatctccaatgattcgctcacgatatgaaaatcctcggctgtatcacgctcaattacttttttgtgcggagaacgtcccatcaatacaacatcctttacactgaaatcaaagtcatacgtgttgtgttgtgccactacgccaagcagcaatgctgtctcccgatagctcatatgcgcagtgttttttccgtccagataaacaattccgccattttgttgccacactcggtagacacatttcaaaaaagtactttttccacttccattcggaccaatgactccgataaattttccctcttccgcgtcaatcgaaactctcttcagaatctgcttggtaccccatgaaaattcaatattctctgtatgaataaaattcatgatttccctccgccaaaactatatgtttttctaatcatcagcataatgaatatcggagaaccaactaatgaaattaatacaccaattggcacctccgtattcggacgaatcgtccttgacacgatatctgcccataccagaaaaacactgccgcaaagtgcagacagtggaatcagcttcttatgatccacgccgaaaaaaccacggacgaagtgtggaataataagtccgacaaaaccaattgtgccggatgcataaacaacaaatccgattaccagtgatgcaatcaccagatatacctgacgataccgtttcagattccgcccaagcgtaatcgccgtttcatcaccgaacaacattaagttcaacatccgtgactgtgtcagaaaaaagagtgttgcacagatcacaaccagcaaaataataccgtcctgctcccactgcgcacctgcaagactgcccatcagccaaaaacttaccgtcatgaaacggtctctgtcatctgccacatagacaataaaatttgaaattgccgaacacatggagcttaaagctacacccgttaatactaacttgattgatgtgatcctaccaccaatgtttgctatcgcaatgacagcaaatgataccgtcatcgcacccacaaatgcaccgaaaccaactgaggttgcgcgaaaaacaccaactccaagtaaaattgacagtgtcgcaccaagggatgcaccagatgaaatcccaagaatatacggatctgccaacggattttttacgattgcctgcatcacaacgccaacgacagcaagccccattccaactccgacgccaagcataatacgcggcaaacgaatcacccatacgatatcatgtaccgcaccacttgcgagcagctccggatctcccaatcgaaacagttcatacaaaatgatatcatacacctgcttcacagataaatctgcagatcccaccgtcactgcatacagaattgacaaaataagcaaaataaacaacataaaaaaagtcactatataaaccggcattccctttaataatccttcttttaaatcaagttttcggactgccgcgtattttccgcttctcacctttttctcctttcaaagaaagcggacttcaccagtccgcctctctttttctctgtctcaattttcagtccggttattactactcaatcccatacagatccttcaggaacatatttactgtatcaattgtacgtacacctggcgtataggcaaggctgtataccaccggataaatacggccattcttaacagcatctacacttgcaagtgccggattctcagtataaagcgcaattgcctcctcatccgttacagagcttacatgtacggcaaagattgcttccgggtttgcatctacaatctgttcatccgtccatcctgcttctccgagtggctctgctccaagctgtgctgcgatatcacctgcagcagtctttgcatggtagatatcgtactcaccttcccatttttctgcaatcaagatacgctgcggatctttgccttctgccgctttcttccctttttctacaccatcttcaatctcactgatgattttctctgcttctgcctgcttattgtagattgtcgcgatattgcggatatccgcatactcgttttccagagactggttatcttttaatacactattgatacttgtataggttccgatatttctctcatgccagaaatctacgtcacccatacgatcttccatattaaacagcgaataccagccaattaccatatccggctccaagctcagtgcatattcctttacaaaatatccaatatcctgatgattcttaagctgatcgagcttttcaaactctgcttcatactccggctttacagaaccgcagtctgtaatcatttcaattttatctccaagtccaagtgccagcataatctctacattatttcttccgtataccagtgtcttctccggacacttctcaaacgtatatggaacaagctctctcgcattgttatatacttctactgttactggataataatcctcatctgccggatcagccgttatctccgctgcctctgcatcgtctgtcagcgcttctgtagctgcctctgtgactacctccgtctcctccgcaaatcctatcatgctacttcctgctgtaactccgcatgtcattgataccgcaagaaccattgccagtagttttcttttcattttacttttctcctttttttctgtcgatgcattgcggaatctgagcagtaaaaaacgcaccgtcataaaaaaacggtgcgcaaataaatctaacagtaaagtcagataataatgatatactttccacggaagctatcatcaatacaatgcctagcaggtttcctgacttacagattctataagaaagtcttccataaattaacttcttccttataatgtttcataatgccttctcatacagaccggactgccggttcttatcccgctgtctttcatacaatggattttcttatgaaactctctgattacagtgaccggatcgttccggatttacaccggattccctctcataagcgcttacagcgcatattcactcaatgcacactcaattttgtttaattactataacattgtacaagcaaaaagtcaatcaatagtttttctttagcaaaagcgagaataaattagttgttattgttcagattcttgcatgcagtattagtaaaaatgaggaattttattagtttttttatagtggataacaataagctattccgttatgagcaagctgcgtttattcactcgactacaaagaacaaatcgagaacgaattaagaatgacgagtaccgaacccgcgttatgtacgagcgcaccgacgaccggattcaggattccggtaatcgccagggctactgcgatgaaagtaaagcggattgcgaatatccgctttacgcgtgggaatgcttatctgcgttcaaatgtatgacacaaaaaaataagcaagaagttgaatattgggtactcttcccaatcatcctgcttcctgcttatttttgcttatttttgtttattattttatacttttctcacgccacatccgcctgcaaatctccccggaacctatacagcgccatgagaataaatgcacagcagatgacccacgtcaccggttcgcagatgcagacggcaaaatatccctttaccggaatgatccagaacgcaaagatcaccttgccgatcagctcaagtgcactgcaaaacagcggagccagtgtatgccgcattccctgcagggcatttcgcacgatgatgagcactcccattggtggcatcatcggaatgctgacctgcagataccgggttgcattttcgatcacttcccggctgtcgcttccggtaatcatccgaaccgcctgtgacgcacccaaaatttcaaacacaagggcaaacaaccaccagatgc

SEQ ID NO: 3570 - DNA, 2541 bp, Unknown
  16S sequences of unknown bacteria
ttcgggtagctgcatccgggcagaaaaagtccttgcaaaccggcagtcagaccgctataattgtaccaattaccatatcggacttgagcggaaaggagagcagagaatgctgtttgagaagatcacactgatcgatgagaattatgaggaaaaacgggatatgtacctcgagacggagggaaaccggattgtctatatcggaaccgaacgcccggagggttacaccggggagacctatgacggacggaacaaagtggcgctgccggggttttacaatatccactgtcatattcccgataccctgctccgggggtatggcgagggtctgcccctgcaccggtggctcaccgagaagatgttcccctttgaggcaaagctcaccgaggaagatgtctactggagctcgatgctgggtgcctgtgaactgatccgcagcggtgcggcttccttcaatgatatgttctataagctggagtggatcgagcgggccgtccgggacagcggtctcaaggccaatctcagctttggcgtatcggcactgccgggactgggcagttaccgggagtatgccgcctatgcggagaccgaagccctgcgccggcgtctggcagaggcaggggacgaccgtgtccgggtggatgtgggactccatgccgagtacacctcccatgagggactgatgcgggacgtggcggactatgcccgggaagcgggcctgcgggtgcacctgcacctctccgagacccgcaaggagcatgaggagtgcaagacccggcataacggcctgaccccggcggcactgttcgagcgggtggggctctttgatgtcccggccattgccgcccactgtgtctggatcgaaggggaggactttgatattctccgggataagggcgtgactgtggcgcacaacccctccagcaatatgaagctgggcagcggctttgccccggtgaagaagatgctgggagcgggtatccgggtgggcatcggcactgacggcgccgccagcaataacaacctcaatatgctggaggaggtcaccctggcttcgatgatcggcaagggcatcaccggtgatcccaccttcctggggccgcgccagctgctggaactgagctgccgcaacggcgccctggcccagggccgtaccgactgcggcgccctggaggtgggcagccgggcggacattgtagtctacgacctggacaagccccatctccagccggtgtatgaggcgctgcccaatctcttctatgccgccggtgcctcggacatctgcctcaatatgatcgatggcgaagtggtttaccgggacggcgtgctcacccgcatcgatgaggaaaaggtcatggcggaggcccgcagccgttccgcccggattctctcggaactctgattgcagcaaaacaaaatccctctctcgcgcctgaccgggagggggatttttgcctgtgggagcctggcaaggcccgagccaccgccctggctttcctggcgtccgctctcgcagaacgcccttcccacacctgccccggagtgggttagcctgccggggctctcagcagaccgcaggcgcactgccccgcccctccggcacacgcccccacagacttccctccacctttccgggcgctccatggagaaatctaccgggggatttttgtataaaaccgggattgaagcaggctccggcagcttttataatagaggaggaagctcctgcaaaagcaggggcagaaaccggaaaacagggagggaaaacagcaatgcatcggattctggagcaggtctgtgccatcgccgccccggaacgggcagggacagtcccggatcacctcccggccctgggccctgtggtggggtcggctcatttcctggggtggttcggcagcagctgggacgagaaccgggagagcattgaaatgctgctcatggacggcctggacggggagtatgatttcttccgccggattctgctgctgggatagcgggagagccgtctccgtctgaatcaaaaacagcgcacagcaaagccccctggatagaaccaagtacggttctgttccagggggctttgctttttgttatggggtgtatcagaaatcagcccgggaaagggctgcctgatgccaggggattattcgctgtccgggcgggtcagccagccggtgaggagcgcaagtcctgccactgccagggtccagggagaggcgaggacaaagccgttccagccggtggtgagcagggcaacgcccacagcgcctgcggcggtgagcacagcaggcagacgggacctgccccggttcggatgacgcagggcagccagcaggacagcgacggcggcgcccacagcactgagcagcacaaagggctttccggtcggaatatctgtggtgccgctgggttctgccggctgttccggagccggcgattccggctcttccggggactcagggacagcggaggtatccggttccgatgctgtctccggagccggggtgaccgtattctccggcggcagttctgcaggctccgacg

SEQ ID NO: 3571 - DNA, 15906 bp, Unknown
  16S sequences of unknown bacteria
tctttggcaatattttttacctgtaagagcggttccatatctgtcctccatttcctttttactaaaaagtgcccagaaccgatggcctgggcactttagaccagtaattacttagtcttatttcttataagaattatttcaggtaatctgcaacattctcagcagttacaagtttacactcgataaggtctttctgatctccttcaatagcaccagttgtgaagtactcagcaatcttgtcaacgataccagaaccgataccaaccggatcctgtgcaacttctgcttcccagatctttccaacttccggatcagcaatgtactggcaagcggtctcacctgcatcgaaaccaacgatcttggtgtttgctcctgcagcctggatagaagacagtgcgccgtaaccagtcgggtcacctactacgaagatgtaggaaaggtcatcaccatacttggtgatcaggttctgcatgatatcagcagcttttgcctgatcgttatcagcatcctgagactcgataagagtcagatccttgccgccatcaatagcagcctggatggtctcctcgaaaccagcctgacggtcctgagtagactgtgcggaagcatatgtaatacaacctacgatagatccttccggtgcatgctctgcaacatactcacctgcggtaacaccaccagctttgttgttggaacctacgaatgcaagatactgatccagatactggtcatccagtgtacagtcaaaggtaaacatcttaacgccttctgcgttagctgcctgaactgccggcatagttcctgccgggtcattagcagagaatgcgattgcgtcatatcctgctgcaacatagttgttgatcaggtcagaacacttgtttccgtcaagttcctggtcaccaagtgtcggagccggaataccaagtttttcacactcagctttgataccttcctcaacgctctgatagaaagcatcgttctctgtaccaacgataaatgccagtttcagatctgcaagatcttttgtttcaccagctgctgcagtatcttctgctgcggtgtcttctgctgccgcatcagtagtttcctctgtcgtagtgtctgctgccgcgtcagtagtggtctcgcccttggaaccacaagcggtcagagatgcaaccatcattgttgcgagcagtgctgctaaaacttttttcttcatctttttcaccctcctagttttgaaaagatttatttgagtgtattttaatactcccactcaggaagtatacactttcttaattttataccggctcttattttgctgccggatactctgtacagagcagcctgtaaggtgcttcgtcttcctctatagtcggatatctgccaagcggattcttaaagcggttatctgtattgtcatcattggtcatggaaacctctccaatcagagatggaccaccttccggaatgatgaactcatgatacagatacggatacagagtcatgctctcacccggatgcagggttaccttgcttcctgctggcatagtatattgtcttccgtcctgacaaatcaatacatcggtatcaaggaactcaccggtctccggatctgcattgtagaatgtaaagatgatatcgtttccaccacggttgatgatatcctccatcttattccagtggaaatgcatcggagatacctgaccggaatcacacatcatgatcttctctgcatagggttttttatattttggattatgtacattaccgttacggatggtaatcagagcaagtcccaatgtatcgaaatgtccctcgccataatccgttacatcccaaccaagtgcgttgtcacgaatctcatcgtactcatgacctttttctgcccactcttccggagtgaagctcagatatggcggaagtgcaaatttgtactctgccagtaatgcttcaaatttcttaataaccgcattaatttctgatcttttcataattcatgctccttcttatgctttgattgcattaattttctcaattgccgcttctattttatcttttccctcgataacagagaaccgtaatacattggtctcttttgcaaaaggttccagataatgtactgtatgattttcaatatgatgaagcttcccatatacactggagttggacggttccagtcccagaacataatctccggaagccatggacttccattccataaaataaggaagattcttctgattgaattcaatggtcaggccgatattcaattcatgattggctaccaggaccatagtgttcagattttcatcggactgtatgtcatgtataaatacatactcaccttcattatcaataggtgtctccattttattccaacgatccacatggttctcagagaactcttctctaccgaccacttttctggatggaacataaagttcacaactctcattcaggaacggataacccatattgcaatgatacagaagcatcagtggttctggacgaaatgcctgattttcaatctcgtctgtaacagtgatactgttctctccaaatacactttctatttttctacgcagaatcatgttctcaccaaacagttctgcttccctcatctcaccggaaataaccagcttgcatgtatctccctcagtaatcacatcggtacatacatgttctgccggtgtggttctcatccgtccgtgcatcgggtaatccttgccttctacagtacaaggagcacagatattttccagaccacaagtgaaaaacaatccacccatgatacttctgagagcttcctctccattggtatcatactgatttcttccttccagtccaggttttgcaaggaacgtcatgttcattcctttgtaggaaagatctgtgatatctaacgctttatctgctgcagagtggaagaaaatatcgccacatttcgcttcaatggcattcatgtgttccgcacgtccttctttgtaagtgatcgggcgggcatataccatttgctgaaggcttccgcaatatttcatcaatttcttatccattgattgtctctcctgttctgcttactcaagatttgcatgatatctccagagactcttcatatcaatctgacgctcgtcaatgatcatttttgcaactacatctccgaaaagcagaagactctgttcaaacaaggaagtcatcggctgtacggaatcaatttcatcttccagataattcttggttcttaccggaattcgtaccatgaattcacacagatccttcatttcgctgttcggattagaaccgatatgtacgatctttgctccgattccatgcgctttctttgcgatacccagtggaaaaagagagccgccgcttccagaaccaactaccagaagatctttgtctgtaatagccggttcggtaatttctccaacatagtgggtcttaattccaagatgtgcaagtctcttgcagatagcctggagagaaagaagcactcttccgactcctacaaaatatacctgatccgcttcaagaactgcttttacaaatttttcaacagtttctggatccactgctccgagagccttatccagctcaccaagaacatcttttactgtctgattgtaattctcactgtaatatcccatttctatacctcttggctctatactctcctgctgttgatctcatcttccatagccttcagtatctgcaggcttccgatctgatcatctttcttaatgcaggtacttcctgccacaaaaatatcagcttcaccggacactccataagtattgatattctctggcgaaattcttccatcaagaatcacttttgtgtccaggcctcttgtctttatcatctcatgtaaatcatgaatcttccttgcagaatatgctgtctgtgactctcccttcatctgagcgaaacccggattgatcagcatcagcaataccgcatcacatttatccaaaatgtactcaagctcgtacaacggggttgccggctttaaagcaacaccggcccggatgcctttgctatgaatgtaattcagcataccatccacatgatcacaggtttcaatatgaaacacaatttgagaagcaccagcctcaatcagctcatcaacaaagaactgcggttctgtcaccataacgtgtgcttcaaattccagttttgttttctttcgaagctgctttacagtatccagacccagcggcatactcgggctgaagtgtccgtcaagtatatctacatgaatcatctccagtccggcttcctctaccatccggcattgctgttccaggttacacatatccagtgtaatcatagatggagagatatgacaggattttgcccaaatttcctcgttcatttatccttttctcctacatattgcatattagtgcattgaccttactaacttgttatggacaaatcatacaccaatatcccttttctgtcaatccagcaattcacatttttatgtttttcacaaaacagtatgttttttttgtgtaagttacacaaaaaagagaaacaaagatatttttcgtcaaatagctttgcttctctttagtacattgactttattttaacatttattccagcatttcgccttcaaaggttttgctcacagcattacacactgctccaagaactggcatcttttccatgaacttgacttttttgaccagcgtacggactttcttgttggcaaattttcgctcattgataatgtcttccaatcgcttcagatacttttcctgccagtaaatactatccattccaagcagaataatttcaaagttcataatattctgcatactgataatggcacaggataagtcattaataacttcctgcatgattcgatctgcttctggatcttccatctgacaaaattcacgataatcaatatgtcttccaaaggctgcctctattttttcctccacagccccggatccaatatatgcctccagacagccaatattaccgcatacacatttccgtccatggtggttgatggaaacatgtcccatctctggcggatagccggaattgctctgatatctgtgaccgccaaccatgatgccgctaccgacaccctcttcaataccaagcaccagcacatcctggtaatcacgaccattgccataaagttgttccacaagtgctgcactctgaatgtcatgatccaggaaaaccggaatgccataacgcttctctataggttctgttacatccagattacagatctcatgaaaatggcccggattgatgatccgaccctttttcacatctactggtcccggcgtagccacgccgatagcaataattttctcttcccgctccagcagacgatcaatgaggcaaaatgccacattcatcatctccgctccattttcccagtcccgttccacccgttcataagcaacgattttcaaatccagactgcaaatagctgcttccagacagccacgtccaaacaaaattcccagatatttgggtgccttcgggctcacctccagctttatgggggttcttccaagctttgcctttgtggtgaccgctgtctctttcagatactgctgatcgatcagttcatttacaattgctgagatcgctgtctttgtaagatgcagctcctttgcaagttcaatacgggaagaacatttgcccgttgctataagctggagtaccagccctctgtttctttttttcaaatattctttatttacaccaagtctagccatatcacatttttttagttctctgcaagaaatttctcaactttctctcttgttggcagagatgagatcgctcccttctcctgtacggccagggatccactcacattaccgtattttaccgcttcctgcagcatctcagcattcagctgttccacagaagatacaccgtgattcaaaacgcaggaaagaaagccaccccagaatgcatctccggctccagttgtatcggccacatgtggcactttgaatcccggtaccacgtaggattttccatcatagaagacctctgcaccggcaccacccagagtcagcactgcaaccgcgatatcatactccttcatcacattcaacaggttatcatgaccgcctaccatatcaatttcctcatcagaaagcttcaggaaatctacatacttcagaatagacaatacctttttcgtgcaggcatccttatcatccttccacatcaaattgcggtaattgatatcaaatcctaccagcttacccagttcttttgctctggccatcgcatattctgtagcctctactgccggccctgcagaaaggctgcaggatccagcctgtacgatacgacaatcttccagatcctcatccttgatctcacgtttgtccagcaacatgtctgcacctggttttctcgcaaaagtaaaacttctgtcattgttctcattcagtgatacaaatgccatcgttgtagtagcatcatctgtcatttccggagccagcggggttacatgattctcacgtaaagtttccagaagaaattttccaaaatcatcatttccaaccttgcagtacatgccagcctgaagtccatttcttgccgcactgattgctacatttgcgggtgcaccccctgcattacggatatagcttgcctcttcctgaccaggaaggaaatcaatcaccatctcaccaattgtaataaaatccatacattctcctacctttcccatccttgcatcttgcatacatctttaaagcctttgatactgaaatcataacaataaacaaaaaaaagtcaatccctattttacaacagctccttcaactccagcagatccaggatcgtatcatccacatactccattcccgggatcaatgcaccagaggcgcttttttgcttccggtcataccagcaggtatgcatacccgcctgtctgccgcctgccatatccgcagtgagagaatcaccgatcatcatggtctcctccggcaggattcctggcaactctgtaaagcaaccgtcaaaaaacttctgcgacggtttttccacgcccaactgctcagatacaaagcaatgattaaaataaccgagcatgcccgctttttccagacggttaagctgttgacggtaaggaccattgctggctgcgcagagcatgtatttctcatgaagatatgaaaggatctcaagggctccctctactggaactgcactggtatgaaggcgggatttgaattccttctccattgcttccccgtctgcctgaagacccagctttggcaggattgtctgccagcgaacatgaggaagatctgcgattgaaagctcttttttctctatcctttgccagatcttgtcattttcctcattgaaaatgctcatcatctccgggtgaaaaggcaagccaaatttatggaagctttcttccatagactgctgtgcagccgcatcaaaatcaagcaacgtattatcaatgtctaaaaatatagcttttaattccattatcatttcctctctttttattcctgcaaataatagcagttcccactgcatccacctgaaaacagttcctgcttcatcttctttctgaatagctcttccgactctgcctgttccagaatctccagtgcttttcttagattcctgatatcctgctccatgctgtccacatagttgccccgtcccaccagctttacgtgggtaattccggctttctgaagggcgtataactcacataacccacagccagactgaccgcagatgtagtcggcttctgcatcttcgtctatactgtcagactctccactctcagagcagccctccgattccggactctgttggctcgattctccatacgctcctgtacatctctcgtactgctcgtcactgacctcacccatccagtacggcacccggcacagatgtccaagttcatcacagtgcagagaattgcaaaaggatccgctgaactggcacaattcattgagaacaaatgcctcatactccatctgacctgccttgctgcactgatttcgttccacagcttcgattaccgcctgcatatctgcagtgctgttcttccggtggaaaatgatacgcttcagattcatttccgcaaaagtctccgccacactgctgttcatctctcccagttccccactcaagtggatctcacagttgattccttgctcatgcaaatataacatcagtgccggatccgcaatgatgtagcttctgaatcccatctcaaggcagttggagattatctgtccgatcagcggatactgctccggcaaatagtatagcgaattgaaggtcagatgcactggtttctgatacacatgcatcatggaagccagaatttccagttcctcttcgccaccgatctgtacattacaacagagtacttcccgacgattcagtgccatcatggttccatatttttttgtccatttatatggtacatacccgcagaaaaattcatctgctccggcttcacaataccgaatatactcatctacagagcctaatcctgctactattttcatactcatttcctgtctattataaaagattcgcaacaagacggtcaattccagatttcatcaactgctccgcctgttccggcatccgcagcaacgtatcatccaaggcaaacagcgaattgtaacgtcccaccattttcagatgatccgggtataacaacaccttgttctggcagtaccgcggacagttcaccggctctttttgcctgccgcgctcatctgtggtacagcaggcatacaggggacaatattgcgatgtatttgtttgataaaaaggaaaataaagactgttatgtccttgcggatattcctgctcatgtccgcagcattcccattcatagcgatgaattgcaaactcatcctgaagatatttacgataattctcaagtccaagaggattctctttcagaagcatttgatccccttgtttgaaacctatgcgcggatctttcttatacttgttcaaaaggatccccagaaccggaatcagatgtgaagtcatctgtccgaccagacctgccaggccccagtcattgacgatcacctccagctcccggtcatgcccgtcacaccactgatccagcttctgcaataactgttccatcgacttcaacacggattccttctggcacgtaaagaccacggttacctgtaacgattccctctgcgctttctgaagcagagcaaacaacatttcatctgaaggaaacagatgtgaacaaaattgattgccaatgtacaggcgatccggtcttctctgcgccagcgggtatttttccaggtgttgcttcttccaataatattttataaaatcttccagtgatcggtgactgtattgttcatatagttccgggcgatcaagagcgatagcaaattcggggaattccattcctgatactgtgcacctttccattcgcatgttttttgtatgcagatctgcattttccgtatgctctccatccgactttttggctttctgcatttctgcaaaccacatctgcttctgctcttcccagtcctttgcatgaacttgatctagctttgcaggataaccagtcagtgcctccgccacgccactatcatcctccgtcaatttcaactgaatataatagctgtactgccccagcagtttccgaaccagttcctgatactgctccctttccccgacctgttccatccatacaatataattctgaacaaacggctctgggtctccttcttcgatctccggagtttgaatcgtcatttcctcgtaatccgtctttttcaaatcataaaaacaaagccggatcttctccggccctggtatcttctttgctgttcgaaatgcaaacccctcttccgaaagctctgtgatccgcacttccttcttgcccacaaatcccgccagcaatccaaacggaatcataggcacaccatatagttttctttgtttcatattttcagatttcacttgagcttcctcttatacaatcttcctttcaacaccaccacagtatctccttcttcaatctgcagatcatagagccactgatcttcctgtcttaatactgtctcatttccttcggaatcggtcaaaagagcgaggaccgtcaccgcctgatcggcgggacgttcctcgcatccatagtcatcttccaggatctgagtcagaatatatgtcttctcgttcattctgccagacctcatttcttttcaattcgattatcgctcttcgcggaagtatgccagtcccaggcttgcaggcggctgactctcacgcttgcttcggatgctggttacaaccagtaccacaagtgttaccacatacggaatcattttataaagctcctgatactccatatgatccattccggtcggaatatagagatacagaatgtacagaccgccaaacaggaaggaagccagcacactcagattcggtctccatatggtaaagattaccagtgcaatggcaagccatcctctgtcaccaaatgcatcattggaccagacaccgcatgcatagtccatcacataatagagtccgccaagtccggcgatcatacagcctatgcatgttgtcacatatttatattttgccacattgataccagcagcatcagcggtacttggattttctcccaccgcacgcagatgaagaccgattctggtatgattcagaatataggaagctgccagtgcaacggcaactgccaggtaagccaggaacccatacgataaaaacagttttccaaaccatccaagctttgctgcaaatggaagagatttactgaaaaatccactggtcgcactcagggcgatcgatggcacatcactgttgaccagtttgatcagggatccaccaaagaaattaccaaagccaacaccgaaagtagtcattgcaagaccggtcacattctgattggcccgaagagttacggtcaaaaagcagtacaggattcccatcaggagggaaccaagcagacagcacaccatcgggatcaggatcgccagcacaccattcatggatgcaccttccgggatcgaatgttcatagaaaaaggatccgatcacaccacagattgctcctacatacataacacccggaattcccagattcaggttacctgacttctccgtcacgatctcaccggtacttccatagagaagcggaattccctgtacgattgctctcggaataaatgcaagtaaaaaattccacatgattactgtacctccttcgctgcttttttgcgggactgaagctggtatgcaataaagaactcacatccgatgataaagaacaggatgatacctgtcagaatatcggaaaatgactgattcagtccaaagtttgtagatatctcactggctccacgattcatgaatatgatcaggaaactggagaataccatcgtcagcgggttaaattttgacatccaggataccataacagcggtaaatccttgtcctcctgcgatcgttgtcgtgatcgtgtgattgatgccgcccacaagcagaagtcctaccagaccgcagacagcaccggagagtgccatggttctcataattaccttttccactttgattccaacgtatttcgctgtattttcgctctctcccacaacagagatctcataaccatgcttgctgtatttcagataaatatacataaatactgtgatcagcactgctactaagatgctcagcagatattttgatccaaatgcctgcggaagccagccaacgttggaattctgattgatgataccaatctttcctgatccttttggcacctcccatacaattgtgaagaatgcaaccagctgtgttgcaatatagttcatcatcaatgtggaaagtgtctcattggtgttccattttgctttgaaaaatgccgggataaatgcccagaaagcacctgccgcaatactggtcacgatcatgcacacaacaaccagtgctgccggaagtttctcagccaggcagatcatgcatgctgcggaggcaagtcctccaatcagtacctgtccttccccaccaatgttccagaatttcattttaaaagccggagtcagtgccagcgagatcaacagaaggatcgcaatattctgaaatgtgatccatgtctttctggcagagccaaaggctcctgcgatgatcgactgaaatacctggatcgggttggttcctgtcaggatcattgttacaactgcgcagacaatcaatgccagcacaatggcaatcgcacggatgcctactgactgataccagggaagcgcatcccgttttactatatgaaaaagaggttcttttttctcatcattcatgatcttcggttcctcccattctggtcatcatcattccgacctcattcttatctgtggttcttgcatctacgataccgctgacctgtcctccgcaaagtaccatgatccggtcagacagttccaccagtacatccagatcttctccgacaaagataactgccacgccctttttcttctgctcattgagcagatcatagattgtataggacgaattgatatccagtccacggactgcataagcggtcagaagcacggtcggcgaggaagcgatctcacgccccagcaataccttctgtacatttcctccagaaagtctgcggaccggagtagtgatacccggtgtcacaactgccagatcctttaccacactttctgccagctttctggacggtttccgatttacaaacggagtctttcctttccggaaggagcgaagcatcatgttatcagtcagatccatatttcctacaagtcccatgccaagacgatcctcgggaacgaaagaaagagaaactcccatctctgcgatcttcaatggatcttttccgatcagcatctctttacttccgtccggctcgatataattgatggttccagactctataggctgaagtcctgcaatcgcttccagcagttccttctgaccacagccggagatacctgcaataccgaggatctcgccactgttggcagtaaatgatacatctttcagttttacaataccttcttcattccgaatcgtaagaccctctacctcgatccttggttttggatcgaccggatccggtctttcaatattcagctgtacagcatggcctaccatcatatctgtcatggtatttacatctgtatcttttgtcaccaggcttccaatataacggcctcctctgagaactgccacacggtcagacagagatttcacctcatgcatcttatgcgtaatgatgacaatggcttttccatcatctcgcattttacgaagcacacggaacagtttttctgtctcctgcggagtcagcacggcggtcggctcatcaaggatcagaatatctgctccacgatacagtaccttcacaatttcaaccgtctgtttctgtgacacagacatgtcgtagatcttctgtttcggatcaacttcaaatccatatttattacaaatattttcaatctttttggcagcttcttttatgttcagctttccttccagaccaagaataatattttcagtggccgataatacgtctaccagcttaaaatgctgatgtaccataccgattcccagattcagcgcgtcctttggtgatgcgatcaccacattctgcccattgatcatgatctgtccctgatccgggaaataaatacctgaaagcatattcatcaacgtggtcttgccacttccattctcgccaaggagtgccaggatctcgcctttatagatatccagatccacatcttcatttgcaatgactgcaccaaaggtcttcgtcactccacgcattgaaactgcagctacttttgtctccatcttttgtcccctttcctcttatggaccgtccgtcccttttctgtaaggatgatattcactctcacagaaaaagggcggcgcggcgtaaaacgctgtgccgccctgtatctactgcaaggctgttgttcagattagaatacagtgttcagaaggttgattccatcgatctgtacattgaagtacggagcggaacgatactctgactcatggaagtatccatcgcttacaacctcatgatccggtgcgtaatctgcatcggtatcgacatctgcttcgtagctggtcagctctgcaccctctacggtgaaggttgtggtatcaaatacatgaagggtacccgctttgattgcctctgctgctgcatcaattgcttccttagttccctctgctacattggttcccagttcgctcagctcaacagatccagtctcaagagttccggtccagtcagcatcgatctgagttccttctgctacacagttgatcgcatactcgaagtacggctcccagttcactctggaagatacaaggaaggtgttcgggcaagcacttgcggtgcttccgttataggatacgttcggtacaccagcagtctcgcatgcggtcggagctcccatggagtctgcatgctggctgatcagtacacaaccatcttcgatcagtttgttagcgccctctttctcagcggtctcatcataccaggaaccggtaaaggttacttccatggtagcgctcgggcaaacagaacgtgcgccaaggaaataagaagtatatccggagataacctctgcataggtgtaagctccaacatatcccatcttagcctgatcctcggtgatctcaccgttctcgatcatctcattcagtttcatacctgctgcgataccagcaagataacgtccatcatagatagaagcgaatgcattgtggaagttatccagaccctcggtatgagccttggttccggttgcatggctgaactgtacttccggatactcttttgcagcctcgatcacataatcctcatgtccaaagctgtctgcaaaaatgaaatcacatcctgcatctgcaagctcgcaggctgcatcgtagcactcctgtccttccggaatattggtttttgccacatactcaacacccattttctcacaagcagcttttgctgcgttcatgaagttcaggtcataagtagagttctcatcatgcaggaaaatgaaaccagctttcagtccagcggtggatgcctctgcggtatcagtatctcctgcctcttcggttgctgctgcgtcagtgctgtctgcggtatcagctgcagtatcagagctgctggatccacatcctgccagtgtggtggcagccagtgccataacggtaagcagacttacgattttcttcttcatacgttctcctcctgtttttcctcatctgaggctcttatgaggttagcttataacgtaacgggctattttgtcaagagaaggtgaaaaattcttaaattttgtgcaaattttcgccatttctataatatactctgaattttattatgaagtgtagcttatatatagcatttttttaaacctgcgttcagatcacatgtatttctatctgtcttatatgtctacttattataattctgtacctcagcaagtaacggaatcgatggagctgccccttttctggtaaccgcaatggcagaggctttcgatgcctgatccatcgcttcctttgcagaaagtccaccaaggattcctcctataaagtaacctgaaaaggtatctccggcagcagtggtatcaactgcctgtactttatagatagactgacataccgtttctttctgatttttaaatacagatccctcgcttcccatagtcagtacgatcgttgcctgcgggaattttttcagaagatcatccgcaatctgctcccaggactcttcgcccttatcttcttttccaaggatctgtgcagcttccacttcattcaggataaagtagttgatcacatccagcggaagtgcaagaattttttcattcat

SEQ ID NO: 3572 - DNA, 1527 bp, Unknown
  16S sequences of unknown bacteria
tctttttcggggaatttgtacggacgcttgaagactttaaaccgaaacggagcgcgagatatggggaaaaagaagaataggcttttaggttttctgtgctttgccgccgttttaattccgcttttctcgcttaatgttttcgccgcgggtgaggatatttttactttgggagataagataatccgtgatgtatacaaccatattgccggaatatctactgtgttggcggcgcttatgtcggcaatagccgtaataacggtaaagctcggcggcactcaacaaaagtctgatgcaggctgggcttggcttaaaagaatctgggcttcgtgggcggttattaacggaataggagcgtttatagcctacattcagcctttatttgcaggctacaaccgactgccttgaggtaagctatgattaaccttatattaaaggatttggtgttatggcttttcggactgttccttgatttaatgaattattgcgccgacgcgcttttggggcttatgaacacggatctttcgtactttgaaagtaatgtgccgattatattaaagctgtacggcgtattcgtcgcaataggctgggggtttttaataggcaactgcgcctttcagtgcctgaaagctatgtttgcggggttgggctttgaaaccgaatcgcccgcaatattgcttgtgcgcacttttcttttcggttttctccttataatgtccaaacaggtctgcgagatgggactttcaatcggcaaaaccttaatggagcttataggtttgcccgaaaaggcaagcataacctttcccgacgacagtatgttccccgaccttacaagctcttggcttttaattgttattattggggttttgataggggcgcagctgattaaattattttttgagataggcgaacgttatgttgttgtagcaatattaacgcttttcagcccgattgcttttgcaatgggcggcagccgctccacaaaggatatatgctccggatttattcggacatacgcctcaatgatactgctgcttgtgtctaatgtcttatttttaaagcttatctattccgcgttatcctcaatgccggacggcgtgatgattttgccgtggacggtgcttatagtgggcattgcgagggtggcgcgtaaggcagataacctgctttcaaaaatagggcttaacccgtcctttacgggtgatccgttaggtaacggaatgggcaaggcggttgcatttatggcggcaagaagcattttaagctcggcgacacattcagctaataggcatagtaatacggcaggaaaaaacaggtctgaatttaaagctgctaacacaggaaatactcataaccgcagcaatgcaagcagcagaaacacggcgcaaaacagcagcagagcgaatatgggattcaacggcggcagtgtaaataattcaagtcatgcagggtttaacagctctgtacgcaacagttcgtcggtgaattcggcagacttcgggaaaaccgccgttacaggcacaaattcaa

SEQ ID NO: 3573 - DNA, 19022 bp, Unknown
  16S sequences of unknown bacteria
cggtagctccacttgtctgttagatacgactgattgtaaatatatcatagtacagcaagatgaaggagtcaagaaatcgccgtgttaatcacaattcatcccaccacttatagaagagggggatttcttgctcacggcgtgttaaaaacagctgctctatatcgtactatatcgctattgcattttcattaaccgcatcaattgctttaactatttttccccatattcccatatctgtccgctgtcgagtttactctcataaaggaattctgcaacagctttcgttgtcgcgcctgcctcaacgattttcctgacctcaggaaaatcgcaactaacatcgtgacctgaattttcgcacgctaacattgcccgtttaattatcttgaaaagttttcccatttcaattttatcattttcaattcaattttatataagatgtgcttgcacgttgcaaaaagagcctgcaccatattgatgcagaccctttatctctttatttaatctgtgttccctccggaactatgtcatctacgaatataacctgacatccgcatgcattgttggttgccgcaagcagcataccgttgctctgaacgcctgttattcttgtaggctctaagtttgccacaacaataatcttctttccgattaaatcctcagggagataatactgcttcagcgatgaaacaatcactctctccttgataccgtcaaacagtgtaatcttgtagcagctgtgtgactttctgatttcctgacacttgagcaccttgcacactctgaaatccatagttgcaaagtcatcaatggtaatctggtctttaaccggctctacaggatcaggatcgccgtactctatctctatctttctttcaggctctgctgcttcctcctctaccggcggatgcagctcctcttctgtcttaggtgttgagaaatcaagcaggtgcagatatctttccttatcaatagcatacaggaacagatacagtctaggtcccttgtccttagctataaggagcttgtacacgctcttgaagaatgcgccctgaagcttcttgaggttcggagcatcttcaccgtacacgtgcttaggtatagcatacagctctgaattgagagtatcaagatcatattccttatctctgaggaatgaaagcagaagctcaatctcttttttctggtcatcgtcaagtgactcgtaaagctcccagtctcttgttgttctcagcttgtttgcctggtcaggcgcgcatatttcaagccacgcctttgcaagattaagtctttccttgaaatcctcatacttgtacggctgatttatcttctcgaatacagtttccatcataggcacgttgaagtcaactattgagcccagctgcgccagaagtgacatcggaactgtcttgatatcgcttccctcgtgcagacagttttccattacaactgtcataaactcattggctgtgccgtttttgtattcattgtactgcttgtcaaattcaaaatactgacgaagtataccgtcatcgaagcagaagtcaaatgccttggtcggctcgcatcttgagtacagccacagtataacctcaggctgatagaactgaagcagtgttgcaggtgtcatattaagtcccgatgagcctgacatcttgcctgcaacgcctttaattcctatgaactcatatccctggaattccggagcatcgctgttgaagatttttttgcagataaccttgcttgtgtcatagcttccgccgggacttgcatggtcttttccgcccggttcgaagtcaacaccctcgtatacccatctcattgcccagtcgattttccacgccagcttgcagttgtagtttgttttaaaatcaaatgttcccttgtgtccgcaggcacattcgtattccgcaatctttgtttcatcgtcgtatttaactattgtagtagtgtctttgccacattcaggacagtatatgcttgcaggatagtatctgtctctttcgccctcctctgcgtcctgagttctgaagctgtcgagaatatcaaatatctcttttcttttttccattgccagcagaatatattctgtatatttgcctgaacggtacatctcagcctgatatttgaaatccatatctatatggaagtccttgattgactcaagaaattcatcttcaaagtatgaagcataggtgccgtttcctggctcaaacggattaggaacatctacatacggaaatcctatgtatttctccatatccttgtttacctttgcaacatttacaggcacttttctcagtctgtccagttcgtcccatgagaaaagaagttttgcttttttgcctgctctttcgagagccttgcatacgaagtacgctgtagctatatctctgaaatttcctatatgaattgaacctgacgggctgatgcctgcagcgcacacgtattcttccttgtcaggtctttttctgattattcgctgagcgatttcatctgaccaatgcataaaaacacctctttcttgttttctttgtaatatattatttaaaccatctcttgtttttcttcgcaaaaatattcttctgttttttaatcggagcaaatattgcttttttctgtctttcgcttacactgaacatcatatttgcatcgcgtttgcgtctttttataaagattattgcaatgataagcagtattattataaccggtatcagcactgcaagtcttgcaagccagccgaccttgttaggctgcttgagaagttctccgagatttttgctgtctgtgagaattttgcgtccctcagcctccttgtattttgaggatacagttcccattgagtcaaggtaggctgcaacggcgtaccacgccttgagctcctgcttgcccgccttgagtatgtaatcctcatagttgagaaccatattgccgcctttgtcctttggaactatagacagaagtccgtaggatttttcctttacgcttgcgagcatctggcaggaataaaggtctgcaacaactctgtaaagcttgctgttttcaagggctgtcgcttcttctccgactccctgtttaatatcaaccgcgcggtttaatatgagtctgctgctgtttatcgtgtacgacataccgcttatgtaaagtcttgcctcaggcatcatatccgatactgtagcgtcaacctctgcaagcgccttgagctccttgcctgtaaggtacatacttaccagcggatatcccggagtgccgtctgcacctgtgccaagtgaaagtacgttgaaagcatccgctgtagttatactgccaagcggaagcgatgctctcacgatgcccgacggaacaaccgccacgtctacattttcgtaatccttgccctctgctttctttatcgcatatatgtatgagtctgaaagcagattgcccagagtatcctctccctgtttttggccgaacgtatttatatcagtaaatatgatcttgcttcttgcaagcactgtatcaagtgaatatccgaactttgaaaaatatttgctgtctgctatgcctctgaaatatgaaagctgattcagagtgtctgcatcctcttcaacgctgctgttaagaggtataagtctgtatgtatcaagactgtatttgcccgatgcgtcctttttgaatgtcacataccctatgttgtgagtatatgaaccgcaggaagcgattacggtatctccgactttgataggctgatccagctcagtatgagtatgtccgctgatgataaggtttatgtcgggaaccgcctctgcaagctgttcatcctcagactcttccttatcctctgccgtaccgctgtgggaaagacatactatcatatctatgtccttttcgtttgccttgatagctttgactatttctttggctgtattaatctggtccttgaaatatgtgccgctttcaggcgcatattcgtccgactgtttgccgaagatgccaaagactgcaatttttacaccgtttttctctataacggtatagctttcctctgcgccgtaggttttaaatgcctgctgaagatttgctccgtcctctgccagatctttttctgccagcgtcttgtcccagtcaatattgcctataacaagctttggaagttccagcttatctcccgctttgttcttggaaacagcgtttttgagcatattggcaagacctttggacctgtagtcaaactcgtggttgcccagtgtgaatgcatcatatcccagataagccatcattctaagctccgcagcatatccctcaaatattgtctgatatgcgcttcccatggagaaatcgccgccgtcgaatacaaagctgtcgtttttgtaatccggtgatatttccttgaaagcagtcgccattctcgcaaacccgccctgtgaggtgtttttgccgtttttgactacagtttcggagtcaagatgagaatgcatatcatgagtgaatatgattgatgctacgcctttttcgatactgctttcagcctcaggctcatttaccccggtatctgcaggagtctgctgctgcgcattattgctgtcgttattctgattattcttattttgcgagctgctgttgtttttgctgctgctgttattcctgttgttattcttattactgttgttgtttggtttttcaggcttggtatcaggcgtggtcggagtaaccggctcggtaggttccactgcaggaggctctgtacttcctcccggattttcgccctccggctcggcccatacgagcatcggtgaaaatatgctcatggctataaccagcgctcccagtgccagacaaatcctttttttcataataaaatcccccgaataattagaattctgctgattttggtgttcttgggaacggcagtacatctctgatgttgctcattcctgtaatatacattataattctttcaaatcccagtccgtagcctgcgtgcttaactccgccgtattttctgaggtcaagataccaccagtaatcatctttggtcataccgtttgcttcgattttctttacaagctcgtcgtatctttcttctctctggctgccgccgataatctcgccaacgcccggaaccagaaggtcaactgccgcaactgtcttgccgtcatcgttgagtctcatatagaaagccttgatttctttcgggtagtcagttacgaatacaggttttttgaatacctcttcggtaatgtatctttcgtgctctgtctgcaggtctatgccccactcaacagggtactggaatttcctgtctgattttttaagaatgtcaactgcttctgtgtaggttattcttgcaaagtccgaattaacgatattgtcaagtctgtcaagcagtcccttgtctatgaagcgattgaagaattccatttcctcaggcgccttttcgagtacatagctgataacgtatttaatcatatcctctgccagtaccataatatcctcaagttctgcaaatgcgatttcaggctctatcatccagaactctgacgcgtgtcttgcagtgtttgaattttcggctctgaaagtaggtccgaaagtatatatgtttctgaaagccatagccatagcctcaccctcaagctgtccgcttactgtaaggtttgcaggctttgcaaagaaatctccgctgaaatctatagtgccgtcatcattctttggaatgttgtgaagatccatagttgtaacctggaacatttctcccgctccctcgcagtccgatgctgtgattataggggtgtgagcatatacgaaatctctgtcctggaagaactgatgaagcgcataggctgtaagcgatctcactctgaatactgcggagaaggtattgcttctcggtcttaaatgagctatctctcttaaaaattccatgctgtgcttctttggctgaagcggatagtcaggtgttgaggttccctctacctcaataccggtcgctttgatttcaaaaggctgctttgcccccggagtgggaacaacagtgcctgttactttgagcgctgttgcaacatatgctttggaaatctcttcgaagtttgagataaactcttcttcgtataccacctgtacggatttaaagaatgtaccatcgttaagctctataaatccgaatttatttgaatttctgttgtttctcacccagccgtgaacaacaacttgtttgttttcgtattctgccgtatttctaaacagatctctcagtctaatactgtccatttgtctaactcctttaatatgctcacaagagaagccgcataccgcaggcttctctgtttgttgcctttatttaaatatctccataatagtgtattctctggtgccgtcaggcgtctgcacttcaaccacttcacctgcttttttgcccagcagcgccgctcctacaggcgagtcatttgaaatcttgccctctacaggatcggcctctgaaactccgacgattttgaattccattacatcgccgtcttccatatccttgattttaacgttctgtcctatgctgacctgatcgtttgcggcttcgctgccgtctataatcttggcttttctgattttatcctcaagctgaagtatcttaacctcaagctctgcctgctcgttcttggccgcatcgtattcggagttctcggaaaggtctccgtatgatatagcttccttgagcttctctgcaacttctttcctgcctactgcaaccagatggtcgtgctcggcaactattttgtcaaacccctcctgggttagtaagatttcttctgacattctgtaatctcccttcaaccagttaattaaaatattatatcaacaaatacatttaaagtaaacaccctgtgcaaatctgcatttacagctgtttgtcctcatcaggtatgttttctatgatttcgcttatcgaaacatcaggcgcggccacaccgtttgaaataagttcatcttcgtcttcttccatatgaacagccggaagtgtgattgtgaatttggctccctgctccatattctcggcagtaatgctgccgccgtgtctttcgattatatcctttgtaatggcaaggcctattccgaagttgccgccctcgcccttataaaatctgtcgaatatgtgcggcagatcgttttcgctgatgcccttgccgtcgtctgcaattgatattgtaatctcatctcctacagaggctgtaatggccagcttgttttcggcatatctgatgccgtttgacattacattcgatatagccttggttatctgtctttcgtcggccttgacaaagtagttgccgccgtcgagactctcgattataacgacgccttttttctcgcctataacgcagacctcttctctgcagtattcgataacctgtcttaaatctattactgtcatatcctcttctctgataggattttcgtccattctggatatgtacagcatttcatcaacaagctcggacatcttcttgctttcggttattattacctgagccgcgctctgatgatttttgagtacgtttgtggcaattccctccgcatatccctgtatggacataagcggagttctaagctcgtgggaggcgttctggaatatgagcttctggagcttctgggaagccataagctcatctgactgctcctccataaagtctgccatttccataaattccgtatagtatatgcggtccttgctgcggtcgccgtcctcctcgccgagtccctgtatgaattccttgagtccgtaaagagagctgcttatgctctttgtcattacaaagcctatgaaaatagcgataagtcctaccatggcaataaccagcagcagcaccttgtttaccgaatcaatcatcccatttacagatgatatgtttgtatatatcagaacattgcttttttcttcgtcatagactctgaatttcgctgtgctgatgcgatatgtttctccgtcaatctcggcttcgactatgacttttcttgcaatttcctcactgttttcgttatagtagctgataagctttttttctatgtcggtggcataatcgttaagatactctgcatcatcaagcaccaccatctgtgttgtaaccgcattgctgctgctgttaaaactatctgtgagcagattcatttcggcttctgattttgacagatcgctgtcatttctgccgtttttgctctggattttgtctattttttcctgaagattatccatagcaacatgatattctctgaaactgttcatgctctgctcaacctgattgtctacatatccgcttacaactatgttaaacagcagcattaccgcaacagaaactatcacaactataactatgggcaatccaaacagtcttcgtcttaggcttttcattgtttattcctttattgccagcttgaagccgtagccccatacggttacgatctccacgttgcttccctgctggttcatttttttgcggatccgtttgatattgtcatcggtaactctggtttcaacctcactggtatatccccagattttttcaagaagctcgtctctcgataccgcattaccgtttttttccataagatactgcagtacattgagctccgtaattgtcagtttaaggtcggcccccttgcattttgcaaccttctgcttaggcattatctctatatcgccgtattcgagcttttcgtcataaggtatggccttgtcaagctccacacgtctgaacatggcctttaccctcattgtaagcattacaggcgaaaacggttttgtgaaatagtcgtcgcagcctaaggtaatgcctgtaacatagtctgctgtcgtatctcttgccgtaagtatcagtatgggaaccgatgagaatttccttattgtgttgcatatggaaagtccgtctgttcccggcatcataacatcaagtattaccagatcgctgggtttctgtttgaatttctccaaaagcgcatctccggtttcaaaggtttcaacctcgtagccctcttcttcgaggaaggactgtatcagctgacgtatgttaagctcatcatccgctgcataaatcagtttgctcatattctatacctctcaggtttctaaattacattttaaacatagtcgatagtattatactatatttcacttgggttttccagttttttatgacaggtgtcattgaaaaaacacataataaagtatataattgtctgacggaggtaattcaaatggatttaaacagtgtaatatatgatataagcgggtggtttacgggaaatgacgccggcacctgcgccatgcttgacgatatacaggagatgatttcagagaagaatttcgacagggctctggaactttcagtgcagcttgcagaaacagccgatgcccgcgcgaaagctgtgaattctgacacagccgaatactataactttatggagcctatggaggaggtagtctacagggaattttacaagcctgaaaagcagcttgaatacgcggactttccctttgccgacatctacacgctgtgcggagatatattgtttgagcttgaaagatacaaggaaagcgctgcgttttaccgcaaggctatcaaatggaaccccattgcaatgaaatatacctggagatatatggaggccgaaaagaaaagcggcagtatcgacaaatacggcctgctggcgcttcacgctttttcaaacgtgttcaagacctctgatcttttacagtgctatatggatctggcatattacttcacagaaaagcagtggtttgcagaggctgccggctgctatgtgcttattctcagatatgacccggactacaagcctgcctcggcttctctgactgtgcttgagcagcttctgggagaggaattctatatgccgactctgcttgatgtgcgcaaatacgctcacgacataggcttccctctgggggttaacaaaacgcttttaaacagcgcctacgcctatgctctcgatgacctgcaatccaagaatatggagtctgctctgtattttcttgatatcgtctatgatctgtcccagaatgatgaagtaaagactcttcttgacagcatcaaaacaaagataagagaaaacagaacaggtattgaataatataacgggaggtaattatgaaactgatgcacgtgacaattcagacggataagtttgaaaaggaaattgagttttatgaaaaatttgcgggacttaaagtaatgcaggatatgcgccctatgggaaagaatatagtgtttctcgccgaggacaagaccgatacctgcattgagataatcgaaaacaatgatgcagagaacgcaggaaacatcaacctgtcaataggctttcacgcagaggatacagacgcaaagcgaaatgaacttgcaacggcaggctttgagccgacgcctgtgatatcgcctatgccgggtgtcagctttttcttcgtcaaagaccctgcgggagttactgtgcagtttatctgataaatcggggtatatattttcggaaaaggaacaaaaaagagtaattcaggatttgagttgctctttttcgttatctgatgtatttaccacagtcccataatatgctgcatcacaaggctcatggccgtaattccgacccagcagcaggctcccagaagcagaggcttaccgccgcttttaacaagcttaattacattgctgccaaggcctactgctgccatggccataacaatcaggaacttgcttatctctttgagcggcgcaaaaaagctttctgaaactccgaaatgcaccgatattgtggtaaccgcagaagcgcagataaaccataatatgaacatagggaacgctctttttaagctgaacttgccggagcccgacgccttgcctgcattaacaagcgccagcaccagtgttatcggaataatggcaagagttcttgtcagcttgactgtaacggccttgtcaagagtctgatttcccagataccacatactgtcccatgtagaagccgcagcggtaactgacgatgtatcgtttacggcagttcccgcaaatataccgaaagcctctcccgatgcggtatcaaagcctatggtgtgtccaagagccggaaatacaagggccgcaataacgttaaaaagaaaaatcaccgatattgcctgcgcaacctcatcatcgtccgctcctatcacaggagctgttgccgcaatggcagagccgccgcatatagatgagcccacgcctatcagaatacttgtgtttgaatctatttttgcccatttgtgcattacaaaagctataacaagcgatattgatattgtgcacagaatgataggaagcgactgtctgcctgtgctcaaaatcacattgagattaagaccaaagcccagaaatacaaccgctgtctgaagtatcttctttgacacgaagcttacgcccggtctgcacttctccctcggactccaaaacagcgcgataaccatacctgcgactatggctgtcacaggtccgcctattaccggaaccagtctgccgaaagcccacgcaggcacagcaatggcaaggcacaccagtatccccggaatattatttttaaaagatttcataagattattctcctgtggtttattctctgttctaatactaacacaggattttagaattccgcgtttaaagaatagtcagaaaataccattacctctcccctgttgtttttcgggtctgtatgcagtataattatttttatatgacatttgatttcagacattctgtgacacatatttacgaaaggagccgtaatgaaactgtttagaaaaatatggggcgattccagctttgaacgctatgctttctggattttaattgcagtcgagctgctgatgtcctttacatttttaggctacatacatatgccgcctctttctgtcactatagcatatatccccgttataattgcgggagcgctgtttggtcctgtcgaatcggcaataacaggctttgttttcgggctttcaagtatgtacaaggcctcagccgcatatgttatggatgcggatatggttttttcgccgtttctcagcgggtttcccgcaggcagcctctggctcagcataggctcgcggactcttttcgggcttctgataggtctggcatttatgctggcctcaaagagcaggcacaagcgcctgtggagaatagtcgtttccgtttttgcaaccaagctgtatgagttctgggtttaccttgcaatggggattttctttcccgaagcaggatatgactatacctatacctttaaaatcaatgccggagaaatagccatagctgttttctgcgccgttataattgagcttctgtacgcgctgtatcacagcgatatgctccagaatacaaagcggtgcatcgaccagtcggtacataatccgtatacatcaaaaaacaccagtctgttttttcttgcctttgagcttgctacattgtgtatggcggtatttgcaacgatatatttctctcagcgggcgacgtatatgcttagacagcacagcataacggtttcgcaggcaataagtcaggatatgctgcatttgcagatacagttccttattgcgcttatgtccctgaaccttatatccgtaatccttttaatctgcatctacaaatatatggcataccgcgagtacaggagagaagtggactttcttacaggtgctatgggccgcagactgtttctccataactgcaacagagtgcttgagagcagtgaagcctcgggctggttcctgtttatcgacgtggaccatttcaaggccatcaacgacacctacggccacagtgtgggcgatacggttctgaaagaggtttcggcaatacttcacagtgtttttgcaggcagcggtacgataggcagagtcggcggcgatgagtttgctgccattatcgaaaagcctctgtcagagcacgatatgcggcagaagcttgactattttcttaaaaagatttcagacatacacaccgatactaaagtaagctgcagtataggcgcctgttgctttacatgctctattgatatagacactcttatggcgcagacagatgaggttctctatgaggcaaaggagcgcggcagagcctgctatgttatacgagagctttaacgcacacgataatccgtaaaagtaaaacgaccttgagctgacaaaagtcaaatcaaagtcgtttttaatattgcttaatgctaaatcatctcatatttacagcctgcaaaggctatgtcaaagctgcatatgtttttgtatttgcagtaggtgcaggcgctcatatttatgtccttctgcttaggcgcaacctttatatctcctgaaactataccctcgcaggtttcctttaccctgtctgtaatatcgtttaaaagctccataaattcatctctttcaaacagtctgtcgtttccggagcctgaaattccctttggggaggtttttaactgaactatgcttgagcggccgtcaaatttgcctgcgatgctttctattaccacagggtcatttacgattgctccctccagtctgaacgaatttactattttactttcaagactgcttcctatatcctctctgctttctttgctcatatcaatcatcggattttcaatcaggaagtaaaatacacctgccggctggcgatgctgcctgccgtactcaagtcctgccttgagataaagcataagctgcagcttccagcccgcctttgcctctttgacactgaatttttcactgccggatttgtagtctataaccttgacgctgccgtcaggaagtatatcaattctgtcaatgatgccctcgatatataccttttcatcgcctgcatctatttctatcggcggtatgctgccgcctcttctaaacggcgcctcaaaggccgcttctttgatactgcccgctctgacatgggatattaaaacccacccgatgtattccactatttccgaaagccttgcggtacggtattcctcttctccggtatgagctaaaataccatcaccgtagcctgctatttcctctgccagtatttcttttacaagagcctggtattcttcgtaggttatcgtcatccacagggatttttcatcggtaatgtccgttccatcagttgtaagcttttcggaaagcttcatcagcacctcgtgatacacatcaccgatttcacgccctgccatttcaaatattcttctctcctttggcctcagtccgtaatccacaaaatgagcaaaaggacacctgcagtatttctcaagccttgacggtgaaagcgataaatctctgccgtcttttttgtaaagcttcagggctttttcctgctccagcttatagtccctgaccgtaaaaaacagtccctcttcaagtctgtcaagagtttccctgtcgttttctctgtaccagccaagagcctgcttccatacgtctgccacaggctcgccgtcaagggcttctctaagcgcatctgccatatgcggcacagacgcctccgctcccgcaacaagctccgccgcctcgcctttgctgacagcatcaagctcctcggtaagcgacgggaatattcttttgagggtggctataatcggggaaggcttctgctgctgtccgccgctgtcggtgcttgaggttcctatccagagatactccgacggagccgcaaggcttctgtaaattcccagagtttcctcctgcgttttcactctgcccagcctgcctatatgtatatcctttgactcaagcagctccagttcatcatcactcaaaagcccctcatcggaagcgcctttggggaatactccctcatcagccccgattataacgagggctttgatatcccccagtctgcttctctgggctgttcccgcagaaatgccgtcgcacacaggaggaagcacgcctgtttccatatcctcaaagcctgctttaagcagcctttctatatcctttgtgctgtatttctcatcacctataagctcgctcagctgctccataagccctgccgcaatattccatatctgcgcgctttcctgcgcctcctctataaagccggcctctgcctgccgcaaagccgcctcctctattctttcgggcatatggcatacctctgtgaggaagctgtaaagagcctttattttttctcctgccgtatgagcttttttgaggctttcatcgaagcctgacagcatctgtataatcctgcttctgatgtcgttaagggcagcaagctcttcctccgaatattctttatgccccttggcaaactctttcttccagccggagcctgttattctgtatttaagtgaatagttttcaagctcctctatttcatcctccgtaaaatccgtaaagccgcttttgaggactctgaaaattctcgaggactcatagcccgaaactattatctccataaccgtcagtatgaatatgacggcggcgctggatactatttttcgtttgacgtctataaacacagggatatcatatctttcaaacacccttgtaatcacaggcgctgttttatccatactgttgcagattaccgcaatatctctgtatttaagccccttgtctctgacaagctccataatatacaaagctgcggtttcggcctcctgatacacccctgccgcatgaacaagggttataccgccgcagtcctccacaggctctgcaggcagactgtaaagctgcctttcgagatgctcaatagctacgcttctgtttttgtgatacccctctatagcctttacagacaagtctgctcccatatcaaaggcaagcttttcaagctgcgcaataaccgcgcctgtaatctcaaaaatctgcgcatcattgcctccctcatcataggtcatcacaatattgacgtcgccggcattcctgataagctctccgatcatatcaaaattcttgggggtgaagcagtcaaagccgtatatccatatggtcctgcccgctacgaagcgagcctccggtatcctgctaactatggtgtctatatagtcctcgctgtctgtatatctgccctcaatggctttctcatattctttgaatatgcagcatatgtccttgagttttttgcgtagcagactgctctcatcaagcccctctgcaacagcttcaaggccctcgcagttcataccgtgctgtttgacttcggatatgaagttgttgaccatttcaacaaaggagttcttttcttcaaagcccttgtatatctcaaggttctccttttgtctgagtatgatgcctgtgagcagcatctgcctgccgtatttgtctatgagaactctgccgtccctgcctgtcgcgttaagcaccttgtcgcccagtcttgaaaatccgagaatttcgatgtcaggaagtcccttgactttcatatgcctgaatgccctgcgctccgcctccagcgtatactggtcgggaactatgacgaatgaaccgggtgtaatgttttcgaatatgaatttttctttgtctgtgctttctcttgcataatatatattaagcatatcatcacctaaataagattgagtatttcttctgcggtttcaactgtataatcagggcctgcttctccgtttatctcttcgggagtgactgcaagctgccagcctaccagcaccgattttactcctgcgttcctcgcgcacataatgtcatacatgctgtcgcctatcatcagagcgttttcgggctttgacgcaagttttttgagggctatgtttacaggttcaggatctggcttgtgtctgtccgtatcatcacatgtaacaagcgcatcaaaataatccgagagtccgtagctttcaagcccctctaccgtagtcacccccgctcttgaggtaaccaccgccgttttgatacctcttgctttaagctctgcaagcagctctttcatccccggaaaaactttaatcctctctccgaaattgtttctgtgatagcttctgtatatttcaaccgcctcgtcggggtcgttatcggggaacatttttaccatactgtcccttaatatttccccaaaggttctgtaaatcctctcaagatcaccttctcttcctgtcagcgtcacaaaggtatgctgccacgagccgacgatgacatctgtagtgtccataagtgttccgtcaaaatcaaataaaactgtatctatcatttttaatttccctttcagatttatattttcattttatcacaggctgccaatgttttacactcatattttgccgtcaaaagaaaacattaatcagcaggggggtgattaaatgattaataacgttgaaatgcttaactatatcaggcagaatgttgaaatgggtatccatggcataactcacatactcgacagggtttccgatgataagctcaaaaccgcgcttgaggatcagcgcagggagtacggcaaaatctacggagccgcagacaaagccataagacagctgggacatcagcctgtccatgttgacaagatggctaaaataggctctgatatgtccactgtttttaaaacaatggcagacggctcggattcaaagattgcggaaatgatgatacagggaaacactatgggcgccatcaaaattatgcgaaagctgggctcctatgacggaggcagcagagatatccacaatctcgcaaacaagctgcttgataccgagcaaagcaacatcgaccagatgaagcagtttctgtgacaaaagagcccaaaaggctcttttgctctactcgatatatttgtctatgaagttatatacggttttccagtacagcctgtagtctttgagcatagatgatgcgtgctgtgcgccgggcaccaccagaagctgtttttcacaggcggctgcctcatacaccctgtaaacattttcgacaggcacaaacgtgtcgtcctctccgtgtatgaaaagaatcggagtttctgatttttttacctgctccagcgccgaagcctcttcaaagctgtagcctgcgcatatctttgtaactatatccgccgcccagataaaaggataatacggcatatgaaacagggttttgccctcatattcaacttcatctctcaccgaggcatagccgcagtcctctattatacatctgacatttgacggcagcttctctcccgataacatcattgcagtagcgccgcccatagacgccccgtaaattattatctccgggttttcgtattcttcgttgagccagtctatccacgaaagcacatcaagtctgtcgtgccagcccattcctatgtagcttccctcgcttttgccctgccctctcatatcgggcaggatcagattgtagcctctggcataaaacccgccgataagcggcgccatactcctgccgctgtcatcatagccgtgcagcgcaatcacccatacatcagagctttgctttaccatatagccgtgcagtttaagtccgtcatacgaggttatatcggtctgctcataatcaagctccacctgtttaaattccaggctcttgtcttctatttcaaagcccatctggttttcttcggcagagaaaacaaaatctctgttgccgtcggaggctatggctattctgtagattacaatgcctgccgccgcagttattacgatacatactgcaaatattataattattatctttattgcttttttcatacgctgctccggtgtttactgactgcttatatattatcatatactgcatatcgtttggtttcctgtttatgctacatcaattatacattattattatgggttttaggtgaaaacttcttgcaaaatccaccggtctatggtaaattaaataggtcacggaggattgaccgagtggctaaggagctcgcctggaaagcgagtaaggtgtaacagccccgcgggttcgagtcccgtgtcctccgccagaattcagagacctgtttcaggtctcttttttattgaaatttcaacgttttccacgtttttatatagacaaatccatcccataaaaaaatgcccaaaaggtg

SEQ ID NO: 3574 - DNA, 32759 bp, Unknown
  16S sequences of unknown bacteria
atcaaagttgtacagtacggttgcggtaagatgagcaagtacattctccgttatctgcatgaacacggcgcacagatagtcggcgctatcgatgtcaatcccgcagttgttggacaggatgtcggtgattttgcggggctcgggttgaaaaccggtgttatcatctccaacgatgctgacaaagttctcgattcgtgcgatgcggacgttgccattgtaacattgttcagtttcatcggcgacatctatgagcatgtggaaaaatgcgtggcacgcggtataaatgtaattaccacctgcgaagaagcaattttcccgtggacgacatctgcggcgcaaatcaaccgtcttgatgctcttgcaaaagaaaccggctgcacaattacgggcagcggaatgcaggacatattctggatcaacatggttgctctggttgccggcggttgccacaagattacaaaaatcaagggcgcatacagttacaacgttgacgaatacggtctggcacttgcgaaagcccacggttgcgacctgtccaaagaagaatttgaacagcagatagcccgccccgattcctttgaaccgtcatacgcatggaatgcaagcgaagcgttggcaaacaaactcgggctgaccgttaaatccattacgcagaaacacgttccttatatcatcgaccacgacatcgattcttccactctcggcaaaaccattaaagcaggtcgctgcataggtatgtccgcggttgttacgattgagaccatgcagggcataactattgaggaagaaaccataggcaaggtttacggtcccgatgacggcgatatgtgcgattggaaaatttcgggtgaacccgatacggagttccatgttgtcaaacctgccaccgtggaacacacctgcgctacggttgtcaacagacttccgagccttcttgccgctcccgcaggctatgtgaccgccgatcaactcgctcccaacgaatacctgacctatccgatggaattctattgctgaaccttttgtcgaagaagttgataaacagattttttgtccccggtcgtttttcgatcgggggcagttttatgcgttggcttttgtcgcatggtattcgtttcgatatacataagaagttttattgaaatttgtcttgatttttttagaaacttgtgttataatatatcaaaatataggattgccatttattgattcaaggaggacgatatattgattatcggtaaaaaaggaaaatattttactgttgaagagaaaaagacccattggaatgtatttcgtcgtgagggtacatcaggcgtaaattacatgatatataagacgacgtgtccgactgtcgaagatctcgcccgatatgtggaaaagagtgatttggtaaaatagatttttgtgtatgaaaagccaaaactcaattaaaaaatggatttttatatgatataataacatcgataaaaagatcgacggcgggtttgagtatattacagattatatttgttatattggcaaaacgtcaagggcttgcctgaaccacttgtggcgggcgcaagccgcaaccttccatatttcagacagacgtgaaaaatcgtgtttccgtatggcggtcactatgattgacaattatgcttattttcgttaaagtgtctgaaataccgatacttgttgagatttatgatgtttgataaattaaagaaacgcttctcccgaaaagaaaaaatagattatgttttgccgtcgcatacggaaatagttgatatgctttacgataagcatcttgatttttcggacgaaacagttataaaagttgtttacggcgcgaataatgagcacagagttgtaatcctgaaaaacagcgatgggtattttcggtatatattcgaacgcatagaagaatatgatgcggatgaaatgacgtatttttcggggtatcccgaccgattgccggcagagtggcgagaggtagatgatatgcgtttttcggctttcggttctgagaaagaggcatggaatgatctgatagcaacttccgagtacaagacgtatttcaatcgttaatctaaaaatgaagcggtaagtaagactcaatatcgattgtgttgtattgaaaagtatatataaaaacaggcagccttttgaggttgcctgttttaagttgtaatgtgttatccgataagtcctataataaatattgaaattatcatcagcggaagaacaatgagaaaataccatttcatccaaggataaactttaagtcctttgcccgtgttcgcatcttctttttatttgtcaaagccccgtccgaattttttcacgcagaacagcgatatataagcaaaccgggcggtcggtgaatgttatcggcaagcagggttttgctgtcgaggatacatcgtccgccatcttggtgaaaagcatttgaaagcgcatcgaattcagcaccgtaatcaaagcaggcgggggaaactgtatatcatttcaatgaatagcggataactgaaaacagcgcataaaaattcaatagttcggaagcctttcaagtaacgtatgtccgttctctttcagccacttgtttctttctttataatcgggtaatatacggctcacttcccgataaaacgcggcagaatggttcatctgttttatgtggcagagttcgtgaactaccacgccgtcgagcacttcgggcggagcaagcatcaaaagcgcattaaaactcaaattgcctgccgacgagcagctgccccagcgcgaccgttgtttgcgaatggttattttaccgtatttaacgccgacggcgggcgcaaaatatgccacacgttccggtatatgttcttttgccgcggcgaccaactctttgagttcggtttccgtaaactttccgactgttgcaaggcgcgcgccgcgttctttgacctttttctgtgttttttctatccaatccgtttttgtgtttatgaatgagtaaatctgcgcctttgacgcaaatcgcggcgcttttataattacggaaccgtcgtcgcagacttttatcgctatcgtttttcttttgcttctgattattttatacatcggatattcctccttttgaaattataccattttcgcggactcatatcaagaataaaaacacattttttttcaattttgcttgcgaaatcaaaattgatgtgatataattaaaaaaacggcaaaaaggagtattttatatgtctgttgctgaaaaactgaacagttcgccgatgtatctgatatgcggcggaatcatcgcctttgtcgctgttgtttgcgtgatttttatggtgcgcgcatatcggcagggaaaggctctcggaatggataccgtcaaaatgaagcgtgttatcgtttcaagcgcaacgttttcggtgcttccgagcatcggaattttgcttggcgtaatcgccctttcgggcagtctcggaatcccgtggccttggttgcgtctttccgttatcggagcgctgcactatgaaacgcaggtcgcgcagggcgcggcggaacaggtcggaatgaaagaactttcgtcaagcgaaatgacggcttcgggctttgcgaccatagcgcttttgatgagtatttgcattatctggggaatggtactttccgtcctcttcaacaaaaagtatacgaaaaaacttgtttcaaccaataaaaagaatgtcggcgcaggcttcggagataccgcaatgaccgcaatgtttatcggtcttgtcagcgcgtatatcggcagctacataggctcttttgcttcctccgagggtttgttcaccttcaaaggcgattggacgcctttgcttgtggttgcggtttccgctgctgttatggctcttttcgtatacctttcatccaaaaagaaatttgcttgggttgacagcttttcgattgccgtcagtatgcttgtcggaatggcggcggcagtagttgtcaaactcatataagggggaacgggagaatggacgaaaataaagatttaaactgggaaaaatacagtaaaaaaactcatataatcggaagaaccgtcagcattatcgcgcttgttatgcttgtcggcgcgccgttccttatcggcacttatctcggcgcaatgcccgaccttgccgcaaccgcgaaaggctttgtcgcggtcggaattgtatggtttgtcagcagtatcgccgaatttcttatttatacacccatgctcggttctggaggcggctatcttgcgtttataacgggaaatctgataaatatgaagataccgtgcgccgtcaatgcccgcgatatggtcggcgcaaaaacgggcactcgcgaaaacgagataatctcgacgctttctattgcaacttcttcgcttgttacgatagttgttcttgctgtcggcgttgcgatacttacgccgcttcgccccgtgcttgaaagtccgactctccagcctgcgtttgcaaacgtcgttcccgctcttttcggcgcgatggcatacaaatattatcgcaaaaatataaaggtcgcaatagcgccgcttgttttgatgagcgttctttttattcttgttccgtcgcttgtatcctcgacgagttttatgattattccgtcgggcgcaatagcgataggcatagcgtttttcttctataaaaagggaaagagggcaaacaaatgattcatcttctttggataattccgctctgcattatcggtgcgcttttgctgctcgttctcgtcgccgtgataaaaacgctgcttacccccgcaaaagtttccgattataaggcgaacgaagacgaaaacgaatctcttcgtcttgccgaaaaactgtctgcgatgatcaggtatgacacgacttcgcatgcgggtgttgatgaagcggaaaaattccgcggctttcataaagtcttggaagaacttttccctcttgtgcataaaaacctcgaaaaaaccgaaattgacggaaatctgctctattattggaaaggtaaaagccgcgaaaagccgatacttctgatgagccatcaggatgttgtccccgcagagggtgtttggaaacatgaacctttttcgggtgatattgcaggcggtaaagttcacggcaggggagcgtccgatacaaaatgctccgttatggctttttttgaagcggttgagcaacttctcgcagaggggtacgaacccgatgttgacgtatatcttgcgtcttcctgcaccgaagagtgggcgggtgacggcgcgccgaaaatagttgaagaactgaaacgccgcggtgttgaactgtttttgctctgcgatgagggcggcggaataatcagcgaacccatcggcggaatccacggcaactttgcaatggttggcatttttgaaaagggtaaaggtgacgttgaatttaccgcaaaaagcacaggcggtcatgcaagcgccccgtcgaaaaacacacctatcgcaagacttgccgcctttgtgaatgaggtggaaacaaaatctcctttcaaaaagaaaatgatgccagaggttgccgcaatgttcaaggcgcttgctccgtatgcttcattcggacttcggctcattctcggaaatctttggcttttcaaacctcttcttgccgctcttcttccaaacatcagtgcacaggcgggcgctatgttgaaaactacgattgcctttactatgcagtctggctcggacgcctacaatgtcattccgcaggaagcaacgcttggcgcaaatatgcgttttattccgcatcagggtgaaaaagaaagccttgaaatcatcacggctcttgcaaaaaaacacggtcttgaaacccgcgtgcttcatgcaaatgattacaccgaacctgtcgatattcacggcgaggcgtatacgctttttacaaaagtcattgccgatactttccccgggcttccgtcatcgccttatgttatgacgggcgccaccgacgcacagttctaccagccgatatgcaaaaactgtctgcgttttgctcccgttatctacggtcccgaacagatgaaaggtatgcacggacttgacgagaacattgagtataactgtctgcccggcgcggtaaggttttataagaatctgataaaggcgcaaaagaggtgatttgtttgaaaatgcttaacggcgaggaattcagttttagttgtttttgcaatcactcttatactttgtttgacagttgcaagaaagactatgggtgtattattatattgcacgacgggctcaataaaaacgcgcagataatgagtccgacaccttcggaaattgatgagataaacaattatccgaataccgaccttgtccggattacggggcttgaccaagcaggttttgagtattttatcaaaaactacggtcacaaactgaaaatcgttgattttttcaaacttaaatcggtagaagacttgtctctgctcggaacgcttccgaatcttgaatatgtaagcctttttcataatcaaagaactacatccctgtgggatatgagcggcaataaatctttgaaggggctttctatattggatttcagcaggcttaaaagcattgacggtatcggggcagctcctgcattaaaatattttaatatcggaaacgccgtttggtctcgctctgttatagattcttttatgcctctttcgaataccaatttggaatgtgtgaatttcagcgggaaaaaaattgcagacggaaacttttcgtttcttgaaacaatgccgtatttgaaatatttttcgggatatatgcttaccacagaacagtgcgcatggttgtttgaaaattatccgcaagttgatattttcccgaaaggaacacaacccgacaggctgaaaggcgtcgtttacttcgacgattatcccgattattcgggaaagtcggacggtcacgtcgcttgtatggtaggaaaaggcaaacgtgtatttgcccgtgcgggaaacgaagcaaaaatacaaaaatgtattgaagagtttgctttactgaaagaaaaatgcagagggaaaacctatcgggaatgctttgaataataacagaaaaaaagcctctgaaatgcataagaccgtaaaaacagcatacatttacaaaaaatatccgacgcgaattttgaggtttgcgtcggataatctatgtgtaccgcatatcggtataacattctttttatttgcgcagatatgcgtgttttgtcaatatttgaagccgtcgctgaaaagcgacggcttcaaaactatatgatattttcagacggttggtatatcagtcgttgaccttcttctttttaatgcaaacggctgcgcccgcaagtgcggtcagagccataatgctccagaagaaaacgctgagttcatcgctcgtcggaggtgtttctttcggaggatcgttttcgttgtctattgtgattcttccgagaggtgcggcatactcttcgcctacaacaccgccgagtttatcggttatatattcaacaagaacttcatcaagaagtatgcctgtatcaagttgctcggtcgaacttgcgaacgcatagtaagtgtcaccgcctgcggcaacaaagttgtttgtgataacggcatattttgcgtttttgtcaaacggcttgccgttcacttcggttattcttactctctgaatggttttcggtccgaaataggatgagccgggatattcggtgtccgctttgtcgtatgtcggtttggtataaaccgtaaacttaatgcctgcaacctgcggaaaaccgccgaggctttcgggaagtgcctgcgtggacgcttcaagagcttcgagcagctgctgaccggaaacataaacaatcgcaaggctgttgccgaacgggagaactgtattaatgtctttcttcgtcagatctcctttatggagccaagcgcggattccgccgccgtttgtaagagcaacaacattctcttcgggaacggtaagttcaaccgtgctcttgattttccacatcatagcatccgtgataaggtcgccgaggtttgtttcttcggttctgtttccgggtgctttgtcgccgttgagttcaacttcggattttgcaacaacggctccgaattcagcgtcgatacgcgcgatgattttgtttgcttccgcctcaaccgccgcgtcgcttccgccctcgtattttttcatatcgagaagttcgtttttctcgatcttctttgttgcgttgtcaataacgataacgccgatatttgcaaatgccgttcccgttgactgaatgggaagtttttcttcgccgtaacttgtcataacggtgtgagagtgaccgtcgataatgaaatcaacgtttgtaagcgctttataaaggtcgtaagatgtattgggctcagaacttgcgtcaacgccgaggtgaacgataccgataacaacatccgccccgtttgatttaagcgtatcaacctctttttgagcttccgctttcattttgtcacccgcaaggaaagagagccccttgatgagcgccggatttgcttttgtctgcgcttcgggagtttcgagaccgaaaaatccgaccttgacatccccgaggtcttttatcgcagatgcgtcatagagcagttttccgtccgctccgagaacgtttgcgcaaagaaccttgcctttgaatttcgacaggttgctctgtgcctgagccgcaccgtagtcgaattcgtggttgccgagagttacgaagtcgtatccgacagcgttcatcatctcaatcgcgtcagcacctttggaaacgctgacgtatgcggaaccctgagaaaagtcgcctgcgtctacgagaagcactttcgcgcccttagcctcgtaatcggccttgactgccgcgagttttgcgtatcccgtgatggaaccgtgaacgtcgtttgtgtgaagaataacggtcttgccgtcatattcacctgcggcgaacgcggggagcgctgcaaggctgagaaccaagcagacggtcagcaggatactgaaaagcctttttttcatgtgtttacctcctgatctgatttccgaagccggcatagaattttccggctccgatttattgttccgttgtcattgtatcacagtttggcacgaaatacaagaggaaaaagacatttttttaactttttgaaaagattattcatttttcaagtgcataaagcgtaatataattgttttcggcataaaaatgcggtgggtcgaaaatcgacccaccgaaaatgttttaatgttaatttatttaataagtccgctttctttgagcagaatttcgatatccgtgcccttgactttcttcataacgagtttcagtgcctctttttccgcaaatgaaagttttacgtcggttatgggctttttgtctatcgcgtagtagcacgctctcaacagttcgcggacatcgtatttgctgccccagacttcaggaacgcctctgtcaacattgagcagagtatagaccgcttccataccggtacggatagaatattccgtggtgaatatcgtatctctcggagtttccgcgaactgaccgaggaatgcgaagttgacggcgccgtgaggaacaacaagcggacggtcctcttcttttctcggctggaagaatgcgttgatgaacggcatgaagcaggtcgttgtattgcaggcattctttgcaagctcgtcaatttcgtttgtcggaactccgatatgataaagccattcgcggcagacttcttcgcccgtgcagtcgcgcattgcctttttgacgtagttcccctctttgtttgtgttcagcgcatatacccaaacaagaactgtgtttttgtcctgtgctctgaactgcggctgacggtttatagtccaagacagataccaattgtccgtactgtcttttacggtaacgataccgcctgtcgtaactttgccggctctcgggtctctcttgcagatgtccatgatatggcggataactttttcgtccgatgttgcaacggtggcgctcatccagtttgtcgcttcaaagtcgttgcagaatttgtcgggattgccgtattcgccgtttttagcctgtcttgcgatattcttccaaagatcccaggattcgccgacgccgtcgcgaacatttgaaatatcgggtgcatgggtctggtcgccgtagcaggaagtgtccgtgcagcagccgtttgttatgaatacaagatcgtcttcgataaggtcaatggtctgctctttgccgtcttttacataaactatctgttttgcaatttttttgtcgccgttgtcttcgattataacattcttgacgtccataccgtattcaatggtgacgccgtgcgattcaagatactttacaaggggaagtatcatgctttcgtactgattgtattttgtgaatctcaatgcgctgaaatcgggaagaccatcgatatggtgaacgtatctgcaaaggtatctcttcatttcaagcgcgctcgaccaacgctggaacgcaaacatcgtctgccaataaagccagaagtttgttgaccagaacgattcgggaagaacgtcggaaatctttttgtcttcaaggtctttctcgggcgtcatgaagagttttgaaagcgccaaagccgattctttatcaagagcaaatttcttgtccgtatgtgcgtcttcgccgcagtttacggtcgctctgcaaagcgaatagttcgggtcgtgcttgttgagccaataatattcgtcgagaacggagactcccggcgtttcaatggagggaacgtctctgaacatatcccacataacttcgaaatggttatccatctcgcgtccgccgcgcatatagaagccttttgtcacatctttgcgtccgtcgcaactgccgcccgccaaatcaagtttttcgagaaggtgaatgtgttcgcctttcatctgtccgtcacggacaagatagaacgccgcggaaagcccggcaagacccgttccgatgatataagccgattttttgtcaacgccttccggcttttccggacgagcgaaagattcatagttacctgccgaataatacataatggattacctccgatttattttttctgtctttattatactcacttttcggcgaattacaataaacaaaaaaagacccgtgataaagaacttatcacgggaatataatctgtaaaaaattttatcatcttcggggatttgataagattatgctcttctcttatccgttctgaaccgttcaagcgctgatgagatatttccttgaatggcgagcgccaaccgttcaacgagttgttcgggttcttctttcatgtcgtcgcaaatccaatccaacataacgcctaccaatatataagtatatatttttgcaatgaattgtttgtcatcgtcgcgcacggacatcccgacggactgctcctccacaacgcccataacaaggtcgtcggtaagagggttcaggtatctttcgacgcgctctctgctgacacacctgtaaacattcattatgaatggcttattttctttgaccgcataaaaaatctgaataagtccctgttcccatgtatcatgcgtctttttttctttcagagcctttgacgcgtcttccagacaagaccattccacaaggtcgtaaatatccttgaaatgataataaaacgtcatgcggttaattccgcagtcttcggttatgtcgttgacggttattttgttcaacggctttttgagcaaaagatttttcagcgatgtttcaagcgcacgtttcgttatctgcgacattttgtaactccagacattcaattattttttttcttattgtatcataaaatttatctgattgcaagaaaaatcgtatgaataaaaatcgggaaccccgtcaagagattcccgatgtgatttacagaataatgcagataagcccgccgctgccctcattgattattttttgaagcgtttcctgaacttttccgcgcgcttcctgcggcattttgttcaacttcgcattcagcccctcgttgacaagttcatgaagcgattttccgaaaatattgctctcccatatctttttcgggtcttcttcaaaccctgtcagcaaaaatctgacaagttcttccgattgtttttcgttgcccacaatgggggagacttcggtctgaatatctgctttgattatatggtacgacggcgcggacgctttaagtcgaacgccgaacctgttgccctgttttactatttcaggctcatcgagtgacagttcgtcaatgctcggagttacgatgccgtaaccggtcgcgtcagccgattcaagtgcatccgaaagtttgtcatacacctgttttgactgcgaaagttgtgttacaagcgaaataaggtctccgtcgtcttcaagttttactcctgttgcatcgccgagaactttataaaagagcagtttcggcagatcgagcgttattcgcactataccggttccgagatctgttttttcggacttcgcggagcaaatgtattcgttcttttcgagccgttccgcaatttttgaaacttcgcttatgcggcaacagtcttttgtcgcttcacgcacatctttatatacgctttctttcagcgcgtgcccgtcttcaagcgatgaaacccaagagggaacggcaactcttatttcccgaacagggaattcacaaagtatctgcccgagaatatactttatctcttcttcgccgagtgtcagacaatctgcgggaatgaccgttacgccgtactcgtccgccatcgaacgcgccaaaagttttgtcggttcggattccggctgcgtggaattgagcagtacgacaaacggctttccgaggtctttcaattcggatatgacgcgcgtctccgcttctatgtaatcgtcacgcggaatatctcctattgtgccgtcggtggtaacaacaagccctatcgtcgaatgttcggttataactttttgcgtgcctatctccgccgccatattgaacggtacctgttcgtcgaaccacggtgtcatgaccattctcggataattgttttcgatatatccgagcgcactcggcacaatatatcccacgcagtcaataagccttatgcgcatatcaatattgtcgtcaacgcatatattgaccgcttcgttgggaatgaacttcggctctgttgtcattatggttcgtcccgccgccgattgcggcagttcgtcaaccgctctgtcgcgtttgtagtctccgtcaatgttcggaattacaagcgcttccataaattttttgatgaatgtggacttacccgtgcgcacaggtcccacgacacctatataaatgtctccgtccgtgcgcgtcgatatatccctgtaaatatcggttcccgtcatagtttacctccgaaaaattcgttttggtaataactatgacgggaaatactcatttatgcgttgattttgacggctaaaacattttcttctttttaaaatatatgatttcaagtataacggaaacgacggcgataacgataaccccgagataaccgtgttcccattgaagttcaggcatgtttctgaaattcattccgtaccaccccgtaagaagtgtcaagggcaagaataaggttgttactattgtaagaatgcacataaccttgttttgctttgcgtcctgctttgcctgataaagttcccgtaattgcagaatgttttcttgcagaagtcgaatatggtctccaagcctgtcggctctgccaccgagtcttgaccaaagttcggtttccttaattatttgtgttttgccgtatgccccgagtatatcggacatatcggatatctgttcgtaaaatgcgtgcatttctgagagttttttgcgttctttcgtaatcttgtcaaaaaagtcattcggcagattttccgaaatggaatcttcaagagtttcaatctttttttcgatatgggaaagatacatcaaatcgttttcaaatgaactttcaatgatcctgaaaagcagcgtgtcggaactgttgaaatcgcagagcttttcggcttgaacctttatccattgcttgatgtttccgacatcttcaatcaaaacaagtttgttatcaaccaaataaaaaagaaatgatacgggcggttttgtgtcgtcacttttgttcggtattctgactgttccccaaatacagtttgcgaaaacatccgctttgcaataccttgcggcgcctttaccgtgcagcacatccttgacatgcaaaaactcatttttccgttctgcaaattcttccgcagtcataattgtcagtatgggcgaagaggcattgttttcagcagataaaagagtaccgccgtttttttctgttcgtatatattcggtcatatctttctttctcctaaatagccgttttattaaattatctgattactgttttcagatagaggcaatgggtgtaaacggatacctttatgcgttaatgtttgtatatataaaatatagcacattataagaaaaaaatcaagatatcggttatgtttaaatcagacactcattttttataaccggaaagaatcttacggatatacatcttcaaattttttaaaaacgcaacttccgtttcatgggcgagttttgttcttgaagtcgcggcctttatttccgtgagaagaagattggcaagttcgtcggcaagtttaccgccccggacttccatatatcatgccttttgcttggggctgtatttgttgcgcgcggtatgccagccatatcgtttcttctgacattttgtttctctttcttctgaaaaattcaatatgacaaactaattgtatcttataataaaaccatataatattcaatataatcttcaatagaaaaatccaccgtaattttatcaaaaacatggcgactgagtccgataggggtattttgaaacgaagtttttgagataaaaagtgccacaaaaagtggcacaaatttttattttattgcgcttcaagtgtctttttcagagataatcaatatataaaaaatccccataaccagcggtttttttccgtggttatgggatttttaaatggtggaggcggggagagttgaactcccgtccgaaagaacattcccaagactttctacgagtgtagtttatcgtttgaattcggcggcaggggaacaataaacaaatcctctgtcgctataaacggaattaagccgcaaaggagtcccgataccctccgatgtcgttcaccgctgaatcgacgccctgttcttcgccgcggtactcaaagagaggacggctgccgggttaggcagctgctaattctgttctattagcgtttaattttaagtttaggccttttaagtgattgcccgacactactcgcttatcaaggttcagcgcccccgtcgaaaaccggtacgcccccgaatacggtgtacctgcgtgaataataaatccgcgcaagcacacatttggcgttcccgaggtgattcgaacacccgacctaccgcttaggaggcggtcgctctatcctgctgagctacggaaacattttttagaccgtattctgtttcaatatattataccataaaacaagcgtgttttcaagcctttttcatgattgtttttatttttttgcataattaccgcttaattccttgcggtattaggcggatttatgcttaaggaaaaatccaaatttctgaaaaacgcagaggattcaccgttttgggttgatgaactcgcgggcaatttgagatattttgaatttgactatgttcggtgtaattactatttaatctataataaaaccgaaagaaaatacaatattacgccgtgggaagacgaaacatatacttttttggtcttcggctttgatgcgcagagcggaattatttgcgttttcgaagaagaaagcacattgggtagatgaaaattaaaaaaattcgccgagagactgtcctctcgtcgtttttgttcgtataaaggattgaagaatgaaaaatgcgagagatattcgtcgtagatgtcttatattgtgaaaaagtgtgtgggtcacaaaaaaatgcgcaaagggttgttgacgaatatgtgttaaaatggtataatgttattataaaattcagattggagatttcagaatgacgatagaaaaaaaacttgacggaacgtctttgacgataactcttgaaggcagattggacaccaacaccgcacctttgcttgaagcggaacttaaacagtctctgaacgggataaccgagcttacgtttgatttcagcgggcttgcgtatatttcttccgcggggctccgcgttttgcttgccgcgcaaaaagttatgaacaggcagggcagtatgctgctgaaaaacgtaaacgacgatataaatgaagtttttgaaataaccgggttttccgatatattgacgatcgaaagataaagttatgttgattaaaactcttttacaattagccttgattgcggttttgcccgttatcctctccgttataatatattttatcgagaaaacgcggcttgccaaaaagattccgtatgcgttgaatcagatcatggtcggaatccttttcggcggactggcggttctcggaacggagttcggtgttgatataggcggcgcggtgatgaatgcccgcgatgcggctcccatatgcgcggggcttttgttcggcgcgccggcgggtattatcgcaggtgcaatcggcggcgtggaacggtggtttgccgttttgtggggcgcgggtgtttacacgcaactggcgtgctccgtatctacggttcttgccggtgtgtttgcggcgcttcttcgaaagtttatgtttgacaacaagcgtcccaaatggttttatgggcttgccgtcggcataatcacggaagttatacatatgctgatgattttcctgacgaacatgagagatgttcataccgcattttcgtttgtccgcacctgttcgcttccgatgatagcgataaacgcgattgctgttatggcggcggttgctcttgtgtctttcctcgggaggggaggaacaaaaaggaaacatcacggtataaagaaaatatcgcagacattccagcgctggctgctgctttgcgttgtggcgggattcttgctgaccacattgtttacatgggctttgcagacggaactttccgcaaatgacgcttatgagttggaaaaactcaatattgaagacgtcagacaggatattctcgacgcttcaaacgagaatttgctgcgcctgacaaaacaaataacagccgaaatcgaaagagcgtatctgcccaattcggatttactgaaatcgcttgcggaaaaatatgatgtcgcggaaatcaacatgattgacgaggcgggtataataattgcttcgacagagcccgaattcatgtattacaacatgcgcggcggggagcaatcggcggcgtttcttgtgcttcttgacgggcaaacgaccgaatttgttcagagttatatgccgacatcttccaacccgaacattctgcgcaaatatgcgggaatcgctttggacggcggtgggtttgttcaggttgcgtacgatgccgaacgttttcaaaaagacatagatgataaagtcgtaggcgctacccgcaaccgtcgcgtgggcgaggacggctgtataataattgccgacgaaaacggaaatatcgtcagcgaccgccatggcggcgagggcagagacctcggcgctacgggcataaatctcgataaagagaaaatttccgaaaatcagatatttgaaaccgaagtttacggcgaaaaagcatattgtgtttatgttgtttcggagggatattacataattgcgacgatgccgaaagcggaagcgttgttttcgcgtgatatttccgtttatgtaacggtatttatggagtttgtcgtattcggcgttttgtttatatttgtgtatttccttatcaaaaaacttgtggttgacaatatggaaaaggtcaaccgttctctttccgagataaccggaggaaatctcgatgttgtagtagatgtccgttcaaatgaagagtttgcgtcgctttcggacgacataaactcaactgttttgacgttgaaacggtatatcgcggaagcggcggcaaggatagaccgtgaacttgaattcgcaaaagcaattcagcattccgcaattccgtcggtgttcccgcctttcccgggacattcggaatttgacatattcgcttcgatgtatacggcaaaagaggtcggcggtgatttctacgacttctattttgttggcgaagacagaatagcatttcttgtcgcggacgtttcgggtaagggcattcccgcggctatgtttatgatgacgtcaaagacgataatcaaaggatatgccgaatcgggaataccggttaacgatgtattcaccgtcgcaaacgagaaactttgcgagagcaacgaggctggaatgttcgtaaccgcgtggatgggcgtgttggaattgaaaaccggacttgtcgagttcgcgaatgcgggacataatcctccgcttgtacgccataggaacggaaaatttgaatatttgcgtgtccgtcccgggcttgttcttgcgggcatggaggacatcaaatacaagaagaacgagttgaaactctctgcgggcgatgaaatctttctatacacggacggcgtgacggaagcgacaaatgaagacgacgccctttacggcgaagagcgacttctttcatttctgaatacgctcggcgacatatcgagccaagaaatctgcaacgcagtaaaggaagatgtctcacgctttgtcggagaaactccgcagtccgatgatattacaatgctttgtttgaaatacaacgggggtgttaccgtgaaagaaatgactattgaagcgaccgtcgcaaatatcgaaaaggtgacggactttgtaaacgaacaactgcaagaagttgggtgtccgatgaaagcgcagacgcagatagatattgcgatagacgaacttttcggcaacattgcgcattatgcttatgacccgaatgtcggtcccgcaaccgttcgtgtcgaagttccgaaagagccactgtccgttattataacgtttatagacaacggcgtgccgtatgatcctctcaaaaaagcagaccccgatataactctttcggctgacgacagggaagtcggcgggcttgggatattcctcgtaaaaaagacgatggatgacgtttcatacgaatataaaaacggacagaatattcttcggatcaagaaatctttctgataggagtatacaggtaaaaaaatgaaaacgaaaagaaatgccgcacagggcagactcttcgcgctgtttgattatcagcgcattgcggaaaacccgagacttgcaaaaatgatcgaggacacggaagcgcgctacggcgccgcactttcggacgattcgcttgaatttgtcagcgcggcgggcgagacagaccttcctcaaaagaaaagcaaaggcgggaaagagaaacgatgaacacgctgtgcgacagggaaagattgtatctcgactatcgcgataaggttcgtcgttacatatcgggaaaggttcggaacattcatgatatcgaagacctgacaagcgatgtgtttgtaaaggtatacgaaaaacttgaaaagtttgacggcgaaaaagcctccgtttcgacgtgggtatatacgattaccagaaataccgtaatagatttttaccgaacaaacaaaacttgtgaagaattgcccgaaacgttggtgtcggacgacggcgtagacgaaaacgttataaaggaagaatctctttccgaactttgcgacgcgcttgaaagccttgacgaacgttcgcgagacctgataatatttcactattataaaggtttgacattgaaagaaattgcggaaaaaatgagtatttcatattcttacgcaaaacttttgcataacaacgctttggcaaagttaaaggattttttgagttaaaaaaatacatatacaaattaaccgccgcaggaaagttcctgcggcggttctgctcttgttgctctatttgtttataagaaagtcaataagcgtatcaatatcctttttgccgaatgaaacgtcgttttcgttgacaacaaggcacggaacgctcattattttatacttttcccgcaagtcggggaaaaggcttaagtcatatacttccgctgttatattttcgtttatcgtggctgttttttgtgccgccgccacgagttcggggcacatcgagcaggtgagagttacaagtattttcatgtctgttttcggcagagatttaattttctgctccgtttcggcgcttatatttaatcccgaatcggacgatgcattgagcagtccgagaatgaacggcgtaaattcatgtcccgtaggcacgccgtgaaagccgagccctgtcttcttaacgtcggctgtcagaatttcgacgaacggtttatgctgttcttcgctgttttccgccgtcgttacatttagtttttctgttttcacagccagttccgttacgaacttccgcagttcttcggacttcggtgttttgtcaagatgcagtttgagcgtcagcggttttttcattttttcaaaaactttatccaactgttccgttaccttatcatcaaacagtttttgggtctcgggggttgggtctgtcttgcttacggcaggctcgtttttttgcttaaatcctgtttttcgctgcattgccgccgcatatttttcaagttcggttgccgcagtcgcaccgtcggacaccgcagtaacgacttgacgaagcgttttttcgcaaacatcacctgccgcgtaaacgccgtcaatgtttgttttttgtgtcttgtccgtcagaatatatccgtatttgtccgtcgcaacagcgttcgcgacaagttccgaggcaggttcatatccgacaaacacaaacaccccgaacgcatcgtctttgctcgcaaaagtcgtttcttttcccgttttattatttttataaataattttgttcggatattcgccgccatcgacgccgacaacttccgtgttcgtcatcactgttattttcggattctcctttgctttttccgcaacagccgctgcgcaggtaaaatcgtcttcgcgaacaagcaccgtaacgtgttttgcgtaccttgtaaggaaaacgctttcttccgccgccgcaaagccgccgccgataacaaagatttcctttcccgtaaaaaattctccgtcgcatgtcgcgcaatatgcaacgccgtgtcctttgaatttctcctctcccggaaaaccgagcgttctcggacgtgcgccggttgcaatcaaaaccccgaatgataaaaaaacgcctttgtccgtttttacggttttgatatcatccgtaagatctgtatcctgcacttccgctaccgaaaattccgcgccgaaattttcggcttgtttgcgcatgacttgtgttagggattttccgtctgtcctttctattccggggtagttgacgacttcggacgttattgttatctgacctccgaacgtttctttttcaagaacaagaactctgtaacgcgcccgtgcgagatatattgcggcggaaagtcccgcaggacctccgccgataattattgcgtcgtaaatattcttttcgttcatcacagcaaccccacaaggtcaaggctcggtttaagcgtttcttctcccggagtccattttgcggggcagacttcatcaccgtgttccgcaacaaatttgcacgcttgcaaccgcctgaacagttcctccgcatttcttcccacgtttcccgcattgacttcgtacataactattttgccgtcggggtcaactataaaactgccgcgctccgcaagtccttccttttcaataagcacttcgaaatctctgcacagagcatgtgtggggtcggcaagcatgggaaattccgtctttgatattctttctgaactgtcgtgccatgccttatgcacgaaatgcgtatctgttgagaccgtaaaaatctcgcagctctcttttttgaagtcatcatatctgttttgcagatcttcaagttctgtcggacaaacaaaagtaaaatccgcgggatagaaaaagaacacgctccatttgccttttatatcttcctttgtgacctttttgaaatctttgtcctgataagcccaaaccgaaaaatcatttatttctttacctataagcgacatacagatatctcctgtcttttttttgttagtttgcgcggctgtcgtatgaatatgcgtattgacttttttatcagaaaacgttaaaataatgacgttgcgaaaattacggattatgtgtggggggcagatatgaacagggatttaacaaaaggacctatcgtcaagtctatgctgctgtttgccgttccgatgattttgggtgatcttcttcaatagtgttataatattgtcgatactctgatagtcggtcattggctcggcagaaacgcgcttgccgccgtaggttcctcttttacgctgatgacatttctgacttccgttattctcggattgtgcttgggcagcggcgctctgttttccatgcgtttcggacaacgggacgaaaaaacgttgcgcgggagtttgtgcgcttctttcttttttatcgcaatagttaccgcctttctgaacatttttgcgtatgtctttttggacaaactccgcatttttctgcgagttccccttgaagtttggggcgacatgcgcgagtatctgtttgttatatttataggtatacccgacgtcggtgttgtaggaatttggtggtccgtgccgataggttggatattggcagatcttgcaggtttgttgtactataaaaataaaagaaagcgcctgctttcatttttgtgattagaattgacgcttcaaaaagcccatacgaggctgaccgatgtttcggtatttccccgtatgggctttgtttgttattgtttattttgcgtcgcttacaatacggtagtaggcgtttgaagttattttataaacaagtgcatagaatatcgcgtaaacaaaaaaggttcctatcgttactagcgcaaaaagcgttatgttctgcaatccggacagcgcaagcatttttttgaccatcggaaacgcaaacgccaagtgcagcgccgcaaaaaggagcggcaaaaagaagaccgtcagcagttgtgagtttatgctctttcggatctcttttttagtcatgcctatcttctgcataatatcgaaacgcgcctgatcctcatagccttccgttatctgcttgtaatagattatcagaaccgcggcaaagatgaagattacgctgagaagtatgccgagaaagaaaagtccgccgtatgtgcaatagaaatcattcctgttattttcgcggctttcgacgtttattgaaccgtatcccagcttttcggaaagggaaagatctgaaagcgtatcggagtaggctatcttttgcgcgagagcaatttgaccgtcggcgtcaagtcccgtgtcaaaattgaacgtgtacctgaaaaggacgccgacaggatctttcgctgcgtatatgtcttcaatgatggcgtcgggatcggaagaaacgattatcaaagactgcgacagattcttcgccgcatcgcctctttcaaaatctgacgcgatcacgtctttaacatgatatgactgtttgccgttgaaactcaaggtgtcgttctcgaattttctaccgtttccgtaaaaggagacgatcacttcgtttttgtcaagtttttcgctatattcgctcatcgcattgaaatccgagagggggatgatgtatatccaatatacgccgcttgccgttgcgttaaattcagaataggaatagacatcttccgcgtttgtcagaaaatcagaacccctcgcgagcgccgaaaatgatatgcttcggtaagcgcttgtgtttgatactgtcgccccgttttctgtcgccgtttttgcgatttcatcgcgaacggttgccgcgttttctttcgtcgccgcatctgctcttctgaaagtgactgttgtgttaatctctctcggatagagttttttgacagcgtcgtccgcaccgaaatacaggcttgccgttgaagagatcataacaagcaccattgtggcgagaatgcagacggacgcgaaccccgcgccgtttcgcttcattctgtaagccattgatgagacagagacaaaatgcgacggcttgtaataatattttttatttttctgtaaaattctgcaaaacgagacagaaccggctatcattgtcagataagttccgagaatgaccattatcaccgcgataaagaacatcagcatcgcggcaatcgggtcttttatcgaaaccgcgagccaatacgcgcctccgagaagcaaaatgccgagtattccgatgaaaatgtttcctttcgggggcttttcaccgagattttcgcttcgcagcagtgccgccgtatttgaaaatctgatttgcctgattgaattgagaagcaacagcagaaaaattgctccgaacacggcgacagtcataactatcgcaaggggagagatcgaaaacgaatactttaccgcgccgttcagaatattgacgagcgcaagttcggcaagttttgatattgctatgcctataaacagcccgaccgcaagagaaaacagcgcaattatcagcgattcccatacaagaattatgccgatatttcgtttgcccataccgaggatattatatagtccgaactccttttttctgcgtttcatcagaaacgagttcgtgtaaaaaaggaatatgcacgcaaaaaccgcgattacgattatgccgaacgacaatatcttttgtaccgtgcttccgctccgcatcgctccgacggtctcgcttttttgcagaaacgtgataatatagaacatcgtgaccattccgacgcaagtcagaatgtatgggatatacagccttttgtttttgcgtatcccgtcaagtgcaagtttgggataaaatgcgcccctcattgtctgtcaccgcccgtcgcaagaagtgtgagtgtgtcggagatcttctgatagagttgttcgttagtatcttttcctctgaaaatctgatgaaaaacctctccgtccctgataaacagcactctgtttgccgagcttgctgccttgaccgaatgggtgaccataattatcgtctgaccgagcatatttattttgctgaaaaggcgcagcagttcttctgtcgcttttgaatcgagcgcacccgtcggttcatcagcaagaacgagtttcgggtttgtgataagcgctcttgcaactgccgcacgctgcttttgtcctcccgagatctcatacgggtactttttcagaatctcggttatcccgagattcgccgctatcggtttgagcttttcgctcatctgtttgtagttttttcccgcaagaacgagcggcagaaaaatgttgtcctcaaccgtgaaagtgtccagcagattgaagtcctgaaaaacaaacccgagattgttccttctgaattccgcaagttccgagtccttgacttttgcaatgtcttttccgtccagcaacacgctgcccgctgtcggtttgtcaagtgccgcgatgatattaagcaatgtcgtttttcccgaacccgattcacccattattgcgacgtattcgccctcttcaacgctgaaatcgacttttttcagcgcttcggtcttggttgttccgaaacgggaaacatagatttttttaagtccgtttactaccaatatactcataaatcgtcctccgatcttttttctgcctccattatagcagaaagggaaatgcctcgccatagataaggcttacatttcccgtttcaaatcttacgcttctgtaagattcagatcgtattgctcaaaatttatcgttacttccgtaccttttccaatttcggaacggacggatagaccgcagccgagtttttcgcatatattcttgcacagatacagccctataccgcttgcgcgcatattgcttctgccgtttgcgcccgtatatcctttttcaaagattctcggcagatccgcttcgtctatgcctatgccggtatcggatatgcaaagagatttcccgtctttcatatatattttaatcgtgccgtcggacggggtgtatttcagcgcgtttgaaagtatttgttcgaacacaaacgaaaaccatttttcatcagttatgagttttgagtcagtcggcgtatattcaagttttatttttctgttgataaactccgaagaaaacctcttgacggagttttttattattcggtcaatctcaaactctctgaaaacgaagtccgtcgtctttgagttgagccgcaggtacgccataaccatatcgacatactgttcgattctgaaaagctccgcaagaagttgccttgccgcttgtgtgtcctcattttgcaaagtgagtttcatcgcggcaatgggcgtttttatttgatgcgcccaaactgtgtaatactctattgtatcgttcaaccgtgccgaaaacagttctgaggaattgatacactcctgtttcagccccacaattatcttctgtaaatctttttcttcaatcccgtccgctgccggtatatccgttagcgtttccgctgtcaaattcttgaccgcgctgtaatccttatgcttttttcttattcgcaggaaatcaatcgcaacaaagactgtgcccgaaatcaaacaaagcgcggcaggataggcaaccgcgccgacaggcaatttgtaaagcgcaaatgaaactgcgaacagcgtgcagaagaaaatccccgcaagtattccgcggcgacgctgtttcagatattgaaacagcagtttttctttttgttttttcataacggttcagtcaacgatgtagccgacgccgaattttgtttctataaaatcggcaagtcccgccgcatcgagtttttttctcaatctgtttacgtttacggtcagcgtgttttcgtcaatgaactgatctgtctgccaaagccgctccatcaatttttcacggctgacggtttttcccttgttttccatcagacacagcagtatacggtattcgttttttgaaagagaaactttttctccgtttacggacaaagagccgtcacccgtattcaaaatcgctcccttatgttcaagcaggggaacggacgctccgaaatcataagttctgcgaagcaatgccctgacttttgcggtcagaacattcatgtcaaacggttttgaaacaaagtcgtccgcgccgaggttcatcgccataacgatgttcatattgtcggaggctgaagaaatgaatatgacgggtactttcgaaaccgcccgtatctgttcgcaccaatggtaaccgttaaaaaacggcaacgatatgtcaagcagaacgatatgcggctgaaacttcgcaaaaacctgcatcacgtttcgcaggtcgtcggctttttttgcctcgatcccccaaggagctatttgcgccgccacctcgtccgctatcatcgggtcgtcctcaactatcagcatcttatacatttcctcgcctcctttccgttattatttaatatttcaggctctgtcggcgatctctttcgttatcttcgaaacaaattcgtcaagcgtcatcgagatgttttcgctgccgtcgcgcacgcggacggaaacggtgccttcttccgcttctttctgaccgattatcagcatatacggaactctgtcaaccacctgcgcttcgcggataagatatccgattttttcgtttctctgatcgagttcgcagcggacgttggcatttcgcagcgcttcatatacttttttgccgtattccgtactcttttcggaaacaagaagtatttttgtttgcaggggagcgagccatgtcgggaatttgcccgcataatgctcagtcagtattccgataaatctttctattgagccgaatacgacgcggtgaatcattatcggtctctgtttttcaccgttttccgcaacatattcaagttcaaagttaagaggcatctggaagtcaagctgtatcgttccgcattgccatgtacggcctatcgagtcttcaaggtggaagtctatcttcggtccgtagaatgcgccgtcgccctcgtttatcgtatagggcatattgagtttttcgagagcggctttcaatccgtttgtcgcgtcctcccaatcctcgtcgctgcccatgctgttttcgggacgtgtggaaagctcaaccgcgtacttaaagccgaacttgccgtaaacctcattgataaggtgtacaacgcccgctatctcgtcggttatctggtctcttctcatgaagatatgagcatcgtcctgcgtgaagcagcggactctgaaaagaccgtgaagcgcgccgcgaagttcgtgacggtgaacaagcccgagctctcccacgcgcaggggcagctctctgtaactgtgcggacggcttctgtaaaccataactccgccggggcagttcatcggctttacgcaatatatgtcatcgtctatgacagtcgaatacatattgtccttgtagtgatcccaatgtccgcttgtttcccagagttttctgttcattatcatcggggtggaaacttcgacataacctgcttttgtatgaagttcgcgccaatagtctataagcgcgtttttcagtttcataccgttgggcaggaagaacgggaagccgggtgcttcgtcgcaaagcataaagagtcccatttctttgcctattcttctgtggtctctcttttcagcctcttcaagcattttcagatgttcgtcaagttcggtctgatttctgaacgcgatacccttgacacgggtaagcatcttgttgttcttgtcatttttccaatatgcacccgattgccctgttatcttgaacgctttgagcgcttttgtgtagcagaggtgagggcccacgcacatatccgtgtattcgccctgcttgtaaaagcttatctgcgcgtcggggtcaaggtctcctatatgctcgactttatatttttctccgaggtcttccataagttttattgcttcttctctcggaagaatgaacggtcttatcgggagattttcctttacgatttttttcatctccgcttcgattgccgcaagatcttcgtccgacagtttctcttctccgaggtcaacgtcgtaataaaatcccgtttcggtcgcgggaccgtaggcgaaatcagcgttcgggtgcagtctttttattgcctgcgccataatatgcgccgcactgtgtcttataacgtgaagttcttcctcttcgggacactccgcaacggttccgtcattgtagataactttcattgtcttatctccttaaatacgattgtttttatgttaagtcttttctattctgtttcggtattttttatctgacgctcctgcgctcttcgctgttcgcgtctttgagaaataagtccgggcagtccgccttttcccgtgtggcattcttttgaaaagatgtggatcagcagttcttccgcggacgcgataaacgcgataatcacaactccgatgcaataccacaacgcaaacgtcaaatttagtatgaacggaacggtaaacaccgcaagccccgttattttgttcatcagagtgtgaagcgaaacgaactttttgaattttattgcgccgacaatgtatgagcaaagacgaacgaatgcggctgccgcaataagcatccacacatgcggcgtaaaaagcgcaataaggttcggcaaaagccgtattatcataactccgtaaaacaaaatgtccgcaatgctgtcaagttttgcgccgaaagccgtttcggtatttgtcaacctcgcaagcgtgccgtcaacgacatcgctgacgccgcatattccgtagacgataaaaaacggcaatgtcagaggctccgtaaaaaaaaggcacaatgttccgacaattcttataaacgtgcaaatgttcggaggcgtaaatacttttttcatttgaagtttcatattccttatgtaatgttatcttttaccttttttgagaatgttcagcagtatatatatcccgatgaaagcgacaaccgaccctgcaagaatcgcatacattgcgcccacttcaactttatttccgaagaaataaatactgcaatctattgatttacgaatgttttcgaccacatcatttggaaatccgagagaggacatctctctgaaaacgcctgccagcgaatgcgaacggataagcgccgttccgtatgtccccggcagaaacgaaagcactttttgaagcccgccgccgaactgcgatatgggcatatatgcgccgcagatgaaaccgtagcccgcgcttacaaccgttccgaccgccgaaatctgcccctgtgaagtcagaaagaagttgactatgcttgaaagcgccgttccgaacatgacaagcaggaacacgtcaagcagcgaaagcagaatgtcacttgccgaaagataccagcccacatttgcaagatagataaaacttgcgccttctgcgataagacaaatgataaatgttgaaatgaacgttgaaaggtagtaactcaatgcaagcgttgattttttgacgggtgtcatcatcaggtctttgcgcgcgccggtcactttgtcctgaaccattgtcatgttgcagcagaatgcgaccgtgatacagcatacggcaagcagtgaagaaaacaactgtccgcccacggttgcgtcaatgagttcctgcggaaaatccgcgacgtgcgctgcttcgagcgacgataaaaaactgtccttatagacttttgccagaaacgttatgtagagaacaagcaaaataagaggcgttatcagggacgaaaaaagcatacccttatctttgaaaaacagtttgagacctctttttgtaagacttccgagcgaactcatctgttttcacctccctcgggctttttgcctgtgacggcaaggaaaacatcgtccattttgccctttgtgatttcataatcagaaaaaagttcggggtgttcaagtatgagttgcgttgctgcccttgtgtcgggaacggaaacccggaccgcatcgcgtatcttttcaaacgggagtccgagattgtttatgttgtcttcggaaacaccgtaaagtgtaataaaatctcccgtatatttgtttttgagttcaagcggcgtaccctccgcggatattttgcctgaatctataataacaacatagtccgcatcggcggcttcttccatatagtgcgttgtcagaagcaccgtcatgccgtccgttcggcgcaggttgcgaacaacgtcccaaagcagttttcttgtctgcgggtcaagccccgttgtcggctcgtcaagaataagcaattcgggcttgtgcaaaattgcccgcgcaatgtctatgcgtctgcgctgacctcccgaaagtttgccgacggttctgttcagcagattttcaaaatcgagcagtgaagcgagttccgcaagccttttcttgaattctttgccagttataccgtacagcgccgcacggctttgcaggttgtccctgaccgtaagcgctttatcaagcacggagttctggaacacaacgccgagttttcggcatatcttttccatgcctttctccacatcttcgccgcaaacgaacacagaaccagcatcttttgcaagctgtccgcagagaatcgatatcgtcgttgattttcctgcgccgttgacgccgagaaatgcaaacaattcgcctttttttacttggaacgaaaggttttgaacggctttgacgtctccgaacgatttgcagagtccgtcaatgctgattatctgttccatacgttttctcccgtttttatctaatcttttttctgaggtttcggcgtctgaacgtcaagattgcccgttttgacatacaaaagcaacgatatgaacattctgccgaacatctgcacgagttggttttccgaaaaactgcacatcttcgttgcacacagcatacttacgccgtatgtaaatatccatgcctgctgaaaaagtatctgcgcttcgtcgtcgttcacgtcatagtcgcgttttatgcagttaatacatttttgagcgtgttctcctagatcgccgaatacgacgttgaaacttgatgcttccgtgtgttctttcatgaaaagaaactgaaaaagtttaggctcttcggctgcaaatttgaccattctcattccgaactgtttgaatgcgggagtgtattcaaacgcggtcattatttctttttcgaattcgctttgaacggattttctgacagcagagatgagttcttccatattcctgaaaaccgtgaatatcggtcttgcggaacttccgagttttgcgccgagttctcgcgccgtcagcgcctctatacctttgtcttttatcagttctattgccgtatcgacaacttcttctcttgtaaacttcggtttcggcggcatttttatccctcccgagcaggctttttgtattatgcaacgcttgtttttattatacgacaagtcggcttttttgtcaatactgtatttattaaatatttattatagtggcaataataggcaaattttttataacagcgttttatttcgccaaaaacgatttaacatatcaagttgaacgttaatacgtattaaaacttagtatttcaacaaaaaacaagacctcaaagtatgatttgaggtcttgaatatatactgttttatatccgtgcgataataactccgttttgataaagattgtacatcgcaaacgcgtgcatatt

SEQ ID NO: 3575 - DNA, 32759 bp, Unknown
  16S sequences of unknown bacteria
gattgagcgaacgcgccgtttgggaaggagcgccgttgctggttttttggatttccctttccggcggcaaccaattgtcttcccaataagcggccgctcttccggccggatttgcagggggattgaagcaaaaaaatttgacaccctctcttaaaacaggtatattaataaataggtaccttatgaaaatcccgccgttgttttttaatacaacacgggactgttttggaatggaggaaaaagatgaaacctgtgatcctgattgcgccggacgatggattcaatcccatgttccaggcgccgcatacgattatcagcagcaactataccaaatgcgtcttggaagccggcggcatcccggtcgtcgctttcgacgtaaattgcgccgccgagtacacagcaatggcggacggccttctgctcaccggaggcatgtccgatatccatgccggaaactatgggcagatttacaaagaccacatgggcggcccgaatcacccgctcaacgaactgcgggatgacatggacttcacattgcttcgcgcctttatggcagcgggtaaaccggtattcggcatcggccgcggcctgcaggtcgtaaacgtcgtgcagggcggctctttatatatggatctgcccgaggaaaccggtcaggatcacgaaaaagaaaaccataccgttgtggcagaaccggatagcttcgtctgtgcctacggcaccggtgaacaggtagtcagccggcatcatcagggagtgaagtctctgggccgggatttaaaaatctgcgccaaatcacctgacggactgcccgaagcgattgaacatatttccctgccggtgttcgctgtgcagtggcacccggaacaatcccagacagaggcggacaaaaagctgttcgaacgtctggttaccctttgcaaaggaggcgaccgctgatgaaaccgattatttgtattgcacctgcccccgccgtagaacccatgttttttaacgacggctggatggtaaataaaaagtatttcctgggcgttagcgctggcggcggtgttccggtcatggcaactgatatcgagctggcggaagaatacgcccgtttgtgtgatggattggttcttaccggcagcgccatgtatatgccctctcccgagtatgccgcgcaggcgaaagtcattgagaaacaaaagcgcgacccgcaggacgcacagctgttctacgcttttcaaaaggccggcaaaccggtattgggcatctgccgcgggcagcagaatattaacgtctttttaggcggtaccctggccaaaaagttcaaactgaccgacggggtagaacatctgatgcgtaagcatgagattgttgcacagcccggttctctgatctgcgagctattcggcgaaacattcattaccaacagccgccataataaccgcatcgaccaactggccgacggattaaaggtcactgcccgctctcacgacggcgtgatcgaggccattgaacacgaatccgagcccatttatgctgtccagtggcaccctgaacggatgcgtggcgacctgcccgatccttttgacggaccggacaccaccattctgttccaaaaattcagcgaaatctgcctggcacataaaaaatagactgccttacggctgtttaagcctatccgagccgtccagccgctagcacttgatggccttagaactgcacatggtctcgtgctgttttttatcctttcgcgtgaaagcggcagccagaaaaacgtgtctggccttggggtcgtttttgccagacccgtatggctggcattcctgtctttttgcccgccctgataaaaaggcgggcattttttctgtcaaacgaactttcttattctttttccccatagaaaatcgataaaagcagacaaattttatgtggttctgcgcttttctcccggcttttgatatgttactataaaaaagggacaacgcctgccccgcaggcaaaaggaggaaggatatgaattttataaaaaagaatgtgccaggtatgctgctgtgcctgctcatcgcgattcccgcctggtacctgggcaaactcttccccgtagtaggcggttcggtcttggccattctgattggccttctggtcgcaatggttccccgccgtccggcgctgcaaagcggcattggattcacttcaaaaaaggtgctgcaatacgctatcgtactgctgggatttgatatgaacctgtttcatattctgcaggttggccgtcagtccctgctcatcattgtcgtaactatctccactgcgctgatcgtcgcttatctggtcagccgtcttttgcatatcccatcaaaaaccgccatcctaatcggcgtcggttcgtctatctgcggcggttccgccatagcagctaccgctccggtcatcgatgcggatgatgaggatgtggcaaaatccatctccacgatttttctctttaacgtattggccgcatttctctttcccgccgccggcatggcgcttggcatgagcgaccagggttttggcatgtgggccggcaccgctgtaaacgacacctcttcggtggttgcagcagccaccacctggagcagtgctgtcggcaacgacaccgcactgacgctggctactatcgtcaaactgacccgtacgctggctatcattcccatcactttcatcctggcgctgtaccgttcccgaaaagaaaaagaaaaatccaaaggcaacttccgcctttctaaaattttcccttggtttattctgtttttcctgctggcagcggtcatcagcaccgttaccggcatgcctgccgctgtcagcaagccaattgtcagcttcggtaaattcctgattacgatggcaatggctgcaatcgggctcaataccaatctggtcagtctgatcaaaagcggcggcaaaccaatctttttgggactgtgttgctgggccgccgtcgcatttgtatccttaggcatgcagattctgcttcatctgcggtaaaaaacaaaaagcggaggatttttcctccgctttttgatctgttccaactgtttttcactttttttctgctgtcggatctgctcgtttctgatagtggcgcagcatctgctcaaattcttttgcgtccattccgtcgaacttttccgccgccaccaatcccatgcaggccgtcaaaatccctcctgcctgatgtaccataatacattccacgcatttcccatgccgcgggcatttggaagtacagggacaatttggattttgcaaaacgggtgccatctcaatcgatcctttcccaaaaaggcaaattgaatttcgcacctattttatcacaattgtactgggaaatgtagcgtttttttgataaaattccgctaagattaaaaagacattcccagcgtgtcccgataatactccacgcatttgcgcataaaggcctccgtcacaccaaaatactctgccaaatcccatatttcaaccattcccgcagcaaggcattcccgcagttcctccagcggaatataccgcagaatggcagcccgatctgcccggcgttccgcctgttctttcaatagataagggctggaggccgtataaaacgctcctgagtcaaaatgtcccttttcatggatcaaaatggtatattcttccgcacatccatcaattttactgcggtctattcccaccactttttcgtcacccaacgaaacgcttttcaaatgctggaaccggaacggcaaaacggtgatgttctctttttcgaaatccttataaacctcgttcagatcatgcttcatctgtcgtctttctccctgttatcaatcgaggaaaaccttcctttcgaccacatcatagcaaaaccttagtcctataaaacggacaatcttttcaaaataaaaagaggaacggtgtttttcgggcctatatcgtctgtccgcttagcatttagccaagcggacagatgctttttatccataaatttctgcgtccagcgtcaaattcgtatacaaaaaatcccccggggatatggtaacgccgcttggcaaggcaaacacaatttttgcggttctggtatcaataatcgaaaaacctgacggcgtgacgatgggcacattgtcatgcgtactgtaataggaaataccgctgctgccatcccgagctgtataagtcgcagtcggcgcaacgcgcataggctccggaaagcgaatccgcggcatggcgtatagtgccgcagccgtattctctttgatcggcggcaaactcagcgtatatttttgataatatctctgacacagtacccactcctgagcacaggggcgcaccggcctgcccggatacaaactcacccagtccagcaccgcgtcggttaccgtaaggctgaatatgcaggcatttccattgttgtccaacggtacagatgccttatcagtgcagacgttctgcatcacgccgtcgacactgtaatagactgtaaccggatctggcattctggcaaaatccgccttttccatccaatactgcatggtgatggtgccggcaatatccgcaccatatccccgcgcgttgggctgtaccgtgccggtaccgccggatcggaaacggtcggccacatatctgtccgacggattggtataggtcgcactgtcatcagcgttataccgctgccagacagacaaagagccgttgatgagatctcccggccgattccacttatccctttcctgtggtgaaacaaaaatccgcgccgtcgtctcctcgatctcatctgcgttaaaaataccgtccgatatcatcacattgcccgatgcgtccggcaaaattccattgaccgatgtcacgccgccggcttcccccttgggtccctgggcctgaacatcggtcttttgatagatcccatctgtttggtcccattgataccagtacccatcagtgccgatataagggcttttcccctccgacccgtaggaggaaataccgctgtccaggtgaagattggctgtggtgtcatacaaataccaatgcccgttttctccgatatatggccctttttccacaacatcttgcgccgtttgggcattttccgtcgctgtaagcgctgcctgtattgcctgttttgccgcagcagcagcctcttcctcatgcttttgcgcctgtgccaaagcggctgacagcgtatccggcgtcggggcaaaattgccgtaagccgccgctttaatcatgatttcccgaccatcgaatttaatcacttctgttttgtcttcgctgatcccgacaatggtcaatttgatgcgtcctggcacagcagtgcaatcttcgtctactttccagaaaacggtcaggctgtcctcccctgcttgtacgctcaacggcttgctgataaaagtatcctgctcgctgaccagctgaatcgaccagcgcagcgccgacagatcaatctcaccatactgcagcggcaggataattggaatacaatccactcccgcttctccctgtgtaaacagataatccagcggctgtgtattgacaactttccgctcatttgcttttaactccacgtcttcccccccttttttacgcctgtgtgccgtccatattgtaccatgttgaattgttgtagtagctggattgaaactgcagctttccggcggccgctacccgaaaccggatcgtccggctggatgggctgctctggtccttcaccgctgcggtcttggcagaagttgctgacagcgacaggttagcgccgccgctaaaactgccggaggcggatacatctcccgtcaacgcaatggtgcgtgcgctcgtcagccggtctgccgtatccgcccggcccgcctcatccgccttagccgcgctctctgcataggatgccaaagctgcccgcgatgccgtggcggcagtgtccgcctgcgtcgctgtgtccgcccgaaaactcgactttggtttgccaacggggaacaacaccacataagtaccgctgtctttcgccaaacacactcggtcccccgcgtggaaaacggcaaagctattgacgcggtatcttttttgactgggcgtatcctcctggccaaatcgcagcgtcacaccatcctcaaacacctgtgaaatagtagcaaagctggcgttttccggctgtttttcctgaatatcctgttcttcttgataaatcatcggtataagattctcctcaatgtgtgttccatcaacccgccggcagtgagttccatcgcccatccgctttcctcatacacgcccggagccaaatcgccttccagcgccaggatatcaccgcattgatgggtcggattcagtgccgtccggatcaccgttgtctcggtcgccgccattgactgccagcgaaggcggtctgcataccgctgcagcgcggcctgacttgaaatattatccaggcgcaccggtggcgccataactctcccctgccgcgtaaccgaaacagcggaggccgggtcatcgttgattgatactgcctgcatcatttctctcagctccgggttttcacactggacgacaaaaacattgcacaaatcaaacagatcatcctcccgctcataagcttcctgcaccagcgcgtatcccttttccttccccggtccatatcggtggcggatattttgaaccgatggctctaaaatcgggctgatacgggcgtaccccgcttcatcgaaccacagggaacggtagctgatctcgtccaacaggctgttgacaatgtccaaaaccggggtaccgatctcccagtcctcccggtcggtggcaaacatttcgttcgactcttctacgattgccgactggataccgcattgttgcagcagcgcctggattcggtcggtataccgctctcccgccgaaaagtaaagcttctgttccagtcgagttctctgcgctaaaaagcaaagatcgtatccttcacagcggcaaaaacagcttgcgccttcccttacagccttcaccgtggtcagaataaattgccccaaggggtattcggctttgtccaaaataagcaccgggcgcagccgatcccccagtcggtccattccctccggcaataccagatcgccgctaaaaagtcgcttgatcttccgccgcatatccatcgaaaccgctgccggccctgccgctttcgcttcagcatactttatgccgccgcgtaaaatgtcataacggagggcaaattcccgaataccgctattccccattttcgtcctcctgtcttgtctcggtcacaaaaaaagaaatatccgaactttttttaatatctgccgtcatttcgtccagcactccggtcagacagcagccccactggtccttgtagattacctcctgtcccacaagcgcttgcaggtcagataaatactggttatccggcagagaaaacgcaaactggtgcctccggcttctggcctgcgccgtttcagcctgcggcaggtgaaaaccgtaataataccgatacaccacttgtgccgtactttccatccggtgagccggtgcgccttcccgcctcacctgcaacgggatccatttcccgccgctcaggtcggatattgctgcgccagacatcgaaaaaatttctgtccgcactccgctgctgacgtaataaccgttctttgtctgcccgatgatctcgtactggtgcttagtgcagcataaccggtcacagaatgccgtttcttttgtttcggcaattacctttccgtcttttttaatcagaaagcctgcaaaatctcctacaaagctccaggaaagcagtatttcccatcctactgcccgtcccgtcagaaagatttttccgctctctttgttttggatgacagcctgtgcgctcgcccacaaagaccatcgtccgaatgcattttgtacccgtaccttcacggtatagcagccgtcctccagataaactggacagcgccattgtttttctgtaccgtattgctccggaaaaatcctgtcgccgatttgtacctgatatccctgctgatcctgcgcctgccagcagatgaaaatgcggggtgtcgggtctatccggctgattaccggctccggtggtctcgcctgcacgacaaccgaggcaggctcactccattctccccaaacgccgtcgctgtttgccgttcttacccgccaaaacagcttgcctgagggcagtgtatcctgcaaaatttccgcctgggtatccccggtttctgccgcccccagtgccgtccattccccctcggcagttttgtactgtatttcataagcactttgctcagtcccggtggaaatcacatgcttccaggaaaactgctgcgccagatttccgtccacataaccgaggtcaggccgcagcccggacggctttgaaaggctgtcctgcgtagtaagggtcatccagtcggaccattcgctccagatcccatcgtcggactgaacccgtacacaccagtcaatgctcccgttttccggaaaggtccccgccggaacggtatggctcggctccccgctggtcaccgtactttcctgatagacgctctgccccgtctcccgccagcggaactgataccccgcctgctgtaccggctgcgccaccgccgtcttactcgctccgaaccgccagcggaatatgttctccgctttctcattcacaaagccggacttaggcgtgcattgatctgctctcggcgtgacgtcctcgtaagtcagaaccacataaggccggttcgcccccgtatgcgactgaatgctcatgctcgcctttgccgtgtaccggttccccgtatacaaactccccgtgcagcctgcccatacgttcggcgtcatctccagataccccttggatgcgccgtctgacagttccccgttgccgcggctcagatctcctattggggcatactgattttttggcaaatcccccagctctgccagctgggagtctatcgctcctacgtcgaacaaatcactaatgaaatcaccgtatccaaatacaaaccggcctgatttgatgttaccggaggatgaggagcttgtcccggtcacatagacgtattgctgtgcccgcaccagccttttcttttggtattgggaagtggttgggtaccggacccggatccaagattcgctggccgcatagagaaagtaaggcatattctcataagtaaaggaaaagttctcctgtgaactcagcaccgccgctcgggtcaccccgctcaaatccccgtttacgtagttttccgcccagctgtcgctggcgtataccgtttccttatactgcgccatgccctctccttcccgtatagccggcccgatataaaagccggcggttttccttctgctcctgtaccgccgtcctcaccggactttcctcggcaatccgagcttttccggcctgcatcaaatcttttatctgtttatctgcttccaaataaatcctcctgactgccgggtttttccggcaggaatcccctgtttcccgccgtgtcctgataaaaggatcctttttccctggtcagcggctgcatccggatccggatcttagaggaatcatcttctgtctcaaaaatcctctgcacctgtaaatagcaaaggcctccctcggctccggcatctgccgcttcgctctcttcgctgcagcaaacccactgtaccgcctgttgtgcatcctgccgcaaagcccggttctgaaatggatcctgcgggcaaagccatccggtaaatacaatctctccggcagcggtctctgtgccccttttccggcccgacagatcaaaaaaccaggtgttttccatccctttttcctcgattttcacgatcccctcggcacattccagccaggaccgctcttctattgattcaaaagcgaaaaaccagtgtcgctgcggcacagcgtctgtcctttttcgccagtagatcagccgtcccgccatctcatatacaaaggtctgtccatcctgtgccggataaagcagatgtccctgccctgtccaaaggctttccatccgctcccgctctgccggaatccattttttcgcgccgttttcgctcatccaccggctgaaccgttccgcagtggctgcattttccattcgttcccgctcctgaaaggcaaatccggccatctggatggtaaagtcatactgccagcgttcgttgcctgcccagtcggcggacagccttttttcccccaccggaaaaataccgcagcaaatttcatcctcccggacgaagtccgtatacacctttgccttttccagatgcgggcaggcggcgatcaaggttttgagcctctccaaaattgaatcgttcaaactttttccaccgccttttaaactccctccaactcccagtgagaaaatccgccgggcttctccaccttccggatggtccgcagactggccaaatgatcgtatgtctgaaccagttcccgtaatggattttgctcgctccagataaaagggcagtcgcccctcaccaacacatctccgatttgaaaggtaaaaaactgcttcttttcttctttcggcagtgccagccattgcctgggcggcaaatagctccggtctgctggcaagcggtctcccgggaccagtatcaaggcgttgtatcgagcttcctttccctttttgctatatcgccgcccggtgaacccgccttgtgcctctccctgccaaaacaccgccggcagtactgttctgatacattgttctgcgtcttcctcctcccagcggttatacagcgtagcacatccgttggtcagcattgaccgcacccccgaaaaagaacgccgtcctccagataaagagccgccgaccgatagcagtccgcctgcttggtaccgtcccgataggtcacagcatattctcccgctttttccgacagcagcgccccgttttttgcttccttcgccatctcatccgtcaccgcgcacagcgccatcttcatattctgcgctgccgggagttcttcacttttccccttagtcgcaaaagctaaaaaggcctgcgccctctgagaaaagcggataaattcctgttccggcaaatgacctttgtactgctcttgataaaaagaaaaatcacacaaatccggcattctatccctcctttcgcccaatggcagggcattctcccatttaggctttgctgtgcagataaacacccgccgctttgttttcatacaaatccgccaacccataagcgcggtagaaaaatttccatccgtcagaggtctggttgtcctgcggcgcgataatcttatttactgtatgcttgggatattgcagcagcgccggtttgtggataatcataaagttaatttccttggccgatgctccctttgcaaaaccgccgtccgtctgcccttcagtagaaccatcgtttaatacaatacttgtataaaagcgggattttggaaccttcactaccttctgaaagctctccagaaccgccttggacttggtggtgtccacattcaagatcaggttgtataaagaggggctgataaaaagataccgctgctcctccggcacttccgcctcatccatggtgttctgcccctcaatcaacgccgtcaatgcgccgtctccatcggttaaatccgccgcttttttctcaatgccgctgtgagacgcatacgccgcaaagcggaacgcatccatttccggtgccactttggtacgtacaaattctcccgccagccgtccaaacgcaatgccagccgtttcctcgtcgtccatcgcgtcgacagtgaaaacccggcctcggtcatagttaaagctcaccgtttcgttagtcagtgtcacatcgcctgccacataaccgccgctgcgggagtaatctgccagcccatccatgctgattttgggaatgatcatctcccccgcgttggcgcccatctgtaccagggagccgtctccatccagcactgcagtgaccgacgcatgctggtatacctcgtccagtttatcagtatatttcttaaatcttgccagtgtatttgccattaaaaatcatcctttccctgcgcaaaagccggcagccccatgattttccgcacctgcccatcgtccacttcgccgctcacccggtttccggggcgtatgattttgggcggtggctgatccggcccaaacaaatagccgcattcgcaccggatcgccgacagctgctcttttagccctttgatggtgccgtccttttccaaagacagctcctgttcccgcagcagcgcgcgcactgccctctcgctgcgagcccccgcttgccgcaaagaacgccccaaggcctcctcaaaatcacgcttttcccacttttgcctccagtttttctcggtttcttctgctttttcccgccatctctgcacctcttcggccgatgccgccgctttttccagctgcgcggcccgctccttaagcgcttcgtatccggagaattttgcttttaccgcctcaatgtccaggccattttcccgcatcaccatgccgatttgcctttcatcaaggccccactccttcagtttttctgttttcatgttttctcctttccggctaggcgttttcggtggttgccatcacctgccgtgcccggatcagcccccggaaggctttctcactgcgccgtcccttaactgttcagaccatcgtttgtcggggaagtttctgcaatgcacgccgctttggcctgttctttcgtttctcccagaaaacgcacccgaaattcccatggctggcgcacaccggcggcgatttcctgcaaaaactgcgctttttccgccgtggtatcggtcacaatgctgtcatcccatcgataatcggtccgatatccgcctgccggaacgccgggtagaaaatccgcccagtagttcataatgttcaaaagctcctccagtgcccgctccagtgtattttgaatttccttcacagtggaaaaaagcctctgctttgcactgacaatttcggtggcagtcatctccctctgccccgggtcgctgatgattccgtaagacagaccgcaggaaaactcaatccgccgcaaaagctcattgagccccgcacgcagactcccatcccgaaaatccgggttgaacacatggtaaaagtccgccccggtgttcaggctgcggaacagccgccgagtggtctgcggcattctgccgcccgtcagataggtagagtcggcatccactgccagctcgcctccctcatactcccacagcaggcggctgtactgccggtctgcttcttccagaagttccattgctcgtgccgcaatggaggcacccagcacacactccggttctaccgtattgccaaacggcattttcaggtaaacaaacagcggcgatgtccgaccctgcagcagtgcctgccgctccagccctgcccattgacgcaggctctccaatggaatctgttgcgccaaccgctccgcgccgttgctgacaaatgcccggttggttaccaataccccctcttgtgtcatgcggtgttcttccattcgggtaaaccacttttctctttgacgaacctgttctaaaaataccgcgctggtaatcttgccgtccgggcctgcctccagcggaaaaaacgcgtcagcctgtaccatttccaccagaattttcccgtctgcgagataaggtttccataccattcctcccttccccacggcatattccagacactgccgcagccgctgcctgaccggctgaatctgccggttcaaaaacgccgcccggccggagccctccaccgtccagtcaaactccagcgtaaccagccgcgccacttcgctgcagatcgccggcaaaaggttcattccttttacccgtccgccttccagccatggcgcgtcgttctcgtaaacgcgcctccacagatcaatcgcttcctccatctgccgcgagcagaggacctgttctcccagcgtttgttccgtctccgacagcgatccggccgccgcagcctgaactcgttccatccattctccccacatgtggattactgattcccccttcttccccaaaccggctcagtagcataacgcaccgcgtcgatatggtggttgtttcgatccggataccctggcaggacctttccatccttgcccctttcgtaccggtattctaaaaactccttcaatgtgtccggacatcgatccgggtcaatgacaatgcgccgcagtccctgcagccagtggaaagaataccccaaactccccggccccttgaccgcaccgcggcaaaaaagcccttgctcccgataatcctccacacttttgggttctgctgaatcagcggtgatctgttctttcggccccacccccaaatttttgattttctgcgccgtttcccgattcactgttttatagcaggtcaactcgcagaaaatgtaaagcgtccggcgcgccgcgtcataatggattcggttaaatgcccatggatcgggataaaatccccagtccaccccggccataatgcggtcaaaccgccggatctcccggtctttgatcggctccgcggcaatattgtcgaatacactgtcccccagccccgccggaatacccagatattcctgccggtatgcccgggggttttcctgcttcaaaaaccgggcgtcatccaaaaatttctctcccagccagcttgccggcatctgagtgtaatccgaatgatgaacctgccgtcccggccgcggcgttctggcccaacggttgacccagtgctgctccagcggcggcggattgaagcttttaaaacagtaaaaaggtccctgcccccgcagtaccgattgttccgtgctgcgtacctgttcttcttcaaactgatccagctcctcaaaccaaagcacccccggatatccaaacgggacttttaaggatttcaactttcctgggtcgtccattccgaaaaacaggattttctgtccggtcggttcatataccgcctccatgggggatagtgtaaaccggcacatctgctcaattcccagcgcgcccgccgcccactgcagctgggtaaataccgacgagcgcagcgtgtttccaacccgccttaaaaccaccgcgtgcatgttgggatgccgcagcagcgtcagccacaactccaccgacacgaagctggattttcccgacccccgcccgcctttcagcacatattccccgccctgctccaatatcttccggtgaagcccggtaaaagcggaggcaatcagtctccgcagggaaacgccggtttccgtctgttcttccggacggggctttgtccggcttttttcctgcagttcaccgcacatcatcaataatgacaaccggcggcgtgtccggccagcaggcctcagcctttcgattttttctctttgccgcctctccctcctccaaaatgccgcgcagttcccggattgctgccatgtctccgctcagcgctttctgatacaggttccaggcaatcagctgcagatgatcccggtaccgaacgggcagaccggcgctttttaaaatttctttctcctgcggatcagtcagcggcatctccagcaaaatctgcagccgctgccccagctggcagcctttttccgtctgtcctgtgacatttcgatttgttcttgctttttgttttttctcttcttgcttctcagaattcaaaaggcctctctccttcctatttttggcatattgcttctgccgcccgctcagtagcgcttttagcccctcttttccgtttgggccgaaaatgaatgcagccatccggctcacaatttcgcaatctcccttcttcaatcgcaaaatgacaggccggaaaatccggaaatccaaacagttcccgccggtagtaacaatttttgcagcgcttcatcgatatggcccctttcctgccgcgcataaaaagctcgcttttttcgttcaatgggtgtaaaataaaaccgtattttttgatttgataaggagaattctatggatactctttttccacttcgtccctttgactttttttccaatcgaaacacctataccggcagcgccgggcagctgcgttatctgatcaaacccgtgcaagaaacgctggaggttcaggtctggaaccaggatgtttgttttgaactggcccaaatactggactgtgcctcttttcccctttcgcccggcggcctggccgagatacgtgcctggctggatgggcaatatcgccgctttgggacataatgattttttctccttcacttttaggccggacgctgtccggctattttatcccccgttgaagaacatatgtttcttgttgagttttattatattccgtatttttagaaaaatcaatagttttttcaattttattgaaattaatctttacatttattttcctttctgctattctgtcatagaggtgatttctatgtcattctttggcgagaacctgaaaaaagcccgaaagcgatgcggcctaacgcagcgccagctggcaaatcttgtcggcgcaaagcacaactcgatcagcaattgggaaaccggtcagaacgaaccggataccgagaccatccgaaagctgtgcgatacactgtcgattacagcaaacgacctgttcggcgcagaccccgccgcagcgtcttccatcagccgggacgatctgaaattcgccttgtttgaaggcgacgataaaatcaccgaagaaatgctgcaggaagttttggactttgcgcagttcgtaaaagaaaaacatcgaaaaaagagcggcgtctaatgcggcgcacggcttgccattcatcacggaaaggattttaacgatatgaaagcgattacccaaactttaagcgaaatagtttcccaggcattcgaaatcgccggatatgattccagtcttggcgccgttaccgcatctgaccggctggatctgtgccagtttcagtgcaacggcgcctttgccgctgccaaacagtatcacaaagcgccgtttatcgtcgccgagcaggtggcggaagtgttaaagagcgacggcattttctccaaagtggaggtagccaaacccggatttttaaatctgaccttgaacgacagttatttgctggaacaggccaacgcaattgcctgcgacccgcatctcggtgttccgcaggcagagcagcctgctaccatcgtgctggattacggcggccccaacgtagccaaaccgctacatatcgggcatctgcgttctgctatcatcggtgaatccatcaaacggattgcccgggctgccggtcataaggttatcggcgacattcatttgggcgactggggcctgcaaatcggccttgtcattaccgaactgcaggcgcgttatccccattggcgctgctttgcggcggattttgaccctgccaccgatcaggtcgagcctttgcaggccgctgagctcaacgaagtgtacccctttgccagtaaaaaaagcaaaactgatgaagcctacgctcaaaaagcccaccaggccacttatgagctgcaaaatggacgtcccggatatattgctttatggaaagagattctgcgcgcctctatcgcggatatgaaaggcaactatgaaaagctgggcgtcactttcgatctgtggtacggcgaaagcgatgccgaccggtatattccacgtctgatggatatgctggccgaaaaaaatctgttggtggaaagcgacggcgccttgatcgttgaggtagccgaaccggaggataaggcacccatgccgccggttatcgttcgtaaatccgatcattccagcatttacgctaccaccgaccttgccaccatcatccagagggaagaggatttccatccagataaaatctggtatgtggtcgataaccgccagggtctgcatttcacccaggtgttccgctgcgcaaaaaaggcaggcctggttcctcctcaaacagaatttgaatttctcggtttcggtacgatgaatggggcagatggcaaaccttataaaacccgggaaggcggtatcatgaaactggaggatatgattgccaccgtcaccgccggcgcgcaggaaaagctggaagcatccagctttgtggacgaggcggattatcaggatatcgccttgaaagtcggtgtcgccgccatcaagtttggcgacctgatcaaccaacgcgccaaggactatgtgttcgacctgagtaaattcttttcctttgaggggaaaaccggcccttatctgctctataccattacccgcattaactccatcttgaaaaaggcaggcgctccggcagaccagccgcttctgctcaccggtgtttataccgattccgaacgggaactgcttttgaaaatcctcatgggcggcgatgtgttccaaagaaccctggcagagaaagcgcccaactacctgtgtgaagacgcttatcagctggccaattccttctccaaattctaccatgataaccggattatcgacgaaccggacgaggcgaaaaagcaaagttggcttgccctgatctccctggtgcgtcaggtgctttgcaatcacctggatctgctgggcatcgaaacggtagagcatatgtagcatattgaaaaaaggctgtttcaaaaaagaagcagccttttttgccgtccatttcgttttttcacggaagtttttcgattttccccgaaaagcttatgcaaatcgccgctgttttccagccgtctgcggtgttataatgacggatagtgccgctgttttccggcggcaaatgatcgttgaggaagcgtgtgttatggagagaaaaacttatatggaaaaactgcgctccgccgagcgctatgttgttgcgtttgtccgttgggggctattggccgcactgaccgggttggtaggcggcggtgtaggcaccctgtttcacaaagcggtggaatacgccactgccgtccgcatcgcccacagctggattttgtacctgctgcctgtcggcggtttggtgattgtcggcttgtaccaccttttcaaaacgccggaaaactttggcaccaaccagattctggatgccatccgaagcgagaaaaaagttccgctggccctggccccgcttattttcatcagcaccgttatcacccatctgtgcggcggctctgccgggcgcgaaggcgctgctctgcagctgggcggcaccattggttcacagatcggcgggctgttccgtctggatgaaaagaaccagcatatcctcatcatgtgcggtatgagcgctgtttttgccgcattgttcggaactcccttgaccgctacctttttcgccatggaggttatcagcattggtgtgatttactatgcggggctggtgccctgcatcatttcctccctgactgcctatggcgtgtcggtattctttggcgccgaaccggttcgtttctccctgacccatgtaccatctcccaccatcgggagcattttccaggtaatcggcctgtccgctctgtgcgctttgctttccattgtattttgcctggctatgcacaaaacccatcactatctgcaaaaatggattccaaacggttatctgcgagccttctgcggaggcgccgccatcatcctgctgacccttctgctgggtaccaacgcttataacggcgccggaatggatgtcatcacggcagccaccggcggcagcgcccggcccgaagcttttgcgctgaaaattctttttactgccgttaccattggcgcgggattcaaaggcggtgaaattgtccccaccttttttatcggttctacctttggctgtgtcgccggatctcttttggggcttgacccgggctttgccgcggcagtcgggctaatcgccctattctgcggcgtggtcaacagccccattgcttccataatattaagcattgagctgttcggtgcacagggtctgatcctgttcgccatcgcctgcggcgtcagctttatgctgtctggctactatggtctttacagcagccaaaaaatcatgtattccaagctgcgtgccgagtatattaacattcacgctaaataaaaattatccgtttatttccgccagaccgcagcattttcccgctgctatccccctgggagcatcgcttccgggggttttttcttggaatcggatctcgctgttttcgacttgtccaaatatcaacctttttcccccgctactttttacaaattttacaattcttattgaccttagacttactctatactttatactgaaacatgagttggcgccccgtctttgccatacagcccattgccaagacggtttgctggtgtcggacaccggctttttccggattcacctttttcaaaccccaaaaggagggatttatttgaaaccaaaaaagaccgaccgaaaaagcatgattatgcgttttttgaaaggttcctatctatatttcatcctcgcaatcgcgacatccatgctgtacaccgtattcaattccctgaccccgcaggtgatccgcgccatggtggattccatcatcggtacagagccattcagcctgccgcagccagtgctcacgctcatcgaccagatcggcggccgggaatatatccgcaaccatctgtgggtagtggtgctggcgatcctgctgattgccctatgtgcgggtatttgtacctttttcagccgcaccttcaccgccaaaggcgcggaaggattcactaaacgcattcgggaacagcttttctctcacattcaaaagctcccctacaactggcatgtcaaaaatcagaccggtgatgtcatccagcgctgtacctctgacgtggaggttgtacgcaattttgtttccggccagatgctggaaattgtacgcattgtctttttgattgtttttgccatgagcctgatgttttccatggacgccaaactcacctgggtggcgctggcctttgtcccagtggtcgtcacctattcctttattttttattccaaaatctccgaccggtttcgcaaggcggacgaagcggagggtcagctctccgccgccgtgcaggaaaatctgaccggcgtgcgtgtcatccgcgcctttggccgggaaaagtatgaaatcgaccggttcgacaaaaaaaacaacaggtttgccgatatgtggattcgcctaagctacgtcatgggcatgtattgggggttcggcgacctgtttaccggccttcagatcatgaccatcctggtgttaggcaccgtcgaggcggtaaacggcaatatttcggtaggtacttttatggcctttatttcctataacgccactctggtctggcctatccgcagtcttgggcgggtgctgtccgaaatgagcaaggccagtgtctccatcgaccgtatcaattacattctggaggaagaggaggagcaggacgatcctgccgggctgactcccgacctccatggagacatcgtgtttgaccacgtcaattttgcctacgaagggctgatgccgattctcaaagatatccatttcaccatcaaggccggctccacctttgccatcctgggcggcaccggatccgggaaatctaccctgatgcaccttttggaccgactgtacgaactgcccaaagccggcggaaccatctccatcggcggtgttgatatcagcgccatccgtctgagctatctgcgggaaaatatcggcatggtcctgcaggaaccgttcctgttttcccgtaccattcgggaaaacatcagcgccgcccggcccggcgcggacatggaggaaatccgtcacgcttcccgcattgccagtgtagacgatgctatcatgggcttttccggcggctacgataccatcgtgggagagcgcggcgtaaccctgtccggcggacagaagcagcgggtagccatcgcccgtatgctgatgcagcgggcgcccattatgatttttgacgattccctgtcggcggtggacgcagaaaccgacgctaaaatccgcgacgcgttggatcaaaacctgggcggttccaccgtcatactcatttctcatcgcattacgaccctgatgaaggccgactgtatcctggtcctttcaaacggccaaatcgcccagatgggcactcatcaggagctgataagccagcccggcatctaccgggacatctacaatatccagacagcccaggaggaccaggcgctgctggctcaggaggtgtagcccatggctgttttccaggaacaggaatacaataagccatttgatttcaaggtgtggaagaaaatgcttcccttccttcgcccttattatgtcaacctttgcattgtcattgttctcaatatcgttatggccctgatcgatatttccatgccgctgttccagcgctataccatcgaccattatatcggcggcggcacactggagggcatcggctggttcacactgctctacgcagccgccattgtgtttcaaaccgtggtggtcatcatttctacccgccagtccatgtttattgaaatgaaaaccaaccgggatatgaagcgcgcttgcttcgttcatctgcaaaagctctctttttccttttataacgtcactcccatcggttacctcatcgccagggtcatgagcgataccggccgtatttccggtatgctcgcctgggggctgatggatgtcatgtggagcctcgtatacgtgcttggtgtctttatctccatgttgatgctcaactggaaactggccctgctggttatgctcatcgtcccgctgattgcggttttaaccgtttattttcagaacaagatcctccattggaaccgaaaaacccgccggatcaattcgcagattaccggcgctttcaacgaggggatttccggtgcccgcacttccaaaacgctggtcatcgaggaacataatatccgggattttaaagctctgacagcggatatgcgccaggcatcgattaaaacccagatgctcagcgccatctatattccttccatcatgtttttaagctcggtggcaaccgcgctggtgctgacccgcggcggctatctttccatgcagggactgatggaaatcggtaccctgtccgcatttacttcctacgcggtgggcatttttgagcccattcagcagattgcccgtatcctagcggacatcatctctgcccaggccaatatcgagcgggtctgcggccttttggaagaggtgcccgctattgaggatgctcccgacgtggtggaaaagtacggagacaactttgtgggaaaaaccgaaaattgggagccgatccgcggcgacatcgaatttcgggatgtgacgttccgctatccggatggaaacgaaaacattctggaacacttcaatctgaagatccccgccggcacgacggtcgctattgtgggcgagaccggtgcgggaaaatccaccctggtcaacctggcctgccggtttttcgagccaacggaaggaaccatcctcattgatggccgggattaccgggagcggtcccagctgtggctgcacagtaatatcggttacgtgctgcaaaacccccatttgttttccggcagtatcaaagaaaatattcgatatggccggttaaactccaccgatgcggaaatcgaagcggcagccaaagcggtttcggcggataccgtggtcgaaaaactggaaaacggctatgactccgatgtgggcgaagggggcgaccggctctccaccggtgaaaagcagctgatttcctttgccagggcagtgctggcagatcccgccatttttgtgctggatgaagccacttcttctatcgatacccaaaccgaacagttgattcaaaacgccatttcgcatctgctaaaagggcgtacctcctttttaattgcccaccgtctgtccaccattcgccatgccgacgtgattctggtggtgaaagacggcaaaatcatcgagagcggctcccacgaggaacttctgcataaaaaggggtattatttctcattgtataccaagcaatttgagaaagaagcttccgcacaggctctgcgctcttaacactgccgccggcggactggcagcggccggttttccggtgctgtgggcattggtctaaaaagatcattacctttcataacaaaagcttcatgacaggtgtcccttggtcatgaagctttttcatgttacaacttatggctcatctgccgtccagcgtgtgtttcacaaaagcggcagaaagattatttgtttggattatcaaagctcgggttcatggcatagaagttcttgcaatccatgtcctcttgaatcatccgcagcgcctcgccgaaacgctggaagtgggtaacctcccgctggcgcaaaaatttaatcggctcccgtacgtcgggaatatccaccaaacgcaggatattgtcgtaggttgtacgagctttctgctctgccgccagatcttcaaacagatcagtaatcgcatcgcctttggattggaagaccatagaggagaaaggcatcccggatgccgcctgcggccaaataccgccggtgtgatccacaaagtaggtgtcaaaccccgctttcttcacgtcctccatcgtcatattccgagtcagctggcgaacaatcgccgcaatcatttccatgtgcgctagttcttccgtaccgatatcggttagcaggcctgctacatgccggttgggcattgcatagcgctggttcaggtaccgcattgcggcagccgtctctccgtctggcccgcccagctgggtgatgatcacctttgccgccgcagggctggtacagtcgattttcacagggaactgcaaacgtttttcataattccacatttagtagttcgcctccttttcccaaggccagggacaatcggtccaggaccagcggtttgccggttctaccagatcgttggtcagcggcccgattttggcgttgtattcgcagactgcccgtttctgttcgtcccgcgctttctgataaaacgccaaagcgttgctgtcgcacggatgggtgtccagatataaaaccgcctcgtctacggcgaaccccgcttgctgcacacggtttaaaatacatcttctctcgttaccggacatggcagtcacctcggcttccccaaaaaggtttatacaactccgggaacaaacttccccggcacagcgcggtctgggtatcataggtgttgcaccagtcctgaaccggtacatatcccatggttaccggcagctgttcggcagcactcaaatcgcagtcgcaatcgcggaccgttcgttccacgacggtggtgcgctgatagttcacattttcagcggcatttgcgcgacgataagaggcgtaaggatctgcacaggcatttcgtgcggtgtaagatgattcgccgcagcaaccggtcggtacaaaatcggtgtatctgccggcatagttggcggcagcacctgtcgttgcacatctttccaattgattcgcgctcctttcttcttgaaaaatacgacttaaaaaagtctattgcattttatgccgctttccggcaaacggtcactctcatcgccgccggtctgagcgtcagattttatgccgccggtatcattcttcccatcgatatcgtctgtctctttgttaacacggcttgtcttctgccgggcagaaattctgcccggccgcttgcttgtatttttttccaaaacatgttaaaataaagctaatatcaatcgaaaaagcggggtatgagctatggatcaacaaacgtcattgaaaatgatcgaagaactttccaacgcatacggcgcgtccggatttgaagacgacgtgctgctggtaggccgcaaatacggcgaagggttggcccgaatcgaagaaaactgcatccgggacctgtttttctatcgcaatgaaaatactggagataagccggtcattctcctggacggccacagcgatgaggtaagctttatggtgcaggcgatcaagcccaatggtaccctgcagtttatccctctgggcggatgggtggaaaacaatgttcccgcccacaaagtcaaggttcgtaacgccgacggggaatatatttccggtgtggtggccagtaaaccgccgcattttatgacagcggaagaaaaggggaaaaacctgccgctctccgccatggtaatcgatgtgggcgccaccagcgccgaagaagtggtcaaggatttcaaaatccgcgtaggcgctccggttgttccggatgtcaccatggaatataacgggaaaaacggcgttatgctcggcaaagcgttcgactgccggctcggctgtgcctgtgtgatcgaaacgctgaaagaattgaaagggcaaagcctggatgtggatgtggtcggcgtattcagcacccaggaggaagtgggaacccgcggcgcgcaggtggccgcccaaacagtaaagccggatatcgccatcgtgtttgaaggctcccctgcggacgatacctttacgcctgattatctgatccagaccgcgctgggccgcggcccgatgctgcgtcacattgacgcaaaaatgattaccaatcctcgttttatccgctacgccatcgaccttggcgaaaagctgggcattccggtacagcaggcggtccgcaccggcggctccaccaatggcgcgccgatccatctgtccgggctgggggtgccggttattgtcatcggtctgccggttcggtatatccatacccatcattgttatgcatccctgtgcgattttgaaaacagtgtcaagctggcggtagaaatcatcaagcggttgaacgctgatatcatcaaaaacttttaaatgccggcccctttctgcggccggaaccacaaaaaagagggcttcggccctcttttttgatttgaagccctgcccgtttcgagacagagctgcctcccgattcctactttgtcaaaaataaaaacacccgcttgaccgcaaaattccgcttttcgcctttttcccgtgcatctcttcttatcacaaactctttcaccgtatctttcctcttttttatcggctgggagggaaaaataaatcccgccgtactggtttccccgccgtttttttgccgtatttctccccacaggtacccctgtccttgtccattcttgatgtcttgcctttttcgcctttttccgctacactggtaccagccgaaaacaggccctatttccccacaaaagaaaggtattggatatggataaaatggatttttataccgccctctcgcccacggtgctccctttgctgaaatggtatcaggcggggcatcgggatcttccctggcggcaaaacccaacgccctatcaggtttggatttcagagattatgctccagcaaacccgcgtccaggcagtgattccctattatcaccgatttctgtcgctttttccagatgtggccgcgctggcccaggcgccggaggaacagctgctaaaagcctgggaaggattgggatattattcccgcgcccgcaatctgcaaagggccgcccgtatcatctgcgatcgttttgacggatgctgtcctaccggctacgacgattggctcgctttgcctggggtagggccctatactgcgggggcagtctgttccatcgctttggggctgccggttccggcggtggacggcaatgttcttcgtgttttttcccggttgctggcgctggaggaagatattgcggcgccagcggtaaaaaaggaactgaccgcgcttgctgccgccctgattccgccggacgcgccgggagaatataatcaggcactgatggaactgggcgccactgtctgtctgcccaacggaacccctctgtgccaatcttgtcccatctcgggctgctgccgcgcgtttcaagaacaacatcagatgcttttcccgctgaaaagcccgaaaaaaccgcgaaaaatcctcaaaatgaccgtttttttggtggaaaatcagggccgttgggcgctgaatcagcgtccggaaaagggactgcttgccggactttgggaatttcccaatacggcggagcccctcgaccgcgaacaagctgccgcctatctgaaccgctgggtccgtcctgccggggaaccagtgccgctttctcctgccgtacatgttttcacccacctggaatggcatatgacagcctggaaaatcagcgcagaccaagttttgccccattgcccttttatctgggcaaagccggaagaaatacagaaaatctaccccattccatctgctttttccgcttttacgcccatctgcattgtgcaaaataacccataatctgaaatttatccacaaataaattggatatctatacaaacatacggatttaacacgttataatacaacttattattgacaacccactttccatccgctaaaatgaaattgttcgagggcgcgacaaacgccgctcttatacaacaaaagctgaagaatctccttcggcgggttcatcatttcattttattttaggaggattatcatgttaaagtacgatcctgcgaaaatggtagagcgcgcaaaaggctgcctcgccaacaaaaaagagatcatcgaggttgctgacaagctgagccaggaagggttctctaacatcttcttcattggcgttggcggcactatcacctatgcctggtccattcaggaaacgctgaaacctctgaccaccctggagtatcatgcagagcatgccgctgatttcaatactctgggcaataaaaaattcaccaaagattccattgtagtcgtaagctcctccaccggcgacaccaaagaggttgtggaagcggttgacaaagcgaaagcggttggcgctcgcgttgttggttttgtagacacccccggaactcctcttgctgaaaaagcggattactacatccccggcggcagctactaccgttactacaccttcttcctgcgtctggtacataacaacggtgaatatcctgaattcgacgaaatgtatgcaaacttggagaaactgcctgaattgatgcctaccgttgcagaagcggctgagaaagacgctgaggaatttgcgagaatccatcgtgacgacgcgattcagtatctgatcggttccggtaacatgtggggcccgacctactcctatgcaatgtgcatcatggaagagatgcagtggatgcggaccaaatctatcaccgcaggcgacttcttccacggcaccttggaagtaatcggccgtgacgacagcgtaatcctgttctacggcgaagacgctacccgtcctcagatggagcgtgctgagaaattcctgcacaccatctgcaaaaatgtaaccgtatttgacactgcaaaatacgaactgcccggcattgacaaaaaattccgcggcctgttctctccgatcgttctgggcggcattaccggcagaatcggcgtatatctggaagagtacggcaaacatccgatgcccatcagaagatactacagaaaactggattattaatctctttttctgcatcagaaccatatcaaacgcaaaaggtgccgtggatttttcggcacctttttccaaaatgaaaaaggaggactttccatggctaccctgttaaattatgatcctgaaaaatcccttgcttggaacaaaaaagcgatggagaaaaaagacgacatcattgctgttgtcgacaaaatctgtgccgacggtttttccaacatcttctttgttggcgttggcggtactttgactcaggcctggagctatgaagcaactttaaaaccgattgcctccttccccttttacgtagagcatgcggcagactttaataccgaaggcaataaaaaattcagcaaagattccgttttgatcgttacctccgctaccggcaacaccaaagaggttgtggagacggtggaaactgcgaaaaagattggcgcccgcgtgatctcggttgttggcgcgcccaacacccctctggtcgagctggccgattactctattcagggttatggggatctgattttctacatgatgctgctgcgctttgcttacaataagggcgattatccggagtacgatgagatggtcaagaacctttccaacctggtagatgttctgccctttgcagaaaaacaggcagatgagtactgcgaagcctatgccagagcgcatcgcgatgacaaaattcagtacctgatcggctccggcaacctgtggggtccgacctactcttatgcaatgtgcatcatggaagagatgcagtggatgcggaccaaatctgtcaccgccggcgacttcttccacggtacgctggaagtcattgagcgggatgacactgtgctgctgttcttcggcgaggacgaaacccgtccgcagatggagcgcgtagagaaattccttaaaaccatctgcaacaacatctacaaattcgacaccgcttctctgccgctgccgaacgtagatcccaaattccgcggtctgttctctccactggtcatgcactgctttaccagccggatcgaagcgtatcaggaagacgccggcaagcatccgctggccatcagaagatattaccgtcagctttcttactaaaattttgcgaaggtcccatcgaaaagaaggggccttcttttctttgcttttccctggcaatattttgcagtttccagcaaaagcgttgacgagcctgatggattatgatattctatattagaacgacataggacatctctgttctgcgtcataggcaatcgaccgattatcgaaaggatgaatgtgaatcatggattggaaaaaactgtgcgacgatgtagcccaatgggcggaagcacaccgcgacgaatttgtaaaggatatttcagacgtctgccgtatccgcagcaccagccacaaccaattggattgtaccaatgctccttttggtcaggcctgccgcgatatgctggataaagcactggaaatgtcctccgcttacggctttgagacccgcaactatgacaacttctgcggcagcgccgtctacggggataatccggataatgattctatcggcattgtagcccatatggacattgtaccggagaatatgtgcaatttggcaaacgacgcgggcggctggactcacgatccctttgatccgatcctctcggaagatggcaaatatctctttgcccgcggtagctgtgacaacaaatcctgcgggattatggcgctgtacgccatgcggtacttaaaagaacacaatatcaaactcaaaaacaatgtgatgctggtttatgggcttaacgaagaaatcggcatgagagatatgccggaattcctcaaacgggaaaaacactccaaaatctacctggtgccggatgccaaatatccggtctgcatttccgaatccgggaattcccgttacgggctggagtccgccaaactggaagacagcaacctcaaggatatctggtccggcatgagcgatgacgactggtgtgatgccactgtcagcgtaccctccaaggaggcttatgcggtattaagcggtgtagatcccgtggttgctcagtgggccaccaaattctacgatcacaccaaggtggaaacactggaaaacggcgatgtaaagatcattgttgaaaaagacgagaaaatcaccgcctccgcccgcctgtgccacgtactggcaaaatgcggcctcatcaaagaccccaagaccatggaagtgttgaattggctggattggtacacctccgacacgaccggcgcccatatgggcatcgcctgcgatgacgggcccaatgctccgctgtccattcgtttcaactatatccgcctgatcgataaaaaaatcgtactgtatacctccatcctctggccttctttggcggacaaggaaaaaatactcgcaaaagccgaggaaacctgggccgcttctcccatggaagtacggcagcgccgccggctggatggctattacattgatccgaaagatccccgggtggaaaagctggctcgaattgccaaggacgtgctgggtcgggaggatatcccttatctgacagaaggcggcacctatgctcaaatcctgcccaacgccattccctatggtgccaccgtgccggatcgggttcgcctgtttggcatggtcaaaggcggcgcgcatcaggcggacgagtactgtgatattcccaacctgctgatcaatatgcagatttacgttcgcgctctgattgaactagacgaaatgtattccaaataatcagaaaggatgggttttttatggattggaaaaaattgtacgacgatgtggatcagtgggccgccgcccatcgccaggagtttatcgacgacatctccgaggtgtgccgcatccgtagcgtcagcattatgaacaaacaagacccggaaaagccctttggcgcagcctgccgccaaatgctggacaaagcgctggaaatgtccggccggtatggatttgaaacccgcaattacgacaacttctgcggcagcgccgtttacggcagcaatccggacaatgattccatcggtatcttctcccacatggacatcgtccccgagggcgaaggctggacccacgacccctttgatccgattctctccgaggacggcaaatacttatttgcccgcggtactgcggataacaaatcctgcggcattatggccatgtatgccatgcgctatttgaaagagcacgacattaaactcaaaaacaatgtgatgcttgtctttggcatgaacgaagaaatcggcatgaacgatattcccgaatttctggcccgggaaaaatgcccgaaattttccctggttcctgatgcgaaatatcccatcacctatgcagaaaaaggaattaccaaatcggtgctaaaatc

SEQ ID NO: 3576 - DNA, 7243 bp, Unknown
  16S sequences of unknown bacteria
ccctgggcgatgaccgtgccgcccgcatctcccgagccggggccgatctcgatcaggtggtcggcttggcggaccacccgcacgtcgtggtcgacgcacaccaccgagttgccgtcctcgacgaggtcgtcgattacttgcagtaggccgtccacgttgctgggatgcaggccgatcgagggctcgtcgaggacgtagaggattcccgtcgtgcggttgcgcacggcacgggccagttggacgcgctgccgctcgcccgtggagagcgtgctgctcgcacggtcgagcgagagataccccagccccagctgcttcaggcgcgacgcgggctctgtcatctcgtcgataattgcggacgccatctcgcgcacgccgtcgggaagcgaggagggcaccgtgggcagccaggcgatcaggtcgtccaaggtcatgcgggtgacatctgcaaggttgaggccgccgatggtgctttgcctcaccctcttcgaaagccgcgtaccgccgcaatcggggcacggcccctccttcaggaagcgcgccacgcgcttgaggcccttctcgtccttgaccttggagagcgcgttttccaccgaatagaccgccgagtagtaggtgaagtccatctcgcccgcggtgcccgtcttctcgttgtggtagagcagatggtgcttttccgccggcccgtggaagacgaactcgcgctctttgggcgtgagctggttgaaggggacgtctgtgcgcacgccgcagtcgcgcgctatgtcggccataaggctccacatgaggctgccccagggcttcacggcgccctcgtcgatggtaagcgtctcgtccggcacgagcgtcgactcgtccaccatgcgttgcacgccggccccgccgcaggtaggacacgcaccgccggaattgaacgccatctcctcggcgcctgggccgaaaaactccacgccgcattccggacagacgatcgggcgctcgagcgagacgttgatgctgggtgggcagggatgcccgttgggacagcaatggctgcccgcgcggctgaagagcaggcgcaggctgttcagcagttcggtcgaggtgccgaaggtgctgcgcacaccgggtatgccgggacgctggtggagcgcaagggcggcgggaacgtggagcacctcgtcaacggcggctttgcttgcctgcgtgaggcggcggcgcgtgtaggtggaaagcgcctccaggtagcggcgcgacccctcggcgtagagaacgcccagggcaagcgagctcttgcccgagccagacacgccggcgatggcgacgaagcggttgagcggaatgtcgacgtcgatattcttgaggttgtggacgtgtgcgccatggacttggatgctcgtgggcacggagcgttgcaaccgtgaggtcatggattgtctccttcgatgaggtttctggcccaaggatagcgcgtcgctccccttcgagcgaacgctgcgcccatgccccgcgcatcgtgcgcgaaaagagtggcggtgccacgcatctgctgcacgacgcacgggaatcgtggcagtgccacgcatctgctgcaaaatgcacgggaaccgtggcagtgccacgcatctcacgcatacggggcgcgaaggcgcacggaaacggtggacacgggtcgggcggctacttgctcgccttcaggctcttcttgtactcctcgccccaagcttgcagggcgtcgagcacgggcttaagcgactgccccagctctgtgagtgaatactccacgcgcggcggcacctcggcaaacacctcgcgatggacgagtccctgcgcctccatcgtgcgcaggttggacgtgagcaccttctgcgagatctttccgatggaacgctgtagttccttgaatcgcatagtgccattggcgaccaggtccctgatgatgagaacctgccatttgctgccgatgagcgagagcgtggtctcgaccggacaggcgggaagcgattcgagagccatcttgcattcatccatcttcaaagcccttcatgtgtatacttgctgctcatcgatattagttactttgaggtacctaccacactttattgtgcctacttccctattgtacgccatgttcttactattccaggtgtcaacaagagcagccgcgcaaacgacgcgacctgaagaaaggaactcaccatggccaagaaaatcgcagtcgtcgcagcaaacggcaaggcagggcgcctcatcgtcaaggaagcggtcgagcgcggcaacgacgtcacggcattcgtccgctccgagaaccgcaccgccgcgacctcatccgtcgtcaaggacctctttgacctgaccgcaaaggacctggcaggcttcgacgccgtcgtcgatgcattcggcgcctggactcccgagacgctggaccagcattccaccacgctcgcgcacctgtgcgacgtgctttccggttccgacacgcgcctgattgtcgtcggcggggcgggctcgctctacgtcgacccctcgcacacgaccgcgctcgtcgacacgcccgacttccccgacgccttcaagcccctggcgaccgccatgggaaaggcgctcgcagagctgcgcaagcgcgatgacgtcaagtggacctacatctctcctgcggcggatttccaggccgatggcgagcgcaccggttcctacctgctcggcggcgaggaactgacgctccacgagcgtggcgagtccatcatcagctacgccgactacgccatcgccgtcgtagacgaaatcgagtccggcagccacgtcaacgagcgcatcagcgtcgtccgcaagtaaaatcggcagcaaacgcgcgtcgggactccgccagaggaccacccgacgtgcgcggatgttgcctcaaggcacagccacgccgcctcgatgtacaggagagcacatgaccagccagcaaaatcaaagtgaagccgagcgcctgaaagaggcaatcgccaacgccagcgccgttgtcgttggcgcgggagcagggctttccaccgccgcgggattcacctacgcgggagagcgctttcaacggctctttccagacttcatcgagaagtatggatttggggacatgtactcggcgggcttctacccgtatgcgactcccgaggagcgctgggcctactggagccgctacatctggcacaaccgctacgagcccgcgccaaaggagacatacaaaaagctcctcgccctgctgacggacaaggacttcttcgtgctcaccaccaacgtcgaccaccaattccagctcgcgggctttcccaaaagcaggctcttctacacccagggcgattacggattgtggcaatgcagtgggccctgccataacgcgacctacgacaactacgaagtggtgaagcgcatggtcgaagagcagagcgacatgcgcgttcccagcgatctcgtgccaatttgcccgaagtgcggccgccccatgagcatgaacctgcgcgctgacgacaccttcgtcgaagatgccggatggcacgaggccgcggcgcgctattccagcttcctcgaatcccacaaagacggcgaagtactctatctcgagcttggggtggggatgaacacgcccgtcatcatcaagtaccccttctggcggctgaccttggaaaacgagcaggcgacgtacgcctgcatcaaccgcggggaggcctacgcgccaaaagagattcgcaatcgttccatcgtgctcgacgccgatatcgatgcggtcctgaacgccatcgtcgcataaggcacgacgccccttcgcgcgcgaaagatgtggcagtgccacatatctcgcgcgcagtgcacgggaaacgtggcagtgccacacgtttgctgcaaatcgcatgggaaatgtggcagtgccacacatctcgcgttttccgcacgggaaacgtggcagtgccacgcgtctcgcgcgggcgacgtgatcgccgcagctagctactccttcggcatggcgtcgatgaggcccgtcagcatcgacgcgaagagggcatcgctgcccgcgccgcccttcgcaagatgaacgttgaccacggccgcgcaggtgcacggccactcccccgccctgtggatgccgcggacgctgctgcgcacgagctcggcgctgtcgtggacctcttgctccgactcgtattgctgcagcacgaagaactgcccgttcgcaaagcgcccgatcaccgcatgggtagagaacacgccgcgcagggcatctgccaccactgccagcagcacatcgcccgccttcctgccgtacaccttgatgaactcgtcgtatcctcgcacgaacacgctcatcaccgcgaacctgacgcccccgctccacagctcttcgaggtacccgctcagcccctcgatgaacccccgggtgttcgcaacccccgtgaccgggtcttcgaccaagaagcgcatcgcgtccccgtcggatttctccaggtcttccgcatcgatgaaatgcccgatcaatccgacgatcttgccgtcgcggtacacggggaccttgttcacgatgatgtcgtggaccctgccgcggacgacgcagcgccccttgacgttcttgatgacctttccgcgctcgatcacgtcgagctcgtcttgcatgaacggctcggcgtcaatatgccagcccatctcctcgtcggtcttgccgagcacgtcgcgctcgcaatcgaggccgtagaattcgaggaacttctggctcacgcccaggaagcgacgctgacggtctttccagaagtacttgacgaacgagccctcgatcaggctccgccacagcgcgtggtcggtgatctcggatgctgcattggctgcgaaagagcccgcaagctcggcggcgcctccccgctcgcccgttatgacgcggtagaaagcgacgaggtccatacccgtctccaccgtcgcgtacatgagctgctcgaagttggtgcggggaacgcagataacgacgtggtggagccacgtgtagctgccgtcgacgttcttgctgcggaagtatccgtggagcatgcccccggcagagcgcttcaggcgctggacgaacgtgtccgccctcgcaaaatcgcggaagcgggccctgtcctccgggtacacgaactcggttgtccacgtgtcgaagaccagctgaacccccttgacgcgcgcgaccttgccgatgggctggtcggagagcgacgatttgagtccctccacgctgtcgtcggagaaatcgatgagggcgacatccctgaaaacatagaagaggttgcgcagcatatcggcgcggcgttggttctcctcctcggcgtcgatctgcacgtactgcaagctcgcgcggtagatgctgcggttctcgcaacgcgccaccacctgcgccgtcaagagcatgtagtggccgccggaaggataggtgagcgtctgggtgtcgccgacctcgtgcaactggttgtcgacgaaatcgcggtgcaggctgtggacggggcttccgtgcgcattgagtctgcgctcccagtcgtgcaggtcggtcacgccgtcacggctgtagatgtctctgatgcgctcgttcgcgaacaggatcttgagcgttcgaccgtcatcttccaccacggcgagtggctcgtccgtcaggtagtcgatgcgccccagggcgatatagtagttgcgccagcgcgacgtgacggtggcgattccctgctccctgcaaaagcggctcacgagcttgcccggcatcggcttgccgaacaggtagccttgcaccttctcgcatccgatggagcgcaagaactggtactgctcctcggtctcgaccccctccgcgagcgtccgcacgccgatggccttcgccatgcgcaccgtggactcgatgatgatgcgggacttctcgctgctgctcgacaggaagctcatgtcgatctttatctcgtcgaaggtatagtccttcaggacgcccaacgacgagtagccgctgccgaagtcgtccatccagatctcgtagccgccgcgtctgaacgcggagagcgtctgccccagcagctccatgtccgcgacgaacgcgctttcggtaacctccacgttgagcttgtcgcgggggacctcgtagcgttgcaccagctcctcgatgcgctcgaacaggtcggggtgctggaagtcgacgcgggagaggttgaacgagacggggacgaggtccacgtccgcggctgtcacgcggtggtagtccttgcagatctgctcgacgatgtagaggtcgaactcgtagatcttgcccgattcctcgagcacggggatgaactcggcgggggcgagcatgccgcgctcggggtcgatccagcgggccagcgcctcggcgccgcacagcgtgcgggacatgcccatcaccaccggctggtagtagactcggatcctaccgtcgcgcatcgcccggtcgacgttatcgagaatgtagccccgcaatgagcaccccccccccgaggcattttcagcggcaaaacgcgtgcacggagggacgcgcattttactggctctatggtaatactatctcgattgagaaaccgtatttacgcgcccacaacgccgcaataggccgagaagaccggagggcggcacgtttgtggtcatgacagaccggcgaggcattggccatatttggtcagagccttgccggtctgtcatgcatatggtcaggacctcgccggtttgtcacaggtgcgaaccggaggtacaggtcggggtgtccctccggaccaaactgacacgatacccacggcccctcgtgtcatctttgacgcgcgaacgccttcaccacgatgatgcagagcaggagcaccaccccgaccagcacgatcgtgccgcccggcttgaggccgagctcgaacgacagcacgaggccggcggccgtgatcgccaggcccaccgcacatgaaatcgcaacggtctgcttccagctccgcgccacttgcagggcacacgccacgggaacgaccatcatggacgacacgacgagggcgccaacggtgcgcgcgccgacggccacggtcaacgcagtgaggatgacgaagagcgcgttgaccgccttcacgcgcacgcccgccagccgcgcggcctgctcgtcgagagtgaccaggaacagctggcgcctgaagaggatgcaggcaccgagcacggccgccccgacgagcgcggcggcgatgagctcgtcgtcgcttatggcgacgatgctgccgaacaggaagctggagaaactcgcggcgct

SEQ ID NO: 3577 - DNA, 1927 bp, Unknown
  16S sequences of unknown bacteria
ttgccgtagcggattttatccatcacggtgccggtgaacaggtttacgtcctgcagcaccacgcccagcgaacggcgcagatcggccttgcggatcttgttgacgttgatgccgtcgtagcggatcttgccgtcggcgatgtcgtagaagcggttgatgaggttggtgatggtcgtcttgcccgcgccggtggcaccgacaaacgcgaccttctggcccggcttggcaaacacggacacgccgtgcagcacctcgtggtcgggcgtgtagccaaagtcgacgttgtccatgaccaggtcgccgcgcagcggtacgtactcgatctcgccggttgcgcggtgcggatgtttccatgcccacatgccggtgtggtggtcggcctcctcgagctgccaggtatcggggttcacctgcgcgttgacgagcgtcacgtagccttcgtcagtctcgggcttctcgtcgatgagctcaaagatgcggtcggcgccggcgaggcccatgaccacggcgttgatctgctgcgagatctggccgatctgtccgcagaactgcttggtcatgttgaggaacggcaccacgacggcgatggacagtgccatgcccgagatgctcaggttgggcacgcccagcgccaggaaaatgccgcctgccagtgcgaccagcacgtagagcaggtttcccaggttcataaggatgggcatgaggatgttggcgtacatgttggccttctgcgagacctcgaagagcttttcgttgcgctcgtcaaaatcggcctcggcggcagactcgtggcagaatgccttgacgaccttctggccgttcatgacttcctcgatatggccctcgaccacgccgagttcggtctgctgcgcaatgaagaagcgcgcggagttggagccgagcagcttggtcataaaggtcataaaggcgacgcctgccacaatgaccaggcacatccaaacgctgtagtacagcatgataaagaacaccgtgacgatgacgatgatcgtcatgagcaggttgggcagcgactggctgatcatctggcgcagcgtgtcgatgtcgttggtgtagtggctcatgatgtcgccgcgctggtgcgtgtcgaagtagcggatcggcaggtcctgcatgcggttgaacatcttctcgcgcagcttctcgagcgagccctgcgtgacgatggccatggcgcggttccagaacagcgaggacaggatgccgacgccgtagatgcaggcgagggtggtcacgagctgtgcgatcttgggctgtgcagcttcccaatcgcccgactgccacgattcgctaataatctgcagggcgctctgaaggaaggtcgcgccgatggagttgatgatggcgcagagcaccacgccgacgacgacgaggggcaaaagcacggggtagaagccaaagagcgtcttgatgaggcgcgacatggtgccacccttgcggttgagcgcgcgctcggcggtcgttgccttactcatgtgcctcgcctccttcctgggtctgagcttgtgttgcggatgcctcggtgtcggcttcgacggcctcttcgccctcggcagacatcttgttctgcgaggtgaaggtctcgcggtagatctcgctcgtcttgagcagctcgtcgtggttaccgatctgcgcgatacggccgccctccatgacgatgatgcggtctgcgtcctgcacggagctaatgcgctgggcgatgatgagcttggtcgtgttgggcagatagcttgccagccctgcgcgaatcttggcgtcggtcttggtgtcgacggcgctggtggagtcgtccaggatcaagatcttggggcgacgcagcagggcgcgcgcaatgcacaggcgctgcttctgaccgcccgagacattggagccgccctgctcgatcccggggtcatagcccttggggaag

SEQ ID NO: 3578 - DNA, 8201 bp, Unknown
  16S sequences of unknown bacteria
taaaaggtaatccaccgcagtatggctgttttccgggcatctgcggtggattatttttacataattttgtataaattttacatccgagatgtccaatacttccctgtacagaagaagggcagtgcacaatatatacaaaaggtgttcgctggaagaagaaaagtgtctttctgacgaggaaaagcggttgagaatcgtcggaagtaccaaaaaaattaacaaaattggtcgtaaatgtgtaggaaatagttgcaatttccgcgaaagatgctataattatctccattatgtggggtttgtgtacgccatacacgagcatgacccgacagaaaacacaatcagaaagggagaacattatggcaaagatctcaaagaaaatgatggcaactgttctgaccgcttctatggtagcagcacttggaagcacaagtgcattcgcagaggaagcagcttccgatgaggatttcagcggcgtagagctgaacttctggactgcaccgtatggtgatgatgaggaagcattcctgaaggagcatcttgcagcatgggaagagcgcaccggcgcaacggttaacatcgagattactccgtgggacagctacgaggagaagatgatgaccggtattgcaggctctgacggaccggatgttgcttacatgtacaacgaaatgatctacaactatatggcaaacggccagcttgagccgcttgatgattacttcactgatgaggagaaggacaattacatctactggagcaacggtactgttcagggtacacagtacatgcttccgtatctggtaggcgctccgcgtattctgtttgcaaatatggatctgctgaacgaggccggctgggatcacgtgccgacgacctgggacgagctgaagcagtgtgcaaaggatgttcaggagaagacaggaaagcttggatttgaccagtactggaagggatatttcggtgatcttgatgagatctacttcccgtatctgtggcaggcaggcggagacatcgtggatgcagacggcaatctcactctggattccgatgcagctctgaaggcagctgagttcgtatacagcttaaagactgagggtatccttccggagtcctgtgtttccagagatgcagacgcagttacgcaggatttccgtaacggtgagctggcaatgtacgtttcttcttctgtagcagcaaagaagaataccgaagctggtatcaactgggattacgttccgtatctgaccgatgagcagggcggtacttttgtagctaacgactctctcgtaatgctgagcagctgtgagaacaaagaggcagcagcgtccctgatgaaggagctgacctctgcaacgatgatgcaggatttccatgagaacctttacagcatgccgccgatcacgaaagaggagacttatgcggatgatccgaagttcgaggagatgtacagcggagatgcttctgcacagttccatgcacttccgatcatgaacaacagctcccagatcatgtctactctgtatgcaaacctgcagagaatgatgatggatgagctgactccggaagaggcactttccgagactatgaattatgcaaatggactttaattcttaacggagaataaagtactgagacgggatgattgaaactgcagtggcgcgggaatatcgatttccgcgccgctttaaatgtaccagaatgtgtaccagaatacggcatctcccgttacgctattagagagtgaggcattttctatgactagaaaaatgaaaaacaacatcgcgggatggctgtacgtgcttccgagttttctgcttctgatcacgttctttataattccgatttgtagatccttttattacagcctgacagactacagtgttttgtccagtccggtcttctgtggatttaaaaactatataactgcactgaaggactccttcgtacaggcgtccctcaagaatacctgcatctacgtactggttacggttccgatgcagacgattctttccatgatcattgcggcagtgatcgcaatgaaattccagaacaagtatggtcgttttgtaaaggcctgcctgttcattccggttatttcttcatctgtccttgtcggaacgctgtttacgctgctgtttacgacagacggcggtgtcgtaaatactgtactttccatttttggaattggtccggtcaactggctcggacagtccagcaccgcgctgatcacggtatgtatcgcggcgatctggaaaaatgtcggatatttcctcgttattttctatgcaggactgatggatatcccgacatctctgtatgaggccgcacaggttgacggtgcaagcaagattcagcagttctttgcaattacactgccttgtctgaagccgatcacctatctggtcgttacccttggcatcatctggtccttccagtccttcgatatcgtctatgcgatgacaaagggtggcccgggccagtctacgtatacacttgtttataccatttacaatgctgcattccgtgagtaccgcatgggctatgcatgtgcagtcgcagtaattctgtttattctgattttgattgtaaacaacatccagaaattcttcctgggtgacaagaaggaggaggcataaagatgaatgacgtaaataagtctatgtcccatcgggtttcaatgattatcctgggcgcatttctcggcctgctggcgatcctcgcctgcttcccgtttgtgtatatgctccttctttccttcaccaattcaacatcgctgcgtttcgctctgagtgatgtgcatctggactttgtaaactataaggatgtctttgaaaagacgaagtttatcttcccattgaagaacagtgttatcgtcgcattcttcacctgtctgatcaatgcgctgttctgctccatggctgcttatggtctggagaaaaagcgttttgccggcagcaagggcgtattcgcgctgtatatggcgacgctggcagttccgggccaggtaacgatgattccggtatttttgatgatgcgtgacatgaacctgatgaatacttactttgcactgatctgcccgtcggtcgatgcattcggtgtgttcctgatcaagcagttcatgagctcggttccggatgagctgatcgaggccggtcagattgacggagcaggagaaatctatacctttacgaagatcgtcattccgctgatcaagccggcgctcgtatcattgacggtatttacctttatttccgcatggaacggattcttgtggccgttggttatctgctctgacagtaagatgcagacacttccggtagcattgtctcttctgaagggtaaatttgatacgaactatggtcttgttatggcaggctctacactgaccttcatcttcccgttcctgttgtatgcattcctgcagaagcagttcgtggaaggtatcgcgctgagcggcgtaaagggctgattgagttactattgacttcggttaaattgggcagcagctttcggacggatacgtgccgggctgttgccttttttgtgcggagcattgcataaatgccccgatgtggtaaaatggttttggcgttaattagagaaaaaggagtcacgaaatgaagaataaaatcaaaattttatatgatggtatacagctgcagctgacggattctctgacgaaagtgttctgggatgaaagaccgaaagcgatggcagaggaagccgccgtacaggcactgcgcggtgagtgtgtttcctttcagctcgcctattcttttgagggatggcggtttggagagggacgggtgcagtccttccgttttgcaaaggtaaaggtagaatcaccggtgcttccgtatcttcaagtgcggaaggtcatgaatgtgccgagccggtatgcggcacataagaaaaatgatgacaattatcttcgccgggagccggggctgtatccggatctgcttgagacgcttgaggatgactgtgttgttttccaggaagaccagtggaacagcctctggatcgatctggaggctccggcggatgcggcgccggggacgtatccggtgtgcattacgtttacggatgcacaggaggcggacgggcagacactggcgtgtgtcgagacagaggtgacggtcctcgccccaaagctgcaggcacagaagctgattcggacagagtggttctatgtggactgtctggcagactactaccatgtgccggtattctcggaggagcactggaagattattgagcattttgtggcgacagcagcgcaccgtggcatcaatatgattctgacaccacagtttactccgccactggataccgcggtcggcaaggaacgcacgacggtgcagctcgtaaaggtggaaaagacggcagacagctatgcgtttgattttacggatctggagcgctggatcgtgatgtgcaaaaaaaacgggatccgttattttgagatgtcccatctcttttcgcagtggggagcggtcgcagctccgaagattgtcgggatggtcgacggcgcggagcaggtgttgtttggctgggatactccggcggcaggcggtgagtatgagaagtttttgcgcatctaccttccacagctgaaacagaagcttgaggagctcggcgttctggaagaggcgtacttccacatttcagatgagccgaacctgaatcagattgattcctatcgggcagcaagtaagattgtccaaaaggagctggccggctgcaaattcttggaagcgctttcggactatgaattttatcagaccggacttgtgagccgtccggtgtgtggctctaaccatattcagccgttcctggaaaagcagacgccgggtctttgggcatattactgtaccgcacagggtgtcgatgtgagcaaccgcttcatggcgatgtcacttggacgtacccggatgatcggcgtacagctgtataagtttgacatcgagggtatgctgcattggggctacaatttctacaacggcgttgattctctgtgcaagatcgatccgtaccgtgtgacggatgcctgcggagcctatccgtccggtgatccgtttattgtctacccgggtgagggtggctatccagaggagtcaatccgcatgatggcactcgaagaagcgatgaatgatgtgcgtgccctgcagatgctggagggcttcatcggaagagagcaggtgcttgcgctgatcgaagaggatctggagcaaccgcttgagttcgacaggttcccggcgtggccagaggatgcggcgtacctgaccaatctgcgcgcaaaggtgaatgcgaagctctgtgcgtgtgcaggcagcaaagcgacttgtaaataagcgcttgcgtggaggagcacagatgaatgagaagtggtatgtggctgcgaaaaaggcagattttcaggggattgcaaagcggttcggcattgatcctgtgacggcgcgcatcatccgcaaccgggatgtggtcggtgacgatgagatccggcagtatctgtatgggacacgcgcggagcttggcgatccggcacagcttcagggagggctggaggcggcatcgcttttaaagcagaaaatcgaagcagggaagaagattcggattataggtgactatgacattgatggtgtcaattcgacctatattttgtatcgggcactgacgcgatgcggagcgcaggtcgattatgagattcctgaccggatgaaggatggctatgggctgaatatttctctgttaaagctggcgctggaggaaggcatcgacacggtcctgacctgtgacaacggaatctcggcgattgcggagatcgcatatgcgaaagagaacgggatgacggtcatcgtgaccgatcaccatgaaccgttatttgaggaggtaccagaagaggatcaggcggagacaatacagccgcagacggatacagcgcggcggattccatccccggatgggacacgcatcttccgccttccgcctgcagatgtgcttgtcaatccaaagcagccaaattgccggtacccgtacaaaaagctgtgcggggcggctgtcgcgtggaaggttgtctgccttttgtatcgcctctatgggatggaagaggaggcggagcagttccttcagtttgtgggctttgcgacggtcggggatgtcatggagctggacggagagaaccgtattctcgtaaaggaagggttaaagcagctgcggatcacacagaactacggatggcgtgcactgattcaggcaaacaatctggattttgacacgctgaattcgtaccatatcggatttgtgcttggtccgtgcatcaatgcgagcggccgactggatacagcaaagcgctctctgcggctgctgctcgcaaaggatgcggcggaagcggagctgcttgcggccaggcttaagcagctgaacgatgaacgaaaggagctgacacaggcggcggtcgatctggcctgtgagcagattgacgggagcacggaagcaaatgaccgggtgctcgtcgtttatcttccggattgccatgagagcatagccggaatcgtggcaggccggatccgggagcggtacggaaagccgacatttgttgtgaccaatgcagaggcagaggatgaagcgaagggatccgggcgttcgattgaggcgtattcgatgtttgaggagatggtcaaatgtcaggatctgttccggaaatttggcggacatccgatggcagccggtttttccctgccgcgcagccggatcgacgagatgcgtcgtcggctgaatgaaaattgtacaatgacagaagaggatatggcagagaagatcatggtcgacgtgccgatgccaattaactatatcagggaatcactggtcgaagagctgtctgtgctggagccgttcggaaatggaaatgaaaagccgctgttcgcagaacgccacctgaagctcctctcggcgcgcattctcgggaagaacgcaaatgtcctgaaacttcaggtagccaatgccacaggctgtacgatggaggccctctattttggaattccggacaatattctttcctacctgacagacaaatatggaaagaatgaggtgcggaagcttctgtggggcaaggtcaatcagatcgagatggatctgacctattatccgtcgatcaatgaatatcaggggagaaggacactgcagattgtgataaaaaatttcaggtaaggataacaaaggctgtgaaatacagctcaggaaagaacgataagagaatgacaggaggcctggttttatgaagttactgattatacgacacggagatccgaactacgacattgattcgcttacgccgaagggctggaaagaggtagcgtatctttctgagcggattgccaggctggacatccgtgatttttacgtttcaccgtatggacgcgcaaaggataccgcatctcttaccctgaaaaaaatggggcgcactgcgatggaatgcgaatggctgcgcgaatttacgccaaagatcgtccgcccggatcggggaccggtacccgctgccgtctgctgggactggcttccgcaggactggatgaaggaggaagatttcttctattatgatcgctggatgaacccgaaggtcatgcaggacgggcatgtcggtgaggaatataaatgggtcacagacagtcttgatgagctgctggcccgctatggctatgtgcgtgaaggccactattaccgcgttgaagagtccaacaacgatacaattgcctttttctgtcacttcggactcggctgtgtcctgatctcacatctgctcggcgtttctccgatggtgctctggcatgggctgtgcgctgcgccgagctctgtcgcagtcctgaataccgaagagcgccgtcagggtattgccagcttccgtatgagcgagtacggtgatatttcccatctttacgccaacgacgagccacctgcatttgcggcacggttctgcgagcgttatgaaaatgaagaagagcggcacgactgattgttgccattttcaggaataaaactggcaaaggctgtatattatgatgttggggtcaaaaggtattttccccccaacggatgcctgcgaattgctccgctgcgaagcagctcccgcaattctgcaaacattcgaaatccgctgatttactacgtaaatcgctactttctcatgtttggcgggtcccaag

SEQ ID NO: 3579 - DNA, 26394 bp, Unknown
  16S sequences of unknown bacteria
ttgtaccactcctgatacaagcaagtccctacccactgcttattgctccgcgcaattgaagcaggggacttgcttgactcggttaaaattaagaaaggatgccatgaataactatagcgcaaacgaaaagccaaaaaactctttatttccagatacagccaccgatccatacgatcttgcatacaacaatccctttgaggactcctgcatggaatcatatatgcaggatcttttaaacagcctgaatccatctcagctggatgccgtcacctccacagaggggttcgtccgcgtcatcgcaggtgccggttccggcaaaacgcgcgcactcaccgcacgtttcgcttatctcgtcaacgaacttggcattctgccgggcaacattctctgtgtcaccttcaccaacaaatccgcaaacgaaatgcaacggcgcattcaccggctcaccggtgataacgacaccgggtatatcaacacattccacggcttctgtgtctcgatcctgcaggaggacagccacgccgtctcttatccgaaaagcttccttgtgctcgacaactccgatatcgacgacatgctgaagatcatctatgaagaacgtggtctgactctgcgcgatatgacattcggaaaggcccgcgatatgatcgagatgtacaagctcgtcaggtatcccgattactatctggaaatgatccagatgccacttgatgcgctgcgggacaaataccttcagtccaccaaagtgtccgacatcattttttacggctatctctatcaggaaaagaagtgcttcggcctcgattacaacgatctgatcaaattttccctctatatctttgagcagaaggaagagatccggctgaagtggcagaaacgcctggaatacgttatgatcgacgagttccaggatatcgatgcactccagtatcaattgatgcatgtgctggtggggcaccaccaaaatctgttcatcgtcggtgatccggaccagaccatctacacatggcgcggcgcaaatgtccgctatctgcttgattttgaccaggctttcccgaaggtaaagaccattttgatgatgcagaattaccgttctgcgccgcagatcctgacagccgccaattccctgatcagcaaaaatacgctgcgcatcaaaaagaacctgaccgccacgcgttcttccggcgctccggttctgtgccaccatgccaaaacggcagaaacggaagctgactggatcacggcgcagatggaatctctgcacgaagaaggaatgccatggaaggatatgactgtcctctaccgtgcgcattatctgacgcgttccgtagaggaacagcttctgaaaaaagagattccctacacgatctacagcggcgtctcctttttcgggcgaatggaaatcaaggatgcactctgttaccttcgcatgatcgcgtatcacgacgatctttcattcctgcgcatctccaatgtgccgaaacgcaacctcggtgaacgccgccggaaatttctgcaggagatagccgcagcccaaaatctttccttatatgaggcactgaaacaaaacctggagcatgagatttttcacaatactgcagcagctgaatttgtctccctgatcgagaggttttcttccgattaccagaatcgccccgtttccgaagtgctgagcgccatccttgatgagagcggttatgaatgcatgctgcgtacggaaggcagccaggaacgccttgacaacctcgcggaactgaaacagtccgttcatgagtatgaagtatcctgcggtgaagaactgacactagaaaattatctggcacacgcggcgctctttactaccagcgatgcagccggaacaggggacaaagtaaagctcatgaccgtccacacggcaaaagggctggagtttccatgtgtttttttatgcggcatgaatgaaggtatttttccttccagaaaaacgcgtaccatacagggaatggaagaggagcgccgtctctgttttgtcgccctgacgcgtgccagagaccggctttatctctccgatgcggaagggcgcaatttcgacggctcaccgcgctatccgtcccgttttctgatggatatcgatccgtcacttcttaccttcacggaacagccgtcccaccagctgcttgcagatgccagatcttacattgccttaaacagccgtttccttcagtccgacgctgataccagatattttgctccgggcacgcgtgtgcgccacggcattttcggtgacggtaccatagaagctgtagaggaagattcaatggcttacatcatccttttcgacgagcttgagacacagcggcgtatttcttttcgtgcaaaactgacgaaaatctgatatgtatactgcacgtttccattgcgtcgttttctgcaaaacaatatgattttcctttctgtactcttttttgtacataaaaaaaagaagagttctgccgccttgtactttctttcaaacaaactgtattgttgataaaaaaatgcaatccatgtcttgtacgccgctttttattctgttatagtatcggtgaattagggcggactaattcatgaactgactggcagatatgcagaaccgtatcctgtcatagcgcatacagctgcgtttcggcaaaaccgtatttgcggagcatacggcacaccgccgcctgcgcagtactgacatacaacacagaaaggaacagatcccatgaaaaaagaatttgaacagtggaatggtttttccggaagactctggaaagaaggcgtagacgtccgtgattttattcagaacaactacactccgtacgacggagatgattccttcctcgagggaccgaccgaggcaacggacaggctttggggcagacttcaggaactccagaaagaagagcgggcaaagggcggcgtactggatatggaaacagatgttgttacttccatcacagcatacggcccggcctacattgatgagagccttaaggatcttgaacaggtagtcggccttcagacagacaaaccgctgaaacgtgctttcatgccgtacggcggtatcaagatggcagagaaatcctgtgagatgtacggctacaaaccgaatccgctcctgcatgagatctttacaaaatatcacaaaacacacaaccagggtgtatttgatatctacacaccggaaatgctcaaagcccgccacaacaaaatcctgaccggtctgccggatacgtacggtcgcggccgaattgtcggcgactatcgccgcgtcgctctgtacggcatcgattacctgatcgaagcaaagcaggatgattttgcagcaaccaaccggcagggcatgcgccgcggtgatttccagctgcgcgaggagatcgcagagcagatccgcgcgttaaagcagatgaaagagatggcccaggcctacggctacgacatttccaagccggcaaagaatgcaaaagaggctgttcagtggctgtatttcggatacctcgctgcgatcaagactcagaacggcgcagcaatgagtgttggccgtgtttctactttcctcgacatctacattgagcgtgatcttgaaaacggcaccctgactgaaaaagaggcacaggagctgatcgaccatatggttatgaaattccgcatggtaaaatttgcaagaattgagtcctacaaccagctgttctccggtgacccggtatgggcaacccttgaggtcgcaggtatgggtatggacggacgttcccaggtaacaaagaacgactaccggttcctgcatacccttgagaacatgggaccgtctccggagccgaacctcaccgttctgtattcctccaggcttccgaagaacttcaaggactatgcggctcacatttctgttacgacgagctcgatccagtacgaaaacgatgacgtcatgcgtccggtatggggcgacgattattctatctgctgctgcgtatctgcaaccgagaccggaaaagaaatccagttcttcggcgcacgtgcaaacctcgcaaaatgcctgctgtacgcgatcaacggcggtgtggatgagaaaaccggtgatcaggtcgcgccgaaatatcagccgatcacttctgagtaccttgattacaatgaagtcattgaaaaatacgatgtgatgctcgactggctggctcatctgtatgtgggcactctgaacatgatccactacatgcacgataaatattattacgaggcagctgaaatggctctgattgacaccgatgtgagacgtacgtttgcaaccggtatcgcaggcttctcacacgtcgtagattccttaagtgcgatcaagtacgcaaaagtaaaggtcatccgcgacgaaaacggcattgcaaaggactttgaggtagagggcgacttcccgcgctacggaaacgacgatgaccgtgcagacgatcttgccgttcttctgctgcgtaccttcctgaaaaagctgaaatactgccatacctaccgcgattccgaaccaacgacctcgatcctgaccatcacatcgaacgtcgtttatggaaaggcaaccggttcccttccggatggaagaaaagcaggagagccgctttctccgggtgcaaacccaagttatggcgcagagaaaaacggacttctcgcctccctcaactctgttgcaaagctcccatacgaggatgcgctcgatggaatctccaatacacagacgatcaatccggacgcgctcggacacagtgatgaagagcgcaccgaaaatctggtccgcgtactggatggatacttctcacagggggcacatcacctcaatgtaaacgtatttggcacggaaaaactgatcgatgcgatgaaccatccggagaaggaagagtacgcaaacttcacgatccgtgtatccggctacgccgtaaaattcattgacctgaccaaagagcagcagcttgacgtaatcgcaagaacctgccataaagcactgtaaataatctcataagaagggacaccggcagacgtgagctgtcccttatgagcctgtaaaaaatacagaggaactcctgtaccgggttcctctgatttttcatatttatatctgcttttactttccacaatcagaaaggaggcttatcatgccctcacaaacaccaccttgtgtctgttccaattctccggtcggttacgtccattcccttgagagcttcggctccgtcgacggcccaggtgtccgctacgtcatctttttgagcggctgcaccatgcgctgccagttctgccacaatccggacacgtggaaaattggcagtggaacaccatatgaggctgacacgttactgcgccaggctctgcgctaccgcacctactggggagaaaaaggcggcatcaccgtaagcggcggcgaacctcttttgcagatagaatttctgatcgatctgtttcaaaaagcaaagcaaaaaggcgtacacacgacgctcgatacgagcggcgcacccttcacagaagaagatccgttttattccaggtttctcgaattgatgaaatacacggatcttgtcatgctcgatatcaagcagatcgatgatgatatgcaccgtgtcctgaccggccatacaaatacaaacattctgcgcatggcccaggtactttccgatctgaacaaaccagtctggatccgacacgtgctggtaccgggcggaagcgataatgatgactgcctgcatcgccttgcggattttatccatacactccataacgtagaacgcgtggaggttcttccgtatcacacgcttggtacatttaaatgggagagcctgggcattccgtatccgcttgcaggcgtaaatccgccaagccaggatcgtatcgaaaatgctgaaaaaatccttggtattcacgcttaaattatacaaaatgacagttttctctcaaaaaaagattgacattttcactttttgcctcgataataagaagaaaaagatatttcattctgacatcagcgcaaagttgtggaatgtgttctttggagccgcatccctcagaagatgcggctcctttttatggcattcagaagatttccggtgcaccttttctgcaggatgatttatttttttcaatccttgagcaacgggggaaaattatggattctaaaatacaggagctgatcctgcagctgagtaaaacacatcatctgccagaggctgcgtatgcctgtctgattcgcggatgtagcgaagaagcttctgcatatgctgcgcggctcgccgtacctttgcgccagcaaatttacggaacggatgtttatgtacgcggtctgatcgagatcagcaatatctgccgcaacgactgtctgtactgcggtatccggcgcagcaacaaaacgtgtgtaagataccgtctttcaccgcaggagattctggaatgctgtgaagaaggctattcccttggttttcgcaccttcgttcttcagggcggggaagacggcttttacacggatgagctgctctgcgagctgctgcgtgcgatcaaagcacagttctcggactgcgccgtcacgctttcgcttggcgaacgcgaccatgaaagctacaagcgtctctttgacgcgggtgcagaccgctatctgctccgccacgagacagctgacgcctgtcattatcaaaaacttcatccgaccgagatgtcttttgatcaccggataggctgtctgcaggatttaaaggaaatcggatatcaggtcggctgcggatttatgatcggatctccttttcagacaccggaaacactcgcgaaggatctcaaattcattgagacattccgccctgccatgtgtgggattggacctttcgttccgcatcatgccacaccgtttgccgattatccgcagggaagccttgaattaacactttacttgctctccctgatccggctgatcgcgccggatatcctgcttccggccaccaccgcgctcggcacaattcatccgatggggcgggaaaaaggaattctcgcaggcgcaaatgtcgtcatgccgaatctttcccctgtcgcgcagagaaaaaaatatgagctctacgacaacaaaatctgcacaggagaagaatctgcacagtgccgcagctgcctttcttcccgtatgcactcgattggatatgaggtcgtcgtttcacggggagatcagaaaaaactcaccgcaactatcagcagcacagaccagtcatctgcctgctttacaaaaaggagaaaaaatatggctgtttacaatccaaaatcattaaaagcagaagagtttatcaaccacgaggaaatcctcgacacactgcgctacgccgaggaaaacaagaacaatgttgagctcatcgatgccctgcttgagaaagcacgtccgaaaaaagccggaaacggcgttcactgtgaaggactgacgcatcgggaagcctccgtgcttctggcctgtgacattccggaaaaaatccagaaaatgtatgaagttgcagaggagatcaagcttgccttttacggcaaccgcatcgtcatgttcgcaccgctgtatctgtccaactattgcatcaacggctgcctgtactgcccataccatctgaaaaacaaacatatcggccgcaaaaagctgacgcaggaagaagtctgtcaggaggtcatcgcactgcaggacatgggacacaagcgtcttgccattgaagcaggtgaagacccgaagaacagtccgatcgaatacattctggagtgcattaaaaccatctatggcattcaccacaaaaatggtgcgatccgccgtgtaaacgtaaatatcgctgcaacgaccgtagaagagtaccggatgctcaaagaagccggaatcggcacctacatcctcttccaggagacctacaataaagagagctacctgcagctgcatccgaccggcccgaaacacaattatgattaccataccgaggcaatggaccgcgcaatggaaggcggcatcgatgatgtcggactcggcgttctctttggtcttgagctttataagtatgaatttgcaggtctcctgatgcacgcggaacacctcgaagcagtacacggtgtcggtccgcataccatcagtgttccgcgtgtaaagcatgcggatgatatcgacccgtccgcatttgacaacagcatcccggatgaaatgttcacaaagatcatcgcctgcatccgcctggctgttccgtacaccggcatgatcatctcaacccgtgagtcagaagaggtgcgggcgaaagcattaaaagtcggcatctctcagatcagcggcgcatcccgcacatccgtcggggggtacacacaggaagagcgtccgcacgacaccgagcagttcgatgtttccgaccagagaagccttgatgaggtcgtacggtggctgatggaaatgggcttcattccatccttctgtactgcctgctaccgcgaaggccgtaccggtgaccgtttcatgagcctgtgtaaatccggtcagatccagaactgctgccacccgaacgcgctgatgacacttgctgaatatctcgtcgattacgcatccgaagagacaaaacagatcggatttgccctgatcgatcaagagcttgaaaaaattccgcgcgagaagacgagagagatcgccagaaaacacattgaggaaatcaaaacctctaacagccgtgattttcgcttctaatgcagtatgacaatcaaccacagccggtaaattaagcagaaagtactgctgttaccggctgtaattttatctcagaaaggaatgtatctcatatgagtcttcaaaataccccgtcttccgagcgtgttcacatcggatttttcggatgccggaatgccgggaaatccagcctcgtcaatgcagtcacaggtcaggagcttgccgtcgtctccagtgtcccaggcacaacgactgaccctgttcaaaaagcgatggaactccttccgcttggcccggtcgtcatcatcgacacaccaggttttgatgacctgggtatgctcggagaaaaacgtgtacaaaaaacgcgccagacgcttgcaaagacggatatcgccgtactcgttgcagatggtatccgcggtctttccggcagcgacctggagcttgtctctctttttcaggaaaaaaagctgccatggctgctgatctggaacaaagccgacctgaccgctgctccagaacaagatttctttcttacccagcttccatctgatgcacctggctgcgggcaatccttaagcaaagaaactcagattgcagtcagtgcgcataccggataccatatttttgaattaaaagaacggcttgcacatctgttaaaagaactcccggagaaaaagctgctcgtcagggatctgcttcagcccggctccgtcgttgttctcgtcaccccaatcgacgagtccgcaccgaaaggccgtatgatcctgccgcagcagatgatgatccgcgatgtgctggttggaggctgtatggcatttgttacaaaagaaactgaactcaaagccaccctgcaggcgcttcaaaatccgccagcccttgtcatcacagacagccaggccttcggattcgtcagcaaagtacttccacccggcattcctctgacatctttttccattttaatggcacgttacaagggctttcttgggacagctgtcaccggcatccaggcactcgatacgcttcaggacggtgacaccgtactgatcgcagaaggctgtactcatcacagacagtgcaatgatatcggcacagtaaaaattccgcgctggcttctttcctccaccggaaaaaaactgaccatccgcacctgttccggcaccgaatttccagaggatttaagtgggatttcacttgtgattcactgcggcggctgtatgctgaacgagcgtgaagtccagtcccgcatacagcgcgccgtatcgcagcacatcccatttaccaactatggaattctgatcagtaagatgaacgggatcctggagcgtgcgctgaaaccgcttgaatgactcggttaatcttgttctgttcgttcctcagctttcttccattatgaacgcacctatagcaattctgcaaaatattctcatttagaaattcatcccacgcattgctttttttcttgggttgtgatattctcactcttgttagaaatatctaacttatctcaaaaaggcagtcctggtgatacctttttcatcactttggtacatactgcaaatcacatccgcgaactgttttctgatccgccagcaaagcacagtcagaaaacagcagaagagaaccggacgtgggaaaggattctgatatgaaaaatttagcaattgaaaaagtaatcggaagagaaatcattgattccagaggaaatcctaccgtagaggcagaagtaacgcttgcagacggcacagtcggcagaggatgcgcaccgagtggtgcatccaccggtgaatttgaagcacttgagctgcgtgacaatgataaaacaaaattcggcggaaagggtgtttccaaagccgttgaaaatgtaaatacgacgatcgcccgggttttaaaaggtgtggatgcctctgatatttatgctgttgatgtagcaatgctcgaagcagacggcacaaaagacaaatcaaaccttggtgcaaacgcaattctcgccgtatctattgcaagtgcaagagcggcggcagcagcacttgagcttccgctgtaccgttttcttggcggtgtcaatgcaaaccgccttccagttccaatgatgaacattttaaacggcggcgcacacgctgcaaacaccgttgacgtacaggaattcatgatcatgccggcaggcgctccaagcttcaaagaaggacttcgctggtgtaccgaggtcttccatgcactccaggcactcctgaaatccagaggccttgcgacctccgttggtgatgagggcggttttgctccggatcttggcagcgatgaggaagcaatcgaagtcatccttgaggcagtgaagaaagccggatatgagcctggccgcgatttcgttcttgctatggatgcagcttccagcgagtggaaaggcgcgaagaaaggagagtacattctgccaaaatgcggtaagaagtttacctccgcgcagctggtggcacactggaaatctcttgttgaaaaatatccgatttactccattgaggatggactggatgaagaagactgggaaggctggcagatcctgaccaaagaacttggcgataaggtacagctcgtcggcgacgatctttttgtaacgaatacggaacgtctctccaagggcatttctcttggctgcggcaactcaatcctgatcaagctgaatcagatcggctccgtatctgagaccctcgaagcgatcaaaatggcacacaacgcaggctacaccgctgtaacttcccaccgttccggcgaaacggaagataccacaatcgcagatctggcggtcgcactgaacacctgccagatcaagaccggtgctccaagccgcagcgagcgtgttgcaaaatacaaccagctgcttcgcattgaagagcagctcggcgcatctgccgtttatccgggaaaaggagcattccatatttccagataaatattgttttggctgaaatctgaaataaaagaatcctccggcgtacgtgaaaaagtataccggaggattcttttatttcagatttcagctttgaatataaatatttttcgcaggttaaaatatgctgtatttgaatcgaatacgtttgaatgtatccgaacatttttcatggattttgcgtggaaaagagcgccatagatctatacgacaaacacatgtttttcaaatagatctatggtttttttaatgacttcccgtttttccgtatttcgtttatttttttcgcccttagatttacataaaataattatgtaaatctaagggtttatcttttttcttcctcattattttttgatttgctcatataaatctttcaatctctctggttttattattttttagttctatgcatacagcaatattcttattcgctttatcattttatatttcagcccggtaaattttgtctttacagattcattaatccatatttttgaacccagatttaccagggattcgttttgattttcatattcttatctgttataattaatacagccaattttcaaaataaaaatttacatttataaaatgcattttttgcttactattataattattaataaaggaagttttttatggacactacaaacctcacttaccacgaccaggtaacaatcgacaacgtccgcaagctccgcgaagtcctgcagactttgccgccgtttgcccgcgattatttccgcgccattgagccaaccacctcggcgcgcacccggatttcctatgcttacgatatccggattttcttcaattttctcctcactgaaaatccggcgtttaaaggaaaaaccatgtctgatatcactgtcgatgttctggatcagatccaggcggtcgatatcgaggaatatcaggaatatctcaaggtctatgattccgctgaggacaaccggcttcagacaaacggggaacgcggtctcaaacgcaagctttccgcactgagaagcttttatacctattattataaacgggaacgtatcaagacgaatccgacgcttctcgtggatatgccgaagcttcacgaaaaagaaatcatccgccttgatgtcgacgaaactgctgagctgctcgattatatcgaacacgcgggcgatcagctcaccggccagaaaaagcgctactatgaaaaaacacgtcttcgcgatctggcaatcgtcacattgctcctcggcaccggtatccgtgtctctgaatgtgtcggactggacgtcaccgacattgatttcaaaaacgacgcaatccgtgtagtccgcaaaggtggctcggaaatgatgatttattttggtgaggaggttgaaaaagcgctgcttgactatctcgaagaacgggattccatcacaccagtcgccggtcacgaaaatgctctcttctactctactcagcgcaaacgcatcggcgttcaggctgtggaaaacatggtcaaaaaatacgcgcacgaaatcactacaaccaagaaaatcacgccgcacaagctgcgaagcacgtacggcacaaccctctacaaagaaaccggtgatatctatctcgttgccgacgttctcggccacaaagacgtcaatacaacccgaaaacattatgcagcgatggatgaggaacggcgccggaaggctgcctctgcggtgaaactgcgggagccgtgatgatgtcaaagtttattaactctggtattcgcaatctgctccgctgcctgcctgattcagttaaaccataatataaaaacacagactgcagctttttgctatggtctgtgtttcattataggatattgatttgtctgtctgtttcggtttacataatttaattacgtaaacttttaatattattttctttcctctggtctttcttcccctcgcaccgccgcatactgtgccgtatcatagaatctcccgcctttataatacttcttccgcgcgattccctccagctgcatcccgcactttgtcagtacacgggctgatgcgtcattccctgcaaaaacctccgcctgcacgcggttcagaccaatcttatcaaatgcatagcgcagcacgctttgaagcacctccgtcatgattccgcggccctgatactccggtgacagcatatagcaggtatcggaatacaggctcgtttcatccacgtttccaagattgatcgtcccgatcagcttcccgttctccttccactcgatcacccaatgaaaatatacgtctgactgataattttccgcccagcgctgcaccattttccggtactgctctacactttcggccggatcaaacggaaaataccggcacacttcctcatattttccccagctttcgtacatctcctcatagtcttctggctcaattcgccttaaaatacaacgttctgtttcaattgctcttgtcccaatttgacttatccctgtactcatcgcttccctcttcctgtttcacttctatctcccattccacacgcacctggtgaatgaaataatgaaatattatatttcagatgtttcactgtcaagttcaaaacaaaactgaattaatttttatgcatagtatcatgaatacttttatcccacaatcgtcggtatattcccataaagcagaatccgcagcacacccatcagcaccagatgtcccacatagaagaaatagaaaaaccatttcattcccttccactttcctcttgtaccgttgtaaaaatgcataaacggccatacgataataatgccatactgtaccagtccgtatacggcatcgattgccagacaccataccaccacatacagtgtgatatacgccatcattccaagtacctgttttttcaggttgccgcggtttttgtggatatgtaaggtacaaagcaccggaaaacacgaccagtcagacggaaacgccagaagacacagcagcacgatcagaacaatcttctgccagttctgtaacggaaacgcccgcttctcatcatcatccacatacaatgccagtgccgcgcaaaacagcgcccaaatcacacttgtctggttcagtaccgaatcctgaaatggaatcactgagattccgaaacagaaattgtaggcaaaatgcgagatcactgcaaaaacaaacaatctttcaagatactttttaaaatttctggtatactgatatccctccgaaatcatgaaccacatcaccggtgccgccagtcttccgaaaatatggatcagcaaaagccaccattccttatgagtatatcccggccagattgtccacgcaaggtgatccgccgccatcgcagcgatcgcacacaatttcagctgatttccggacaaaccgccggatcgttttagatagcttacctgttttgtcattatctctccttttccagatacaagacgagcattcctctcaggcctgatcaaagtccaagaattttctcctccagttctccatgcgggtgctctggatctgcctgaaacacggcaatcccatctgcgttcgtactccgatccgtaaacgccggatagaggaaaccacattccggagcgcccggctcatagtctccatgcaccggggcaaccgcgcagatcagaaatttgtacacttcctctgaatcccaaagttcctctttatcgcttcccttcaaaggcacatcgtagctcccgtgaaaaaagtacaccgcatatgatccctttgccctgtaatgttccccgaacagctcatagataatgtcaagcagcgcatcatttttcagctcacagtcccggagcgccagaagaagctggcggatcttctgcgtattcgcggacgtaaagcgatactcccttagcttctcattcgtctctgcaaacggaatcgccttggcaattgcaagatttgtcgcctgctgcgccggtgagagcttcaggaaatgcgcattgaatgttccatccacaaatccttcctcatccagataggcaccggcgatccggccaaagcagttccgttttacggtcattctccgtgtcagctccagcatatcttcacggttgattcgccgcagttttctttcttccataccttttcctcacttaaatttcaagattttaaccgagcagcgaagcagattgcaaatatccactttgatccaaatcagacaaatacagcaaaccggattatgaatatctgatctcctcttggacgcttatatccattacaacagccaaactcccctttacaataccacatgattattgtatactttctttggcttttacgatactctgtaactgttctgagccatcgcatctgctcagcattatcaaaatggatttcacaatccatttcgctgcctgctataaccgaatagctgcttcacagcctgattcggttaagttcagctctcagcagttacaattatcttacaggaatcaataaaatgcaagcaataaaaaaggagatcctgatcatgacatttgcataccctgcaatcctgcacaaaacaccacagaacacctacaccgccgttttcccggatctggctgactgtcaagccgagggcgataccttaaacgagtgcctcgataacgcttacgatgccatgtacaactggctctacatcgagctgactgaatttgaaggacatcttccgccggtttctcatgcagaagatctgacacttgatgagggtgatttcgttcggaatatttctgcaatcatgaggctgaccgacggctgggacgagtaaaatctactttatcacctgcgtataaacgcaaatcctttcgcatacgctctcatagtgaagcagcaacgtgcactgttacaagtcaaagcggatattcgcaatgtatactattacagcaaaaacagtcccctgatttttccagtttatattctggaagtccggggactgtttttttctgcaatttatttgccatgcaaatcgactgccagcttacatattttgtaactgttcagagccaagcaaaatttcataaaaaaggcggaaaatgcttgcatttttaagcctgtttttgaaattttatttggctctgaacagttaccatattttttatttctgctttgtatacgacatgaactcatcccatgccgcatcctgaagccgtttgatgatttccggcgcttttcctcctaccggaattttatctacttccgtaatacagttgcacagcgttccagaacttgtaatgatcaattcatccgcattcatagcctctgtcactgtaatttcctccgctctggtcgggataccgatcttttccgcatttttgatcagatgtttgatcgcaattccaggaagaaccttattatcaaacggatgatagacaagcgtaccatcaataatgaaagaaacgttggaatgtgccatctctgtcacgcggtcaccccgatggaaaataacctcattgcagccagcctcttttgctttctgatttgcgattacgcttggaatcagattgagtgttttaatattgcaatgaaggaaacgcgtatcctccagcgtaatcgttttaaacaccttgtcacgcggagaaagatccattggcatcagcgttgccatcaaatttggttttactaccgcatcatccggaaaaatgtgattgcggagcgccgttcctcttgaagtctgccagtacagaattccctttccgtcatttccgtcaaatacttccaccagtttataaagaatctccttcagttcctctctggaatactgaaatggaatgcgcagcagcctgcagctgttataaaaacgatcgaaatgatcttccagcgcaaaaatcactccattctgcacataagtggcatcatagcagccatctccaaaatacactgcgcggtccagaatcgggcactgaatctcctcaagttttcctaatgttccgttatagtatcctacctgttccatatcctcagattcctttctcttctaatattgttgttgccatatccgctttcagaattggctctttcttcagtactttatataatccaatcgtcaatattggaagcagatacaaaatcataaatccataagacagcagactgtaacctttttcaatcagatcaatgataccaaatttggaaagcacacatgcggttaccagaataaccactgtaatagctgcctgctgtttgcgatccagttcgttctttttcttttccattcgcagtttctccttggttccggacagtcttacatttgtaaagcggacattcgcaatccgcttcgcacctgctcatgaacgcagtcgcttcgcgatctgcattcaaacaaaaaaagacagtgaaatcattttcagacctcactgcctctgcttttttatcgctataaattttgtttgaccgtctctgttttatggaacatattctatcactaaaaaaacaaatgtcaatacctgtttttcatttttctgaatataaatgcttgcattttaaccgagtcaagcaagtcccctgcgaggttgtgcggagcaataagcagtgggtagggacttgcttgtatcataagtgagataaactcactcatgatataggttatgagcaagtagcgaagcggattgcgaatatccgctttcacagctattatttcactgtcacgtcacaggaatacgtattcagcagagttccatccgcatcatagaaggaaacgcttaccgtcgtctcgccagtctgccagaaggtcaccgcaatacttccatcctctgagaactcggtctgttcaaatgtaacctgtgcatcatcggcattttcgattaccgcgtacactgcctcggaaccaccaagcagcatctggccgtataccgtatcaccagcttttacaccttcgatcggctgattcaggttaaagccataggcagaagtctgaatctgccagcctgtgccatccgtagcctcagtcgtgccgataccgtcctgcgtctcaaatgcatcctgtgacagagtcacataatactgcgcatccgctgcaagcacttcatccagcagaacctttgcctgatatccggatgtccatccaagtttggaaagttcactctccgtcatcggttccacagtcaccttagaagaatcattcatagctattgtctgtgatgttccgtccgcgctgttcgatactgtcacgctaccggaaccggcaatcagatcctctctcgggaagctgatcgtcagcatgttgatgcctgctgataccgccgcatagccatttttctctgaggtagccggtgcaaatacaaaatcgtccattgaaatgacttccagattgctcgttacaataccatcgtcacctgcggccgtttcgctttcggtggtatcatcatttgctgcattcgtctggctctcagtactctcttcatttgtatcactgttttcatttgtataagaatctgaagctgtgatttcaaaatcaagaccattctgtgtctcatcatccgaggtctctgcatttgtctcttccgtcagtgccgcctgatccgttgcatcgaacgtaacaccgcttccaagtgcactgtcatccgtattcatcagaatactgtccgaagaaagatctgtctcattctcaacctgctgtacatcatctgcttctcctgtatcgtccgacggaatctctgccgcgttcaggtcagcagaagtgctgtccacattctgttctacacgctccagcgtcgtcttcatgtcatcataatcataatcctgctgagaaatctcatccagcagattattcagaagatttctgtcttcatcagtcagagaaatgtttttctcctccgccacgttattgatgataatatcaatatcattctgcgtcacatcatttccctggatgacctgcatcttactgtcattgacaatctcagttgccagctgctgcccgatcgaatttgcgatcgtcgtcgtcgtgatcatttcctgcgtcgcgatgtcttttttcgtttcatcgagctgtgtgccaaccgctgattcataggccatcaaaataccagtcagggcacctgtaccggatacctcaaacggggacgctgcaagcacctcacagtttacaacgccggaagtcgataacgtcgtcgcaatcatattgctggtcacccaggacaggttggccgtcttcacctgaataccgcctgagtttgtcggattgacgtatgcacagctgtaagtatgtgagccgatctgctcaagcggcacatacgatccgagatgattccgctcatcctgatttgtgatcgtcagcgtctgaagattctgtccggcaacgccgaagtaacggagaatcgcctgtttctgatcgtcggaaaggtctgcaccaagtgtgacaaccctctgtccgtctgcaaaaactgtaacggaaggtactgccgccattacgcacagcacactcatgagtacagccatcgtttttcttttcatatggattcctctctttctgtgacttctttccatctttcatccttatggaaagaatatccgtttgtttaccaattatagcattcgcctatggagattacaagaaagcaaaagaaatgtaattattaatctttttcaaagatgcaaaacatttgtttgccatttttatcattctgtgttatactaaagaaaacgcacgtacgggaggtactatatggaagaaagacctatttccaaaaagcaggaagaaattttaaattatataaagaatgaaattctggagcgtggatttccgcctgcagtccgtgaaatctgccaggcagtcggattaaaatccacgtcctccgttcactcccatctcgaatccctggagcgcaacggatatattcgccgcgacccgaccaagccacgcgcgatcgaaatcctcgacgaatccttcaacatgatccgccgtgagatggtcaatgtgccgatcatcggcacagtcgctgccggacagccgatcctcgccgagcagaacatcgaaggatattttccgattccgacggaatatatgccgaacaaacagtcctttatgctcaaggtcaagggcgagagtatgattaacgcaggcatctttgacggcgataaggttctggtcaagcagcaggccactgcagaaaatggagatatcgtcgtagcactcgtcgacgattctgctaccgtaaagacctactacaaagagaacgggcactaccgtcttcagccggagaatgattccatggatccaattatcgtagacaaatgtgaaattctcggtaaagtatttggtgtattccggattttccagtaaccagtacatcgtttcgtaaataactataccagtcccgctgttttcttcccttgcggcagaagcagcgggattatttttctgccatggctgctttctgatctgcaataccggatgtttgaaaaacgaaaagtctcagggctgtcttaacaacgctcctgagactttatcataactacatttttttcacggctgtttctgcctcttatcttttgggcttactctgcagttccaaaacgctttggaaggccttccagaagttctttcggcattgcaagatggaatccggccggatttaagagaaatcccttagaatccttgatcagaagcttggaaagatttgcaaacggcatagccagcgctttaaatttattttcgcggttgaactttgccagctcgtttggatctgtaaagagcggctgcagaacatctccgttcttatttttcagaatcggaaggcgatacttcttttctttcagcttttcgatatccgtctccggtccctccagaagctcaatcgggataatgtagcgtgccttgaaaagatttgctgcaagctcctcttcaagatctgcaacctgcttttcctcatttggaatcggtcgtgcagcttcctgcataaaatacagtccggtcagctgcagttccggattcatgatcggctgctgctctttcggaagctttgaaaaatccgggcgtcttaccagttcgtcaagttcaattgtttcttttccattttctccgacaaataccagctcattgataccgatcgtaaaaagcatggtaaagaaagaaagaaaacgggcattcgggtatttaattcccttcagcagaatttttttctctgtatatggttttgcgaactcctgaagctgtgcctctgtatcaaaaatccacacctggtcgttaaaagactctggatcgcatacaacaaatggcatatttgtaaatgcgcagtatgcaacgatcatctcttcctttttctgaatgcttttcattaaaaatgtcttatctaccgccatggttccttctcctgtctctgtttattcccggggcaccaattcaaatatccgtgtctgcatgacattgggcgtatctgacaggtgcagcggggctttgatttttataacagcccagaatcgcagcggaacacacggcgttctgaattgttatatttttttacagttcttccgcagaaatttcttttccatctctccagatacgctccaaatcatagaacaaccggttttccgtatcaaagagatgtacgatgatatcgccgtaatccaacagaatccagtttgcgctgcggtacccctctgtctgctttgccggatgacctgcttttccgagcgtctcctccacgctgtccgccatcgcctggacctgattgtgattcgttccggaagcaatgataaaatagtcggcaaggacagacacaccttcgatattgataatcttgatgtcctgcgctttcttttcttccagtgcctcatatacaagctttgcaagctcctttgaatgtttgtcggccatatttacgcctccttttctctttcttcgattaactgtctgtagtaattataagccattgttgtctgattatcaagacaggttttttccttttccagatacgcaagcgtatccttcagcgttgtatagacagccagatccagatcttcaaacgccatatggcggatcagcggaagattctccgcttttgagcgcatcggctcaatataatcagaaataaaaataattttttccagaagtgtcatatccggttttccggtcgtatgacacgcaatcgcatccagaatctcctggtcttttacatcatatttttcccgcgcaatgtaagcgccaagcacagcgtggagcagaaacggtgatttttcctccactgccgacaccggaatatcattctggcggcacagcttgagctttttgtcatttggaatgcatttcgcacagtcatgcaaaaggccggccacctgcgccttttccagatccgcgtcataacgcattgccagggcagccgccgtatacatcaccccaagcgtatgcacgtaacgcgactcatccacgtattttttcagctttttctgcatctttatcagattgtatcccattattttccctctttgtaaatctgattgtctcggatatatgcaaacacctcatccgtcacatagtaacggatcgaccgcccttcccggcacatttcacgcaggcggcgcgatgcgatatccacatccggcgtctggagcagaaagatccgcgcctgatatttttcccggagctcgtccatcttttccgtcagcatctcaggtgccagctgatcccgcaccgcgactgcaagaatgcagtgtgcacagatgccatcaggacgataccaggtatcaaaggccatcagggaatctgcgccgataataaaataataatccgtatccggatgctgcgccgtcagaatctcaagcgtatcgttcgtatacgtataaccgctgcggtacatttcctcagaatccagcgcaaaatgcggattagcatcaatcgccagtcgaaccatatccatccgctgctgatccgaagcccctacccgcgtacgtttgtgcggaggatttccggacggcaggaacagaacctgttccaggtcaaactgctcatatgcgcattccgccagcatcagatgcccgatatggatcggatcaaatgttccgcccatcagtcctatgcgatgtcttttcttttctttcccatccaccattcgttttctcgcccccggtttgcaggaaagcagacgcaccggtctgccttactgtttcaaagctttctgttttccggaaagtttttatttctgtgcaccggactttcctgccttcggcagttcgatttttttcttattgtcctttccctctttgtaaaggacgatcttctttccgatcacctgtaccacctgggaacgcgtacgctctgcgactacctgcgcgatctcattcggatcgtccatacagttctgaagcacactgattttgatcagttctcttgcctcaagcgcctctgcgatagctgcggtattctccggcgtcaggctggactttccaatctggaaaatcgggtccatcgtcattgcaaggctttttaaataagcacgctgcttacttgtcatagtattctccttctatttgtaataatcaaactgcagtccatacatacggatcgtgtcaccgtccttgacaccaagctcttcaagcttttccagaattccattgtccttgaggaagttctggaagaactgaaagcccttctcagattccagattcgtataaccaagcatcttctcgatcctcggtccctccacaatgtacgtatctgcctcttcttctgatttttctacggtaaacggaagattgtctgcctttaaatgcagctccggatcgtactcctgctcaaataccgtcggctcctgcggaagctcacgcagcatgccctgtacatgatacagaagctccttcagtccctgtccgctgactgcagagatcgggaatacctgaattccctgcggctcaaaggtgtcgcgcagacgcttcagcgtctcctctgcctcgtcaccgtaaaacgcatccatcttgttggctgcgattacctgcggcttctttgcaagcgacgcatcatactgtgtcagttcctgattgatctttaaaatatcatctaccggatcacggccttctaccgatgcggcatccaccatatgaatgatgacttttgtacgctctatgtgacggagaaattcaagacccagtcccacaccttccgatgcgccctcgatcagtcccggaatatccgcaatcacgaatccgccgccgtccaggtcaaccacgccaagattcggcgaaagtgtcgtaaaatgataattggcgatcttcggatttgcatttgtcacacgggaaagcagcgtcgatttacctacgtttggaaatccgaccagcccgacatccgcgatcactttcagctccaggcagacttccagttcctttgcttcctgtcccggctgcgcatacttaggcgcctgcattgtggaagttgcataatgcatgtttccattgccgccgcgtccgccttttaataccacctgtcggctgttatcacccgacatatccgcgatcacctgtccgctttcggcttccttgatcaccgttccctccggcaccttcagcacgatatctgcgccgtttgcaccgtggcatcttcgtttctggccaggctctccgtctaccgcagaaaactttcttctgtggcggtattcaattaatgtattcaatcctttgtctacttcgaaaatcacatctccgcccttgccgccgtcgccgccatccggaccgccgtccggcacgaacagttcccggcggaagctgacatgaccgtcgccgccttttccggagcggatgatgatccttgctctgtctgcgaacatattaaaacctctttctatcaatataacaaaaagccttcccggcactcatgcagaagaaggcttttgcgaaaacaggcttcaaaccaacttatgatttgaagcctgcgacatttttattctgcttctaccggaagtacagaaacaattttcttgtctcttccttttctttcgaatctgacaactccgtcagccgtagcaaacagtgtatcgtctccaccgcgtccaacattgagacccggatgaatctttgtgccacgctgtctgtacagaatgtttccagcctttacaaactgtccgtccgctctctttgctcccagtctcttggactcggaatctctgccgttctttgtagaaccaactccctttttatgagcgaagaactgaaggttcatctttaacatagttacacctcctcaagtaataaggtaatatattcatttccgtattcagcctcaatattcccgattccgagaaccaggctgtccatcagcagtgcagccctttcggaaagtccttccggaaacagcaccttcaggtatccgccatcttctgcctgttccacctgatacgcatcctcagtaaactcctcaatggaatttaccgcattgaacgtcagcgctgaaacagcggcacataagatgtcgtcaccatccccggcataatccgcatggcctttgctctcaaagcccttgtactgatgctcagatttccacactgtaaatgtaatcatcgaaaattaaccgttgatcttttcaatctttacctgtgtgtactgctgtctgtgaccgtttttcttgtggtaaccggtttttctcttgtacttgtaaacgatgactttctttgcttttgcattcttcactacggtagcggtaactgttgctgctgcaacatcagcgccaaccttcattccgtcattgcttactgcaagcacctgatcaaacgtaacagtctcgccagcttctacaccaagcttctctacgttaatgatatcgccctcggctactttgtactgtttaccacctgttgcaataattgcgtacatatggcacacctcct

SEQ ID NO: 3580 - DNA, 32759 bp, Unknown
  16S sequences of unknown bacteria
accgccggaagacaggattatttttgtcgaataccgaacaccgggcccgcgggaaggaaccccttcccgcgggcccggtgttttttgcatatatctttttcctgtcttgacttttgcagaaggattgcctaaaataaagcgacaaatgtttctttagagtcgcagcagagtccggcagattcgtctcacgaggcggtaaatttccgcctgatcagggatttgagacgaatcttctgtttgtttctgtactgcggctgaaggcgcttttcgctgatttcaagatctgcggcccatgtgccggagggcggaaaacgaaagagagcaggcggagattatgagaagaaaaaatgtcacgcgacagatgataaaggactatatttcacaggccctgctgcaccttatgcagaaaaaggcctattcgcagatcacgattcaggagattaccgcggaggcgggggtgaatcgttccacttattaccgcaattttacatcgaaagaaacgattattcagtatatattcggcgaaattatcgataaatttgatgcttacgcgggggagcctctggagctttctctgcccagctgtcttccggagatgtttcatcatttttataagtatcagaagacctttctgatcatccataaagccggattgtcgcatctgctgctgaacgcctttaacgattactttaaaaaggtatacggttctgacgattcacaacagctgtatgcggtttattatcatacgggaggaatctttaatacatttttgctgtggctcgatcaggagatgaagataccgccggacgatatggctcaaatcgctttgacatatcttctgaagaacggtatttttgacagacaggggcgggaggctgagaggacggtatgagtaaaaatacggaccagatcaaaaagatcgggaaaaatatttcgatgttttgcggtaagattttttcgatattccgctgggatatgaaaaaaatctttaccaaccctatagcggcgattatcgcggtgggcctgatggcgcttccttctctgtacgcctggttcaatatcgaggccagctgggatccctacggaaataccggaaatctcaccgtagcggtggccaactgcgacgacggctacagtttaaaagggatcgacgtcaatgtaggaaattctatcgtggattctctggcgggcaacgacagcatcggatggcgctttatgagcaaggacgacgcgatcaaaggcgtggagtccggcgaatattatgcggcactcgtcattcccgatgatttcagccgggacatgatgagcgttctgacgccggagatggtgcgtcctgaattagaatattatgtaaatgaaaagaagaatgcgatcgctcctaaaatcacaaatacagcgatgagcacggttcagcagcaggtgaacgctacttttatcgatcagggaatgacgatgatctgcgacacgattatcgaattgtatcaagcgtatgcagattctgatctttcggatctttctcctgtggatgcggaaaaatccctggaaaatgccatttcactgctggagcaggtctccgatcacctgggcgagacccggatgctgctaagcgtatttaaggataccggagatacggtggattctcttctcgagatggttcagaagacgctggataaatcttctgaatctctgacaaagacagaggataccataaatgcggttaccggttccgcggatcatctgggagcttctctttcgggtgtgatcgattcgctggatctgctgatggataccacggatgaatctgtctctctgattgacggacttttgaaggatgcgtctcccggcatcatcgccggtgcggacagtgccgccggcgccgcagaagatatcagcagcgcagtcagccgctgcatcaagccggttcaaaagatggaggaactctgcaccagcctggcggatcagcttcagaagtctatcgacagcggtctgatcaaagaagaacatcaggtgacgattaccgatccgaaggatccggataagacggttacactgagtctttatgattcttttcagaaggcggtcaaatctctgcgatctgcagcgtcccgtctttccgatacggcggatcagctgaagacggtgagggacgaactgaatgaaatggcgtcggatctgagagacggcgccgaagtgacggcggcggatatcgaaaaaatccgcaaagacgcgggcaaagctgcaagtctcatgactggagcggtcagggaattcaacggtacggcgaaggatgaaatcgaaaattgcgcttcttatctggccgatactgcagatcagctgattcagaccagcggcgacctgtcgtcgattctgccttatctggatatcacgattgacggaggccgtaaatccctgacttcggccgaaaatgtcatagataagacagcagagctgatcggcagtttcaatgatactctcatcgagagcatcggaaatctccgggaactgaaggaagatgttcacgatattcagtcttctgtcaacgtgaagaccgttctggaggacgctctcggtgtagattttgacaattatgcggataatacggcagaatttgcggagtttctgtcgtcgccggtaaagctggatacgaagacgctgtatccgattaagacgtacggttcttcgatgacgccgttttattcgattctcgcgatatgggtgggctgtacgcttcttctggcgctgctgaaagtagatgtaaaagaaagcgaaggaatccgtctgagccgataccggcattatcatctgtatctgggccgttatctgatttttatgctgttttccatcatacaggcagtcatcatctgtctgggagatctgtatcttctgggaatccagtgcgaggctccgggcagatttcttctggtgggcgtgctggccgccgtcactttttccaatatcggctatactttgacaatctgcctgggggatgtggggaaggcgatttatatcgtgtttctgatcatacaggtcgccggcgcgggaggaacgttcccggtagagctgacgccgagctttttcaatgatctgaatccgtttatgccgtttactcacgggatcaacgctatgcgggaatgcatcggaggattttacggccacaattacgttcatagtctgatgaagatgtgtgtgtatttcccgattttcctgatcttcggcacggtattccgcaagccgctgatccggatgatgaaatttttccacagaaaactggatgagacgggcattatgtagggaaagacgggcgctgcgccgtccgtctgtacacttgcgctgagctgctgcggcaaagacggggaaggagatccggtggaatctccgggtatttctatgacggtggatcagaacaggctttccgttcaaattactccttgtagcgatatatcaaatgttataaaatataaaaatgtccgctgtatacgatagattgaatgcgcggagaacagcggaggctgagattattttgagagtatttgaaatagatggagaaacagaagcagtatgaacaggaaaagtgaatatatcgacggatttcggaagggtattcccatcgggctcgggtatcttccggtatcttttacctttggcgtaatggcggtggcgggaggcattccggtgcttctgactgtttttacgtcggtgagcaatctgacatccgcagggcaatttgccggggcgaaactgattttcgcttcagcgggttattttgaaatcgctctgaccacatttgtcataaatatcaggtatatgctgatgtctctggctctttctcagagattggaggaaaagacgagtgtctggcagcgtcttctcatcggctacggagtgacggatgaagtcttcgctatcgcctctgtggaaaagaagaggctgaccgcttcttacatgtacggtctgattacggcacccgtggccggctggaccgcaggaacagctttgggagctctcatctccggacttctggtagagtcggtggcaaacgccatggggatcgctctgtacgcgatgtttatcgcgattatcattccgccggcgaaaaagtccaggcctgtcgtctttacgattctgctatctgtagcggtcatggtggctctgagcacgatcccgcttttttctgtgatttccgaaggatttcgggtgattatcgccacatttgccgctgccggaacggcggcagtcctctttcccgtcagagaggagaaatgtgtttctgaaccttctcatgctgcggaggaatctattcgaacgtccggcgcaaaagaggacggtgggtttgaatcgtcccgtaccggggaggaggccgcacattttgccggagatttaaatgagccggaagggtctgccgcagatgtcatcgaagcggcaggcggcggggctgccgagggaggtgaagctcagtgaaagtgctgatcagtatcatcgtcatggcggtcgtcacttatatcccgagagtctttcctctggtggttttccgaagaccgatcaataatgtatatatcaggtcgttcctgcattacgttccttacgcggtgctttccgctctgacgtttccgtcgattttatggtctacaggcagcgtcgtaacggctgctgcgggtacgcttaccgcaattcttctggcgtatttcgagcagagtctggtggtcgtggccgtggcggcgattctcgtggtttatgccgcgggcgctctgatttgactgccaaaacggtgtggaatcgtttcactgctctgactgctcgaatttatcgggaatttaacctcagtctgaataacaggaaaagaacggtccgaaaggccggattcgattttccatcgtcagattttaaatctgacttttggaaagcggtttcggttttcggacttttttgttttgcctgtttttgtcggtgtatcaccgccgttttcgacagcggtgatttgtggtatgatttttttaattgcagctctgaaatgaagaacaggagaaaaatgatgctggtaaatgattttaaaggtctgactctcccccgtctgggattcggcgccatgcgcctgccgctgctttcggaagaaagcggagagatcgacagaaaacaggtgaatgagatggtagattatgccatgaagtgcggagtgaattatttcgataccgcatatccttatcacggaggaatgtcggaaatcgtcatgggagaatctctgtcccggtatccgagagaaagttattatctggcgacgaagtatccggggcatcagctcagcagtacttatgatccggaagctgtctttgaggagcaactgaaaaaatgcggcgtggaatatttcgatttctatctcctccacaatgtctacgaaaactcgattcaggtctacacggatgcgaaatggggaattttggagtattttgcggagcagaagcgccggggcagaatccggcatctgggattttccagtcatggcagcatacagattctggaagagtttctggagtatgcgggggaacatatggaattctgccagatacagctgaactatcttgactggacactgcagaaagccaaagaaaagtatgaaatgctgacagaccgcggtatcggagtatgggtgatggagcctatccggggcggacggctggcccgtctgtcacaggaggaagaagcctgtctcagaaagatgcgtccggaagagagcagcgcggcgtgggcgctgcgttttgtccaggatcttccgaatgttaagatggtactcagcggtatgtctgagatgcagcagatggtcgaaaatgcgaagactttcagcgaggaaaaaccgctgacatacggggaaagggagaagctgctggaactggcggagggaatgaaaaattccgttccgtgcacggcctgccgctattgctgtggtgactgcccgatgtagctggacattcctatgctgctgtctgtctataacgaactgcggtttcattccgcagtgatcactgcgatacgactggacggcctttctgaagagaagcgatcttccgcctgcatcgcctgtggaaagtgtacgaagatctgtcctcagaacatcgacattccggcggctatgagaggtctgacagaagaactgaaaaagcttcccagctgggaagaagtttgcaggcagagagaagaagaggcgaaaaaactcagataatctgccgcaccgatccttcggagattcggttcttcgggggattttttgtctgacgagcgaaagttcagaaggggcggcagtgcaacaggtgaagtcctgtccctgtttgcagcgcagacagcggaaggtctcatgcaaatgttcccaaaatctttgattttgaggaagatactgcggcccagaacgcttagagattggcaagccgaaaggcgcagacagagcttagcgcttatggtatgatgtctgcaccctgagaatgacgagcgaaagcgaggacagatcagcggtgcaacagatgcccagagcgcttagagattggcaagccgaaaggcgcagacagagcttagcgcttatggtatgatgtctgcaccctgagaatgacgagcgaaagcgaggacagatcagcggtgcaacagatgcccagagcgcttagagattggcaagccgaaaggcgcagacagagcttagcgcttatggtatgatgtctgcaccctgagaatgacgagcgaaagcgaggacagatcagcggtgcaacagatgcccagagcgcttagagattggcaagccgaaaggcgcagacagagcttagcgcttatggtacaataatacccgaaaggattatgacagcagtttttctgtgcgcggagcgccgggagaaactgtaaagctgatgattcaggaggatgacgatatggcttatttaggtgaagaaataaaaaaattaggttttggtctcatgcggctgccgcagaaggaagacgcgatagatatcgagcaggtgaaagaaatggtggatctgtttatggaagcaggatttacctatttcgacacagcctgggcttatgaaggcagtgaggacgccgcccgtcaggctttggtggagcgttatccgagggaatcttttcagctggctacaaaaaacgccgcctggatcgactgtaagacaaaggaggatgcggaggcgcagttcgatgtatctttaaaacagaccggagcgggatatttcgattattatctgctccataatctcggagaaggccgcactcatttctttgatgattttgatctgtggagttggattaagaagaaaaaagaagaagggctgattaagcatgcgggtttttctttccattccacagcggaggaactggatgaaattctgactgctcatcaggagatggagttcgttcagcttcagatcaattatgccgactgggaaaatcctgcgattcagtcgagagcctgttatgaggtggcgagaaagcacggcaagcccgtcatcatcatggaaccggtaaaaggagggatgcttgcttcccctccggcttctgtagaggcaattctcagagaagcggagccggaatcctctgcggcgtcctgggcaatccgttttgcggcgaatctggacggcgtgatcaccgtcctgtccggaatgagcaacatggagcagatgaaagataatctggcatgtatgaaagattttaaggggctcagtgaaacagaacagcgtacacttgacgcggcgcagaaagctctgaatgcaattcctctgattccctgcacttcctgtgattactgtgcgaaggtctgtcctctgggcatcggaatctccggatccttcgccgcgatgaattctctgactttgtacggagacaaagaagcggcgcagagacaggagaagtggctcgtcagcgatcacggcatgaaacacgcttatgactgtgtgcagtgcggaagctgtgaggcggtctgtccgcagcatattgcgatcagtaaagagcttcagaaagtgagcctgaaattgctgtaaagagaggagccttctgatggcaaaggaaatcgattccaaagtacttctgaatcatctgggagcgacggctgtctgtgtggttcacgcatataatcacaagattctgtacagcaatgataaaatgaaggaactggcggaggtgacagaagcgggggtaaaattctgccgtctgtggtcttctgactgcgcggtctgtcctctgtacgaagcgaagcaggagaagaggaagtatctctctgcgatcggaatggtgcttccggggggcgaacgggcggatgtgtatgccgaactgatcctctgggaagatgaaacggcatatctggtcaccgcgtcgccgcaccgtcatacgaaagaagaaaagagacttcttctcgagcgggaatatctgtccgctgtggtgtctcaggtctatcctgtcgtctatctgttcaattatacggaaaattcctatcgctatctgaacttcgatcagccgcgggtgggcgtgccggaggaacacggcgatatcgatcatctcttagagtataatctggtgcagattcatcccgattaccgggaaaagttccgaaagatttttgaaccgcggcagataatgcaagactggcgaaacggtatgacgcagcgatcctatacttatcgttatctgatgacggacggagagtatcactggctggaaatgaccgtcattaaagcagacgacccggaagctggcgacattctcggaatcgccttctgtcattctgtcgatgatgagaaacagatggaagaacggcttcttttggagcgcagagtgacttatgacagtctgccgggcggtgcgatcaaatgtctgatgtcagagaatcccgtcattttgaacatgagcacaaatcttcaggggcttataagaatcgaaaaaggcgattttctcggggagctgatatggccggaggatcgcgagcagatcatgaaggaggctatgacgctggtgcgccagggttccgatatttttctggaaattccgctgatcggtgagaatggggacaaactgtggatgtattgtgcgggcaaaaagatcggaatcaagaacgaatggccggtctatcagtttattctcctggatatcagcgaacgccaccgcgcgcaggagcagttgaaacaggaaagggaaaaataccggattctcacacagagtgcggcggacgccgtttttgagtattatccggataccggagatttctttattcagcgcaatatgaatgattccgctgaaatcgttccgctctatctggagcgtatgaaagaatcccgagcctgcgacagagaaaactatcataagctctgtcagattctgaacggcggattaaatgaagcggaactgcagatctggccgtctgcagatcacacacagccgccggaatggtactatgtccaggtaaatcacatgaggagcgggggcagagtaaataaagtgatcggaacgcttcggcagatcagcgaactcaaagaagcgattctcagcgcgcagcgcgtcatggaggaggcggagcgggaaaaacgccatgctgcgcagcgtttcgtgacttccgtcagcggcctgtatgaagcgatttacgaagcggatctgtatcagaataccatttatgtctggaaagaaggagaggcaaaggcgcctttcaactgcaaatatgagacgctggagcagttttttcagacggcataccgtaaatatgtgcacccggattacagagaagcttttaaaaataagttttttctcgagccgatgaagagggcttttgacgcaggagaaacccgtctgacgatggaatatccggaagtcaccccggaggggcgatcgatctggatgatgctgcaggttcagctgatcgaaaacagcggagagatcagagatatcatgatttttctgcggaatatcgatgacgctcgaaaaaaggaggaggaaaaccgccagatattggaggatgcgctgtatctggcaaaacaggctaacgacgcgaaaacagattttctgtcgcgcatgagtcatgatatacggacgccgatgaatgcgatcatcggtatgacggctattgcggccgctcatctcagcgattcgaagaaggtagaggaatgtctgatgaaaatcgcatcttcctcccgttatctgttggggttaatcaatgacattttggatctttcgcgtatcgaaaggggaaagatgtcgatacgtcaggaggttttcgattttcaggagatgataaaaagtctcgcggcgatcagttccgcacaggctcaggagcggcggcaggattttgggattcgcgtttcgggagacttcgatcagatatatgcaggcgatgaactgaggctgaaacaaattctcctgaatgtcctgagcaacgcgcacaaatatactccggacggtggatgggttttgatggaagttttttcaaacccggcggcaaatggaattacgatgatgaaatttgctgtttctgacaacggcgcagggatcgagccggaatacctggagaagatttttgagccgttttgtcaggggtcaaatgccagcggcagcaccggttccggtttgggtctcgctatcacgcagaatctggtccatctgatgaacggcagtattaccgtcagcagtacctatggaaaaggcagctgttttaccgtagaattgcctctgaagcgggtggaaggagcgggcttcccggcaaagaacacgcaggtcgtgggagatcgagatcttcgcattttactggtggacgacgacgctgcagtctgcgagcatgcgtcgatactgctgcgcgagatgggactgaaggccgactgcgcgggcagcggttgcgacggaatccgcctgctgaaaaagagcagagatgaagaaaatttgtacaatatcgttatcgtagactggaaaatgtccgaactggacggagtcgccacggttcggcaaatgcgcaaggtggcgggcagagatcttctcgtcgtgatcatgtcggcctatgactggagcgatatcgaagaagaggcccgggcggcgggagttgatttttttctgtctaaaccgattttttcaaataatctccgggcgattttggaaagcattcaggaaccgaaagagcagagagaaagagagatcgtctttgacggggaaaaggttcttctggtggaagataacgagctgaatcaggaaatcgcagtcacactgctgaaaatgcggaacttggaaatcgatatagctaaaaacgggcgggaagcggtagagaagtttctggcttcaaaggaacaggaatatcgagcgattctgatggatatccaaatgccggtgatgaacggttacgaagcagcgaaggcgattcgggcctgccgccgggaggacgcgctcagcgtacccatctacgcgatgacagccaatgctttcgctaatgatgtgtcggaggctatcgccagcggcatgaacggacatctggcgaagccggtggattttcaggaactttctaaagttctgaagagagaatggggaagctgaacgatgaagaaattttttcagttttgtgaaaaaacagttgtgaaaagaggaaagaaaacgatttaaaagtaaaataaaatcgagctatattcttaagaatatgtatatattgcataaagaaatgcaagaaatgtcatatttaacactgaaaaatgaaatattttgaaacgaagtattgatttttatagtcattttgttataataaatgcgtggttatccccctgataaccttatattaatctctaatcccaataccccttttgaacaaagaaacccgcgcccctgcgggtttctttgtttttcaagtgagagcaggattttcgattttgtcaagtcagatgatttaattataaagtgtattacttgtttattcattgtaagaaaagaatccgatgacggtaagtgaaagggattttagttgcagacgatgttattgacagcgcggcggtccgcgttccgtcttctttttgcggcgtaaaatcagcgcagtacaaaaacgaatttatcactcctgtatactgttctcgccacttccaggattttatgatcgttttggctgatacattttgtggtaaggatcaaacagggagcgaatccctgtacattcaacagctttcgctcttttgcggtgagagaagagactgtgatatcgctgttctcattggaaaagtcagtgtaaccgcagtttttgatatattcaaatagagaggtgacggaggaagcgtctttcgcaatttgcggaaaattctcctgtgaaacatagctcgtatgaatggcgacaggattctgatcgaccagacggagcctcgtgattttgtacaccggctcgtccggctttgcgttcagcaggccgaagaccggagaagtttccttcagtctctccgcacccagattgacactcctgtagtttacgtttaattttttcattttttctgaaaaactcgaagaatccgtcagaacgagacggattttttcttttttcccggagaaaaaacttccgcatccctgtatggagtagatgtaacccagttctttcaaacgttcgtaggctcttcgaatctccgctctgggaacgccgaaacggatcgccatttcattttcactcatcattttttcgtcctttttatagtcttttttcgtgaaatcctcgatcagaatatcggcaatctgctcccagcttactgtttttttgctcatgtgcgcctccgaagaaaatgattatcttgaactgctttctactatagcagcggaaaaatgcgtagacaacaggactcccttatctttaacccatattttacagggacagagttggcaactttacattggttttctatcatacgaagcgaagttcactaaactgacagtttgcggaaaggaatttgaaggatgaaaaaaaaggaaatatcttcaatattgtcgagagcttccagagatgatatcgaagaaatcgcggcgccgctgaaagaagaaagcaggatccaaatcgtgaaggacccgcaaaagacactggtcatggttaaagtcagagaatccgtcgggagatctctgttttatctcggggaggtcctcgccgcggagtgtatggtcctcgtggacggtacaaagggtttttatgtgacggccggagacgattttgaacgcgtattaaatggggcggtgatcgacggttatttgaatcataacagaggaaatgagaaagagcgcagcgtgattgaacagatccggcgattagatgaaaaacaaaaagcggaaagaggatggagaaacgcacagattttgaaatcaaaagtcaattttaatgtaatgggggaatcgtaacatgacaaagcaggaggagaaggcgtgcggatttgactttgttcacgatgggcagcgggtattccgaagtctgatgaaagcgatgtcgaatcccggaacgatacaggatatcggagaacaggcggaaaagttcggagaagggtatgcgccgcttaccgcggtgggatgtactcttctcgacaatgaggaaatcgcgtatgtggaaaaaaaccccgtactttcctcggaactgcatgatttgactctctgccggcggggcgcgttggaggaagcggatttcatttttttatcttcagagatgaattacggttctctggagcagatattgaggaatgtaaaaaaaggctcttacagcgatcctcaggattcggcgacgcttgtgattttgtgcggagaaatccgcggagatgtgccggtgacggtgaaggggcctggagtgaacggtgcgctgacaatacgggtttccaagtatctggagacgattctctttcttcggcagtcgctggatatcgagtatccgttgggtacggatctgatatttgttacgccggagggggaaataatatgttttccaaggctgtgcagagcggagaaatagaggagggcaaaaatggcttatgtagcggtaaaaggcggcagagaagcgatagaacagtcgctgaggcttctgaaggaatttcgtgaatgtgaagaagatctcagtgtttcgtcgattaaggagaatatgccgctgctaatcgataagattatgagcgaagccggtttttattctgaagaatacgcagcgctggctttaaagcagagcgagggcagtgtggaggaagcggtatttctgctgcgggcgtatcgttccacccttcagagaaattattattccaatcccgtcgatacgggacaaatgaggctgatccgaaggatatcggcagcgtttaaagacattcccggagggcagattttaggacctacatacgattattctcaccggcttttggatttttctctgatggacggagaaaacggcggagatgcagaacgatatgaagaaacggaatctgcggaggatatcgtctgcggcagggtttcggatcttctgcgggaggaaggtattctcaaaactgctgaggaggacaatactcctccctttgatgtcacatgcaatcttctgacgtttcccgcgccccgcagcgccaggctccagacctttgcaagaagcgacgcagggtttctcggaggtgtggcgtacagttccatgaggggatacggagcggttcatcccactgtttcggaacttcgcagcggttatgttgaagtctgcattccgtatgcgtttgatgaagaggaggaaatctgcataggagatattctcgtaacagaagtggaagcattggttccgtccagcgaacagacagaagaggaatttgacgaaataacgctctccagcgggtatggactcattttcggcagaaatgaaaataaagcgatcgcgatgtcgattgcggatgccagtctcaacagcagaggagacgcgcctgctcaggatgaggaattcgtccttacccacggagattgtctggagatgagcggctttatttcacacctaaagcttcctcactatgtcacattccagtcgaaattagaccgtgtgcgcgagaaggagaagaaaaaatgatcgatcagaaacattacaattttgcatttctggatgaaggttccaagagagagatcaggcggagcatattgaaggcgattgccattcctggatatcaggtgcctttcggttcccgggaacttcccatcggacggggatggggcaccggcggcatccagcttaccctgtcgattataggaagagatgatgtgctgaaggtgatcgatcagggaagcgatgacagcgttaatgcggtgaacataaagaaactggtgcagaaatgtaccggagtggaactcaccacggactcagaggaggcgacaatcatccagagccggcacagaattcccgagataccgatgcgaaatgatcaggttctcgttcttcaggtgccgacgccggaacctctgagaattgtagaaccgagggaatctgttacgaagcggatgcatgctgaagcggaatacagcggcatgtggctgtctcttttcgaggatctgaccaggtacgggcagatcagcatcagctccgaatatccgatgctggcggaagggcgttatgtgatgaatccgagtcctattccgcggtacgacaattttaaactgaatggcagcgataccctctatctcttcggcgcggggagggagaaaaagatctatgccataccgccgcatacagacgtggtctccatgtgttttgaagatgtgaaattcaagacggaagatttcagcggaaagcgctgccgtctgtgcggagcagccggtgtatttttggatgaattcatcgatgaagagagcggggaaacggtttatgagtgcaatgatacgggattctgcagaaagagaagggagacgggagagcatggaacaaccgatcttaagaattgatcatctcactgtgcgctatggaaaaacatgcggatactgccgcggcggaggaagattggagaaaaacacatgtccccgctgcaagactgtctgggcctgtaatgatgtaaatatacagctttatgagggagagatccttggtattgtaggagaatccggctcggggaaatcgaccctcatgaaaagtctttattttgattttgatgtgacagagggacagggatacctgagagatttcaggggaggaaaagaagatatcttttctcagagccttccgcagaaaaagtatattaaaaatcacattatgggcatggtgtatcagaatccggtcctcggactccgcatggattattccggcgccgggaatatcgcggagaaattaatcgccgcgggtcacagaaattacggaaaaatgaatgaacgcgtcgaagagctcctgaacgcggtggaaattttaccttcgagaaaaaaagagcctcctgcgaatttcagcggcggaatgcagcagagagtacagatctcaaaggctctggcaaataatccggcgattctccttttggacgaggttacgacggggcttgatctgtcagtacaggccagggtcttagaactcatacgtgaaatccggcgggagtttcatgtctccatcctgctggtatctcatgacctcgctgtgatacggatgctggcagaccgtaccgtcgtgatgctgaacggaaaaatcatcgaacagggcctgacagatcagattctggacgatccgcagcagccgtacacacagcgcctcgttcattcactgatttaaagagaaagggctgtttttatgaaaatattgataaaaaacggaaatatcgttctgcccgatcgcgtggtctctggaagttcagtcctgatacaggatgatcggatcgtcgggatagacgtgccggacgacgggagtgcggacacgatcacagacgcttcggggagatttgtgatgccgggtatgatcgatatacattccgacatgatagaaagttacattcagccgagaagtacggcgatcatggacttttccatgggatttatggaagccgagcgtgtgctggcaatgtgcggcattaccacgatgtttcattccatttccatgtacaaacccggcgcgtgggatgtaaaagagatccgaaaggcgcctcaggtgaaaaagctggcgtctctcgttcaacgctatcagaaagaactgcgtctgatacgtcaccggtatcatctgcgttacgaaatcgacaatctggactgttatgaagaaataaaacagatgataaaatccggtcttgtcgatctgatttcatttatggatcattcccccggacagggacaatacagaaatctggaaatctatcgaaagcatcttccggatgcgggaacaaatattacagatgaggaattcggtgagttgattcaccgcgagctcagtaaggactctctttcttttgaacagctgaaagcgctggctgacctggcgcgggaaaaaggaatttccgttgcgagtcatgatgacgattctttggaaaaactggaggtaaacgaaaaattcggcgtaaaaatcagcgagtttccggtcactctgcagatcgcccgcgaggcggcggaaaggggatttttaacagtgctgggcgcgccgaatatcttgctgagaggatctcattccggaaacctttcggctctcgatgctgttcgtgccgacgcggctagtgtactcgtatcggattattatccgcaggcgcttttgcaggcggtgtttcagctgtttcatgaaggggaactgcctctttggaaagctgttcgtctcgtcacagcgaatcccgcggaagcggcggggatagacggcgatgtcggaacgatcgaaatcggaaaaaaagcggatctgttgttcgttaatgacgaccccctttttcctgtcattgaaagagtctacgtagacggaaagtgtattctcgattgtacctacagaggcgggaaaggaatctgatatggaacctattttagaaattcagaatatatcaaaaaatttctttcttcacgagcagggaagaaagataaagagctgcaaagggatctctttttctctgaacaagggagagttcatcggtatcgtcggagaatcgggagcggggaaatccacggttctgcgctgtatttaccggacttatctggcatcggcgggaacggcggtttacgattccctgtctttcgggaaaatcgatctgatcaccgcttcggaaagagagataattcagcttcgcaaggcggagatcggctatgtatcgcagtttctgtccgcactgccgcggacggcagcgaaacagcatgtggtcagcggcgctctcgatgccggattttcgtacgaagaatcggtaaagaaagcggaagaaatgctccggtattttaagttgccggagaagctatgggacatctatcctaatacgttttccggaggtgaaaaattgagattaaatctggctcacgctatggtaaaagcaccccggctgctgcttctggatgaacccaccgcgtctctggacaataatacaaaaattctcgtgaaagagcttcttctgcggatgaaggcggagggtacgtcgatgatcggcatatttcatgatttagaatttatggacggcctgtgcgaccgtgtctacaatatatcggacggaagttttatatcgggagaaaaatagatgtattttgcggatttacatgtgcatacgacagtatcagactgcagtgaagacgtgtcggtaattctgaatatggcgaaagagaccgggatcacgcatattgcttttaccgatcacgatacgacaaagatggcgccggaacatatatccagggcagaagcgatgggaatcagcgcgatttccggcgtcgagatgtccgcgtgtgattatgacagtggcatcagggctcacatcttgggatatggctatgtcaccacctctcatatcgaaaaaatcggagctgaaacacttcggaaacgcaatgaaaactgtctcagacagatggagatattaaagcagctcggctataccattgaagaggaaaagatcagggaaatggcgtcgggctgtatttacaaacagcatatactggcctatttgctgaagacgggacaaacttacgccatattcggcgatgtgtatcagaaaatttttaaaaacggaggcccgtgtgattttgatatcgaatatccgcggcctgaggagtgcgtgcaggccatatgcagcgacggcggaaccgcggttttggctcatcccggacagcagaataattactatctcattccccgtcttgtggagtctgggctgaaaggaatcgagtacaatcatccttcccatgatgaggcgcagagaaaacaggtgcagcggcgggcggaagaattcggacttctgatgaccggcggaagtgattttcatggagcctatgaaaggatcaagagcaaattgggggcttatcccgcgcatgaatcaagtcgggcgttatttcagagaacacggccgtaaaatttattttacaaacaggcgggctgatttaacgaatatctaaactcgcctgaaatgcgatttgattttccaatggtattctttataacatagtgcaggtgttctcgcactccggccgggcgaatccgcaaaagcttcggttcggaataccgtgaaatgcaaatttttatagcgatgcaggaggttaagaaaatgaaaaaaatagcagttttagtactggttattgctttggcggcagtttcacttaccggatgtgtaaagaaagccgggagcggggaaagcggcggtgaaggcgccgcggaggaagatgtgttaaacgtatataccgcgctggaagatgaacagatcaccgaatatctgaaggagttcaaagaaaaatatccggacgtgactgtaaatatcacaagagattctaccggagtcatcacctcgaaactgctggcggaaaaagacaatccggtggccgatgtcgtctggggactctctgctacgagtcttctggttcttgcgcagaatgatatgctggaagcttatgcgccggaaggagttgaccggattcttccggagtttaaggatgatgcggatgttccggaatgggtaggaatcgacgcgtgggagaccgcgtttatcgtcaacaaagaggtcttgcaatccaaaggaattgatactgtaccgaaatcgtaccaggatttgttggatccgaagtacgaaggactcatcgctatgtcaaatccagcatcctccggaacgggtctgctgacggtcaacggtgtgctcgccctgtacggagaggatgagggatgggagtatctcgaccagctggacaaaaatgtcgccgtctatatacattccggttcacagccggcaaaatctacggctgcgggtgaatacggcatcggcgtatccttcggctacagatgtatcaagtcggccgaggaagtcggaagcgacatctgtgaggcagtcttcccggaagaaggctccggatgggatatggaggcaaacgcgctgatcaaaaaagacagtgtaaaggagacatccaaaaaattcctcgactgggctatttcagacaatattatgcagaaatatgcgcagaattatcctatcgtagccaccggaaccggcgacaacataccggcgggttattcttccaatccgttggatcagctgatggacaacatcgattttaacaaagctgctaaggagagagattctattctgaagaaatggtctgatcggtacgacggcaagagcgaagcggcggaagaatgaggagtaaactcagatgagcgttggtttaagggttgaaaatatcaaaaaagtatatgacaaaaatattgctctgaacggagtgagtctcgatatcagaccgggggagttcgtctgtctgctgggtccgtccggatgcggaaaatcttcacttctccggattatagcgggactcgacaggccggatgaaggcagtgtctatataaacgacagaaatgtgacgcggcttcctccgcaaagaagaaactttggaatcatgtttcagtcctacgcactgtttccgaatcttactgcctttgaaaatgtagcttacgggctgagaaataagaagataaagacgagagatgcggacgagcgcgtaaatcgtttgtttgaaatgattaaattgtcaaatgcaaaaaacaaactgccggcgcagatgtcgggcggagagcagcagagagtggctctcgcccgcgctctcgctaccgaaccggattttctcttattagatgagccgctttccgcactggatgcaaaggtacggctttctttaagaaaacagatctgtgcgattcaaagagagatggggctcacgacgatcatggttactcatgatcaggaggaggcgctgactatggcggatcggattgtcgtcatgaacaaggctgaggttatgcagtgcggaacgccggaggaggtttatcagacgccggaaaatccgtttgtggctgattttatcggatcgatcaattttatcagtaaaagaaaggatcatatttatcaggcagatgatgattccggcgtcttcgcaatacgtccggaaaaaattcatctgagaaagcagccggaggaaaattcggtgagaggcgtgatagaggatatcgaattcagaggatccttttaccgggtcagtgcagtcatcagacatgttgccaggagagataccagtatctgtgtggacgttccttttatgcaggcgaagaaaatgaagctgaccgcaggagagaccgtatatctgcagtggcctgaggaagagatgctttcctttcagactgtaaaaaagttcacaggttctgatcgggcggacgtgtgaaagttttgttccgatttaagacaaggaaaggtgcgcttatgaacaaaatcaaagaacggctgacaggatatacaggagaggatttcgtaaaaggtatcatgatatatgcggtggctgcgtttctcatatgttttatggtactgcctctcgggacgctgttttccaaagcctttcaggacagagaggggaattttgccggattttcccaatttgcagaatattttcagagcgagacaatggtttattctgtgggcaatacattttttgtagctattatgtccacattggtatcggtaacactggcgttttttttcgcctattcgctgagcagaaaaaatgttcctttcaaaagtttttttcgctatatagggatgattcccattttcgctccgacgatgctcctcggcatcgctctgatctatctcttcggaaacaaaggtatttttacagggatgggattttcgattcctctttacggaaaaacaggaatcatcatcgcagagagtatttactgttttcctgtggcgacgactcttctcatggtggctttctcctccgcggacaatcgtctttatgaggcggcggaaacgatgggaacgtctgcggtgagaaaaatgtttacaattacgattccaaatataaaatatggcctgatcagcgctgtatttgtttcgtttacatacagctttacggatttcggcgctccttcggtggtaggaggaaattataatgtcctggcgacagatgtatataaacaggtggtaggtcagcagaatttcaatatgggtgcagtggtgggaatcgtactgttgtttccggcggtgctgtcatttgcggtagaccgcattacgagcagaaaacagaattcatcgatcagttcgaaagcggtgccttatgtaatcagaccgcacagggcgtcagatatcgccgcgacgatattttgcatcgtcataacatccgcgatgctgttgttttttttcgtcgcatttttcgcttccgttatcagattgtggccgtacgatctcacttttactctgtccaactacgacttgacgaaagccgcgtccggagagggattccaggcgtttaaaaattccgtgctgatctccgtgatctccgcatttctcggaacagtcgtctcttttgtcggagcgtatatgattgagaccaaccgaaagtttcagaagatcagaaaggcgacctattttttgtctgtggctcctctcgctattccgggaaccgtcgtaggactgagttttatcatgtttttcaacgcgggtgagttttcgattccgtttttggacgggtatgtaatcactaatccgtttcatggaatctacgggacgatatggatcatcgtactcgcaaatatgatacatttttattctgttcctttcaccacggcgacaacggctttgaagaggctcgacagagagtttgaaacagtttcggaatctcttgcggttccgttttataaaacgcttcgaaaaataacgattcctctgtgtctgccggcgatctgggaaatgttcatctatttttttgtgaattccctggtcaccgtatccgctgtcgtattcctgtattctccgacagtaaaaatcgctgcggtggcgattgtcaatatggagggcgccggacaaactgcgccggcagtggctatgtgtatgctcctgctgttcatcaatctgcttgtgagactgggatatgaagcggtaaacagattattgctgaaaaagaggaaacgctgcttatcatagaaaaaaggcacgtctgatacttccaggcatgatttatgtgatcttatgtcgaaaattgtatttcgatttacaggtattttttgagcttttccgcgtaaaattagatgaaaagtaaatgcggcagcattttagttttcatgataatcgttgctgaaaaaattcacgtaatcggagatttcggaattttctttatggatccgcgtcggacagaccgggtttcagattgtaaacttaaagtaataagagatctaaaggaggtcacaatggtagaagtattgaaggtgtcaggaaagtctaatcccaattcagtggcaggagccctggcgggtgttctgagagaaaaaggcggagcggaaattcaggcgatcggagcgggcgctctgaatcaggcggtaaaggcggtagccatcgcaagaggttttgtggcgccgggaggaatcgatctggtctgcgttccggcttttacggatatatttatcgagggagaagaacgtaccgcgatcaaactgattatcgaaccgagataatcagacggtttctgcgggcggctaaaaagaaacaaaagcgaaggcgtcaaagctgcctccgctgaaaataagaattcgatagaaggtgcttcgaaacgaataggatcctctcaatggagttttcggctgcggccgtaatctcgcctgagaggatcgtatcactgcggagcattttctcgtttttgcagaaaagacgggaatgccgggcgtctgctacttttcggaattggttgccttttcttttaaaatatcccggatttccgtgagcattcgaacttcaggagagatttccggctctgcggcggctttttcttccgctttggattcgtccttttttctgcgcagtcgattgatcagtctgaccatgcagaagacgacgaatgcgatgatcaggaaattgactacctgctgtatgaaagctccgtaattgacggtaacagggtcggctcccgggatcattctgggcagtgtgatgctgaggtcggtgaaattgacgccgccgataaagtaaccgatgacagggttaaagatattgtccaccagtgaagttacgatagcggtaaaagcggagccgacgatgacgccgaccgccatgtccacgacgttgccccgggtaataaattccttaaattcggcagtaaagcctttttttccgtcttttttcattttttctcctcatgtttatgcgatagacagtaaaaatatcttatgtaaacgattgctgtattcagtataacaaaccgaagttctatatgtcaattcgaggtccgggacgaatgatttgtcccattggcgcatatgaatagaaggaagcgaatgcggcggaactggtacgaaagatagaggaattcagggaggtctgagaatgaatacatatgatatcagaaataaggaagtcatcaatatttacgacgggcggagtctcggttttgtggaagatgtagagctgaatctggaaaaaggcactatcgaggccatcatcataccggcagagcggggttttatggggcttttcccgcggggagaagatctggtcatccgctggagggatatcaagcggatcggcgacgacgtgattctggtggacttttccggtgtgcgggacggccagtatctctatgagagcggcgcgtcctccaaagaccggtttgaatagaggcgcagcgtttacaaggcgacggtagcgcgaaaacggactgacggcgggattgtctcgtagctgatctgcctgcagttttgtgtcgatatctgatatatgcgttttttcggcagaaaaaattttttccgacgaactttttgcagccgcttgaaagggcattactatatatagtataatttatccgaaattctcggaattatactactatttacaggaggaatgaggatgaagtgtcctttttgcgataatgcggatacgagagtaatcgactcccgtcccacggacgaaggtcaggtgatcaggagaagaagggcgtgcgacagctgtaagaaacgctttaccacatatgaaaaagtcgaagaaatcatgtttatggtcgttaaaaaagacggaagccgagagctttttaaccgttccaaagtgagaaacggtatcgtaaacgcgtgtaaaaaacggccgattactacggagcagatcaaaaagatcgtggacgatatcgaacgggggctgaataatatgatggagaaagaaatctccagcacggtcatcggcgaagtcattttggacaatctcaaagagctggatgaggtggcttatgtcagatttgcctcggtctaccggcagtttgaagacgtggatacttttatgaaagagatcgagaaactgaaccgtaaaaagaattgagatgcggtaattcgaaaggattgtctgcggcgggcagaggtttgttaagcggcggaagagctgcggggaagggagaaaacgcatggcagaggagattttcagaagcgagagaacgggggatggcgcggaatttctgcagattcatccgctggacagccggtatccggtaaaaactttctttacggcgcggtcgggaggctgcagcaccggaaattttttctctttaaacatgggattttcgaccggagacgaccgcgcggatgtggcggagaacagacgccggatatttgattttatcgggaaaccgggctattgtgaagcggtgccgcatcaagtgcacagagcggaaatcgcctgtatacgcgccgatgaaggagggctgcgttcttcaggcggcggagatcccgacggtatcgtacaggaagaatcacagacgggggaaaagcgggcctgtaaattatcttttcccgataccgacgctctgatcaccgacgcagaaaatgtgattctcaccagcctgcatgcggactgtattccggtgtggctgtatgatcccgaacgtcatgcggcagggctcgttcatgccggctggcgggggacgagagcggatatcgcggcgaaaaccgcccggaagatgtgcgctgaattcggcagcgctttggaagatctgctcgcctttatcggaccgggtatctcgcgctgctgctttgaagtaggagccgaggtcgccgaggaattcgcggcgatgctggggacggaggtattttacggggaaaacggcagatacagtatcgatgataaaaacggaaagtttcatctcgatttgaaaaaaatcaatgagaggctcttacagcgtgcgggacttacgaagatcgcggctacgaactactgtacctgctgcagcgaagatctgttctactcttatcgcagagaccgcggcgttacaggcaggatgtgcgccggcatcatgctgctttaaaaagagccggaggttcttgccgcagagtgcggatagaatctattgcttcggatgaggaggagagaatccgttcgcttcggcgccggaagaaatgtctcgtaaagatgacccggagacagtcaaagataaagaaaaatcggcagcgctcccgccggtatggggcaagcgcctgcatcatcgcagtcagcgatgtcacactccgtaaagttgcggaccttgaatgaaaacaggaagggaagagatcagaatgatggaaaacttaagcatagcaatcgacggcaccagcggttcgggcaagagtacggcggcgaaaaatgtggcgaaagctctcggcatcgagtatatcgatacgggagccatgtaccgggcggcggcctataaagctctttcctgcggcgtaccggtcagcgacgacgaggctgtgggtgagatgctgagcggtacagagattgattttgtccagggaaatattattctggacggagaaaatgtcaacgataaaatccggacactggagatatcgaaggcggcttcacaggtttcgaaactggtcagctgcagaaacaagctggtggagattcagcgcagaatcgctgcggcaaagagcgtcgtcatggacggcagagatatcggtacaaacgttcttcccggcgcctcccataagttttatgtgactgcttcgctggagacgagagcgaggcgccgtctccgggaacttcagagtaaaggcgaagataccacctatgaaaaggttttcgccgatctcaaagcccgtgatcacaacgacatgacgagggcgctgaaccccctcgttcaggcggaagacgcggtctttatcagtactgacgaatacggtatcgaagagacgacgagaaagatcctttcctatatcagatcctgacggcttctgagaatccagaggctcaaaggagtaaaaaacatgttgcgtccgcagttccattttctgccatacagcatcaatgtcaggcgttttctccgcagtatgaaggcagacccgaacgatagaagaaagaactgatcgaagagggaaataaagagatttggcggcgatctgaaatcaaaaaaggaaagggcagcagatttatctgctgccctttccttttttgatcatttttccgatatccatattcgcatccggcgtctgagagatgtttccgacagtgaaatttcagcaggagaacgattattcaggcggaatttcggaaaatttttctacgcaaagccgtttaaaatttatgaacgaaaagtccgcttccgagttttggctcaaaccacgtggatttcggcggcatgaccagaccggcgtcggcgatgttcatgatttcttccatgctgacagggtacatcgcgaaagctgccgccatttctccgctgtccacacgccttttcagttctgccgcgcctttgatacctcctacgaagctgatgcggcggtcggttctcggatctgtgatgccgagaaccggcgagagaatcttttcctgaagaaaagagacatccagcgcgcttactggatcgccggcattttcgccgctgacggacgcgccgcattcttttttaaaggagaggagataccattttccatctgaatacatcgagcaggtatgtttttcctgaggcagtgtttcccgtacgccgcagtctgtgaccgtgcagattccggcgattctgtccaggaattctctgtgactgagaccgttgagattgctgatcagacggttgtaactgtaaatcttcagctgatccgccgggaaagctacagccatgaagcggttgaattcttcggacccatcgcagtcgggcgcggccttccgcctcttttctccgactttcacagcagatgcggtgcggtgatgaccgtcggcaatgtagagttcgggaagtctgcagaagagtgaattcagctgtctgcagtcatcatcgctgtagacgggccacaggcggtggcgcactttttggccgtcggtcacgtcgtattcgggttcctcggactttatcactttatttatgatctctgaaatcgccggatcgctgcggaagaaatagaataccggctcggtgttcgcgctgcaggcttcgaagtgacgaatacggtccagctctttttccgtgcgggtgacttcgtgtctttttatgattccgttttcgtaatcgtcgatagaggagcagcctgcgattcccgtctgtgaacgcccgttcatcgtctggctgtaaatataatacagcggtctttcgtcggcaaagtaagtgccttctttttccagttttttcagattagccgctccccggcggtataccgcttcgctgtatgggtcttctcccggaaggtcggcttccgcacggataacgtgcataaaactgaacggacttttcgcagcgatctcttccgcttcccggcgcgtcaccacatcgtaaggagggcagagggccagctgtgccagatcggcccgcggccggagggcgcggaatggtttaaagcatgtcattattttttatacctctcttgtcttttctgacgttttcgagaaaattatcggtaaaatcaataaatattatggcatagataccggcttttgtgtagaaaatattttacatgaaggatgtaaagattgtgaaaaaaagactctgtctgatgcttttgtttttcgcggcggcgctgacggcactcagcattaggatcggttttctgcagctgtacgatgacgagccgctggcggtcatggcggaaggacagtatctgaccgaactgggcgaggtgacgcagcgggcaggcatttacgaccgggagggcagagaaattaccggcgggaagatttatgcgtattattacatcagcgaggatgtcggagacgaaaccgaaaatgaggacggaatgtcggaccgggacggtgaggtgtctgtatcaaaagaaaaggacggcgtctctgaggaagcggcggagcgcaaagcgggcggagagaaggagagcgattctgatctcggtcagagtttgaaaacagcgggggagcagaagaatgacgacttaccggaaggcagggcagacctgctgaaacagctgggctgtgaactggtgcgcccgtatgaaaacggttactgtgtgtggaagggggaatacagccggagaaatcaggcaaggatcgaggcagaatacggcgctctgacggtacggaagcaagaacggtacgcggacagtcagccggcggttcatctgctgggttacactgcgggtaccggtgacaacggcgaggaggaaggacagtgcggcctggagaagatgtatgatcagcggctttccaaaggagctgtgagaaaatatctgtcgcgggacgcagcgggaaatattctcagaggaagcggaattctctctgacagcgagatcagcggcaggtttcagatatctatcgatctgaaactgcaggaaaaagcggaggagctccttgcggaaaacggcaggccgggagcggtggtggtcagcagcgccgagacaggagaaatcctggccagcgcgtcttatcctgtctataatccgaacgatgtgggaggacatcttaccagcgaaaaaaacgaactgatcgacagggtttcggcggggacgtatcctcccggttctgtgtttaaactcgtcgtcgccgcggcggcgctggaggcgggaatcgcggatgaagacagcgtttttgagtgcagcggcagtatcgagaccggcggaattaccgtacgctgttccaccggcggtgaaggcggacacggcagaatcactctgcgtcaggctctggcggattcctgcaactgcgcttttattcagctggggatggaaaccggcgggcagcggattatcgaaatggcggagtctatggggctgggcgctgacgtctgtcctcagctcagtgaaagcaccggtcatctgcctgcggatgccgaagagtgcggtatcgcgaatctgtccatcgggcagggcacaattctggcgacgcctcttcagatcacatcagtgatgaactgcgtcgcttccggcggtatccgtctgccgctgaagattctgatgcctgagacagagcaggatctgataaagtatgatgtctgtcctgacatcctccgggagagcgcggagcagaattctgagggcatcagagtcctgtcggagaggactgccgcctctcttctctccatgatgagggataccacagagtcgggtaccgcgcagaaaatttccgaatataccgaggaacttccgggaggcaagacgggttctgctcagagttccatgtcgggccagaccgtagttcacggttggttcagcggcttttttcctcagacggatcctgaatatgtgatcactgtatttctggaaaacggaggcggaggcggagcctgccttccggtagcgggcggactgatccgctttctgagcggagaagcggaaatcggggctgattgattccctgcggctttgcagcggagggagcgaacagacagcgaaagagcagattgcacagggccgttgtatagatatggcggaaacagaaaatgaaaaggcggggctctcaggagctccgccttttcattttcagatttaaatgctgcaaaattttaattgagaaggaaaataatcatgaaaaacatcgattattcttagttagaaatagatcgtaatatccagatgttagaatataaaataaactaaatctaacttaattaaataataactgatgttataaaatatgtcaagtaaaaacaaataaaaacatctattttatatatcataccgataaaactcgtgtctgccgccggcggaatttgtttgaatttggcggcaaaggcatacgaaagcccggagcagagtccgtttttatattttgccgggatcatccgcaggctgccgtcaggggcgcatactggagctttgttccgacaaagttaagataaaaaatcacgggaaatatttctcctttcgctttttttgaaataatggtagtatataaattgaattcgtttacagtaaactacggttatttatggggaaaaggaaaacatatgagaaaaaagaaaattttgaaattcatgtcggctgtgctcgtgggagtgatgcttctgtcgctggcgggctgtggagatgagaaggacagcgattcctcagtggaggacatcgattacagtgtgggactcaatgctgacggaactctgaaagatatcgatccggcggattatgtggaacttgcggattataaagcgatagaaattccgcaggcggatgtcgcagtcacagatgaagcgcttcagtcgcagatcgacagcattttgtcagaatatcccgatacggttcaggtgaaggaccgcgaggtgaaggacggtgattccgtaaatatcgattacgtaggcagcattgacggagaggaattcgacggcggaaatacaaacggagagggaactaccgtgaccatcggccagaccgagtacatcgacgacttcctcgaacagctcatcggccacaagccgggcgagactttcgacgtcaatgtgacattccctgaagattacggtcaggaagcattaaacggcaaggatgcggtatttaagaccacgatcaattatatcgctgagagcaagacgcctgaactgacggatgcgttcgtcaccgaaaaactgaaagacacctatggatatacatccgtggcagatatgaaagcgaagttgacagaagatatgaaatccgcgaacacggaaaattatctttacgattatctgatggaaaattccgagtttaaagaactgccgaaggatgcggttgaagaacagatcgatctcagagtgcaggcgaccaaacttcagatgcagtattccggcgtttccatcga

SEQ ID NO: 3581 - DNA, 15850 bp, Unknown
  16S sequences of unknown bacteria
tgtgattcccgtcgcgcccgttgcgcctgtggcgcccgtgatgcttgcacctgtcgcgcccgtaggccctgtcgggcccgtggggcctgtgattcccgttgcgcccgtcgctcccgtcgcgcctgtcgctcccgtgatgctcgcacctgtcgcgcccgtaggccctgtcgggcaggtaccgtatgggaattattttttgttatccggacatgaattaaatttataataaatatggatctcgcgaggggcgttatccgtcggggattctccgatcgtgataaattcgataagttgtaaacacatttcgcgggtgagatcttcacagttgctgaaacgcctgcattccgccagatacctcatggcgtccgcgtcgtcctcgttcttttcggcaaggcgttgttcaatctcggcgagagcggcctctgtcgcaactttttcagtctgatatttttcacagagatttttgcacacgttttcgggaagatcgccgagcactttttcttcaaacgcggactgtatcaaccgatccaattccgcaagcctgtttttgaacgcccgccgctgtttttcgtctgcgtttctgttctgagcgccgtgctttgccatatactgcaaaaagcagcgtttttctttttcctcatcgaatttacgatcgccgaggagagatcggatatcctgtaaaacaaggctttcgatctgcttttcggggatggaatgagaagtacaatactttttcccgagatcggtataagtacggcattcgtacgtattgcaaggttttttacgtgaacgggcagaggtcttgcgtttcaattttttcccgcagtcggcgcagacgagtaagcctgacaggggatgtacggcattttgtttgtcggtcctgccgcgggaaaccgaacggttgatttcctgtactttttcccacacgtcgagagaaacgatgggaacgtgcgcgttttttcggacgacgtgttcgttttcggggacgttcgccgccttgtgatttttatatgaaacgcgcgccgtgcggtgctgtgtcagcgtgccgatgtatgtcgtatccttgagaatttccgttaccgttttgggcgaccagtacggagaggcgcgccgctcagactttttcccgtccaatctcgtataatacgccgtgggatttgggatcccttcatcggtcagcgcctttgcgatggtgcgtgccgaatagccctgcaagcgcatgtcgaagatgcgccgaacgacttttgcagcaggctcgtcgatccttgccgtgcgcttgtcgtccgtgtccgccttataaccgtacgggtatgcccagttagtatactttcccgcgcgccagtttgcgtcaagcaccgcgcgtatctttttggaagtgtttgccgcgtgccattcgttgaacacgttcataatgggcatcatatccatgcctgcgctgccgcggtcggcggtatctacattgtcgctcagggcaataaagcggatgccgtacgcggggaaaatatagtcgatatactgcccgacctgtatgtaatttcttccgaaccgcgaaagatctttgacgacgatcgtatccagattgccgtttttcgcgtcgtttaaaagcctctgtatgcccggacgctcaaaatcggtccctgaccagccgtcgtccacgtattcacccgcgatcgtgccgccgttttccaaaacatatttttgcaggatggcgcgctgattttcgatggacatcgactcgccgcatttctcgtcgtcgcgcgagaggcgcagataaagccctgttcgatgcaaattttgcattttgaaacccgtatctcttgcccgtatacgcggcaagagacgtatttttttatagtaccatatatatggactgttgcgggctttgtgtgacggtaactttttacggtcgggagaacctcgttcggaatatgtgagaaattttaaatttttgtaaatttttaaaaaaagtattgacaaatcaagttttttggtataaaatgcccccaggggcaaaaacaagagaaggttatcgggccatggaaaaaacgataggaaggaagttgatagcagaaagggcgggcgtgtctatgcggaccgtcacgcgcgtattgcaaggcgataaacttgtggcggagcagacgcgtttgcgcgttctggaagtggtggatgaacttggctatacgaggaataagatcgcaggaaatctcagccgcaacaagaacagtaattttgtcgtcgtgctcgtgccggatatgtcgaattactattatttggaaattttcgattatctgaccaaatttttcgaaaagtacgattacatcgtgtcgatatgccgcataaacgagaataatttgttcaagactttcgacactatgctggaaaacagagtctcggtcatcatcaatctgggttttttcccgatcaacgaagaatatttgaaaaaaataaattccgctaagatcaaaattatccatcccggcgtaggtacagaccccgttcccatcaatatcgattattcggcggcgatggaggaggcgttttgttcctttctcggccgcggcctgaaaaagtttaaattcgtttgcggcggcggaaaaaattttttggaagacggaaggattcgctgttttttgcaattgctcgagaaatacgggctggaaaaaaatgaaaacagtattatctggggagattatcccgccagcaatgcgatggaaactggagaaactgccgtaaaaaaaatttatcagacggaagagcccgacgtgattttctttttgacggacgccatggcattcggcggaatgcagtttctcacaaagataggaaaaaagatcggggaagatatttcggtcatcggttttgataatacgctgatgagcaaattttgcgtgccgccgctgagtaccattgattcttctaccgaaatcgagatccaaagatatatcacttacatattggataaaaatttaaataacgataccatcgtatcgaaattcataaaacgggcgagttcggtttaagatcaaaatcacccataaatcgaaaagcgtacgcttttgttttttgtaaacaaaaaacaaaaaacaaaacgttttagatggcaaggaaacgaaggaacggaaatgaagacaaaaaaattatttatagcgggattgattgtttcggcaatcttattcatagcggcctgcgcgatggtcgcggtttctgcggtcgtatcgaaacaggaaatggatctggggatcgaccttagcggttacaatgtaacgaagatgcataccgacaatgaaaccatccgcgttttcggcacgcaggacggcgaggttttcgcctccgatctcgaaggggagatgttgtgggatgccggtgcgttttacacgagtcccgtttacgaactggcggtggagggcggcgacgtattcgtcgtctatgccaacggcaatgtggtgcgcttttctctggaatacgccgcgtccatagaggaaggggagagtttttccgaagcgagcgtgtactccatagggacgtctttcaatacgaacggaaacgtgaaaaacacgcaactcatcgtcgtacccgaagaggagaccttttatctgagaggggtattcaacgacatttcgcagatcaacaggatctatcgttttgaatacggaacggaaacgccgcagcgtctggtcggtacttccaacagcgtcggcggcatggcttattcggagggtacgctgtattatgcaatgcgcagcacggtgtacgcggtttcggcggagggaggcgtaacatctctgcaaaacgtcaacgaaacgatcgtcgcgctctcttgtttcgaaaacgctctttcgctcgtcacggcgcagaacaatcttttcattcttcccgaatacggcgcgggcacgccgcaaaactatgcgctttccgtatcgctcaattcggaatacgtcttttcgacgggcgaaaatttcacggcgaagatcaacaacggcggcgttgcgatgatcgattcgtcctcgcattcggtcacgctctccatgcgggcgtccgattcgctgaatttgatcatgtggacggacgaaagttttgttctgtacaacgcagccgatctgaacaatcccacgatcacttattattcgagcgatcttgccagatccaaggaagtcttttcaaccttgctctacgtatttattgccgtggctttggcggcgctggcggcgggagcgtatttcgggttcggcatcaatcccgacagccgcaaaaaaatgcacgggaaggtgaagggtttcttcacggaaatggtgcggcataaattcatttacctgtcgttggtgatcccctttattttgctgatcgtcttttactacattccgatcgttttggggctggggctttccttcttcgaatacataccgggcgttcgcctcgtgtttgcgggttgggataacttcgtatccgtcgtactgaacacgcagttttggaacgcctctgcgaccatgctcatatttctcatcgcggacctgctgaaagcggtcattcctccgctgttcgtggcagaggcgatcattgcggtaaaattcaagcggttttccctcgtcgtgcggattttgctgtttttgcccggcattttgccgggcgtcgccacgacgctcgtttggagcgacggtattttcggctcgacgagcaacagcctgatcaacgcgttcgtagggttgttcgtgccgggctttgcaaagaactggatctacagcgcctcgaacgcaacggcgatcgggtcgttgatcgccttcggtttcccgtgggtggggtcatacctcatcttttacggcgcggtttccggcatcgacaaatccttgttcgaagccgcaaaactggacggctgcggatggtggcgcaggatggcgtcgctggatgtgcccctgatttttccgcagatcaaatacatcgtgatcacggcgtttatcgcgtcggtgcaaaattatacgtcgatctacgttctatacggcgtcaacggtcagatcaagacgactgcgctgctcgtgtaccgagagatcatcaatgctaattacggggttgcgagcgtaatgggtttgtttatttttgcattcctgagcgtttgtacggcactgaacttcaagatccaaatgaaacaaggggaggaagcataaacatggtttcaaattctgaaaatacggctttacgtcccgcgaacggcgaaaaaataaaaaagggctttcgccgcggtatcgaggggcccgttgcccagacgatcctgctcgtcatcattctcatcatattgcttttgacgcttttgcccgtgctgatcacgatgatcatgtccgtaaagagttcgcaggatatcatggcgtatccgatctggacgcttccgcagacgggctggtatttctccaattacagagaggcgttttcagtactttcctctcctatgctcaatacgattttgatcgatctgatctccactttcgtcacgctgctattgagttgctttatcgcttttctgtttgagcgttacgatttcggcggcaaaaagacactgttcttctttatttttgccccgatgatggtaccgagcgtgatcctgctctcgcccacatatatcgtggcggtgcagtggctgaatctggggaacaactggttcggactgatccttccttacatcgcgggcaaccagatcgcgagcatattccttctccgcgtattcatgcggcagcagccggcttccctttacgaagcagcccaactcgacggcgcaggagcgccgcagttgttcttctatctgtgcctgccgctttcggtgcccatcatgatgatccagggcatatccatctttgcggcaatgtacaacgactatctgtggccgttgttgctgtaccagaacgatctgtcttcgggcgtcctcatgccgtatctgcggtcgatcgtgaacaactacgcgcaaggcgtgcagtatgccatgtatctggtggcgggcatcccccttatcatcaccaccatcatcagtatcaaattttttgtcagcggcgatttcgccagcgggatgaaattataaaaattattcagacaggaggttttccatgaaaaagttttccaaacttctggtggcggccgtgttggctctttccctcggattgacggcagcaggctgcggcggcaacggaaatacgggcggagacaaccccggcggtgacaatcccggcggtgacaatcccggcggtgacaatcccggcggcaatacaggcgtgaccgcgacgctcgatttttatacttccgtaaatatcatcgaacagtccgccttgcagcaggtcgcaaacgcgtattcggatatgcagtacgagaaggggaacgatatcaccattatgatccgcaacaacaccgaccccgctgcgtatatgcagacgctgcgaacgctcgtatccaacggcgtcaaaaatcctacgatcgccaacacgtccgtcgtcgacgagtactacggcaccgacaagatcctcgacctttcgggatatctggaggagccgaatccctacatagaaggcaatgctgcctggatggacgcgctcgaagaggacgcgtacagggcgcgccagacgggcgcttccacgacgatccccggattgagttattccagcaactacacggcggtgtattataacaaggcggcggtgctcgacgtgctgggcgacgatcctctcgttgccgaggacggtaccatcgacaattcgaagatcacgtgggaatggctgctgaacgcgttggaaacggcgcagaacgcggacgcgaatttcgactatccgctcggcttatcgacgagcgaacagtctttcggctcggatagtttccatatcggcgcttcggtcatcgaggcgtatctcgaccagtatttccgcgatttcctggacgtggtgcattcgaaagaaggcgattacagttacatttcgagcatcgattcggtatggaaatacgacggatcggacggctcgatcgaccttccgaactcctatacctacaatataaaccgcgttgtggatacctatttcaatcagaccggctacaacccgctttccgagcgctatgaagagttgatggaaaatctgtatacgcttttctcttacagcgaccccgaggcctcgtacaacgacgtattcaatcgtttcaacgaaacggtcatcacgtacgagggaaagggcggttcgtacagcgatatgaaactcttttacattgaagatcttacgtatatccgtacgtacagggatgccttcaagacaagcggcgcaggcggggctacggtataccccacggcggagcagatcgcttcggagatcggatggtttatcctgcctgcgatctcctctgacctggaaggcgtagccgacaatctgcgtcccgaaggcggtccgaacgaaaacttcggcgttctgagcacgggcgttcagtctaccgatgagatcgcggtcgatttcctccgttatctcatctctccgaccggtcaggcggcgatctacgccagttacgaatcctctaactacgcgcccatcaatatgcgccagttggtcaagaacgtaacgatccccgagagcatcgactatacggatctgatcagtgcggtgggcgactgttcgaacaacccgtaccgtttcttcggcaaaggctcgggcatggataccatcaccgcgggcagcagcggcgaatatgttaccgatcagatagcggcggtgctttccggctttttccgcggcggcaatgcagactggacggcgcaggcaacatcttatttcaatatcatcaaatccggcttcgccaattatgcggaagaaaataattttatctacaacgattatacgaaggttgcggagcagaccaacaacctcgtcaattcgccttattcttcggtaagttgaggtaacgggccgtgaaaaaaatagtggctttgatcttgggactgacgtttctctttgcctttgccgcctgcggcggcggaggcaaacagtccggaactctgacggggacgctgcgcgattcggatgattattccaccggattcatgcgtacgtcggcgacagacgattacgaccgcagtttcggcgaagtgaccgattataacggaaacgtcgtaggtatcttttactttttatggctgagccaggcatcggtcaccaccaatgtcgattcgtacatagaggacggaaacgtcgaagcggtgctgacgggagacgaggtcggcatggcgcccgctttcacctattggggcgaaccgatgtacgggttctatcaggtcgaggatgagtgggtcgtgcgcaaacacgtggaattgttcatcaacgcggggctggacttcatctgtttcgattgtacgaacaacgatttttatcaggcagcggcaaaggccgtgctcgacgttcttctcgaatatgccgagatgggctacgacgtgccgcgcgccatgtttatgacgaacagcgattccacgctgatgaccgaaaatatctataatgcgttttaccgccgcgatacgtacgatgcggtgtggttttacgggaacggcgataagccgtggatcatctcctcctatgcaggctccaatgcgaacattctcgaccgcttttatttcaagcccgcacagtggcccaaccgttcctacaacgaaaacggattcccttggatctcctggcattatccgcaggaaacgtatacggatcgggaaaacgattacacgatcatgagcgtatccgtatcgcagcatacggggatcggcggctctttgagcgacgcaggcgtttcgggcatcaatttttcaatttccggcctgttcgccccttataactacgatacgctttccgacagtctgaaagcgcgggtttcttcagaaacggcaacgaagtactacaattataattggggaagaggttattcacacgaaaccggctcgaacgattacgattccgctctcgcgaacgtcaatttcgaagagcagtgggacagcgcgttgcaaaacgaggacgtcaacctcgtattcgtgacgggctggaacgaatggatcgcgcaaaaacagagcaaggatccgcttttggggagttcttacggttattttgtggacacgttcagcacggagttttcccgcgatatcgaaatgatgaacggcggttatctggataactgttatctgcaactggtcgcgaatattcgcgaatacaagggtgtcggttacggcacgcaggtcactcgcaacgcgacggtcgcaaagggaacggatcttttcgacctgtcgaattggtctgccgctcctgtctataaagatctggtcggcgaaaccgaaccccgcgcggcgctcggcgcgggcggcaattattataccaacgatacgggccgcaacgacattcaggaggtgcgcgtagcctccgacgaggagtatgtgtatttcctcgtcgcggcggcggaagatatcacggccaaggaagccgcagacacccgttggatgaacgtatttatcggcatcgagggggcggaaggcggctggaacgggctgcaatacgtggtgaaccgctcgctcgacgggaccacggccagcctggataagatcgaaaacggcgcgtatgcgtccgtcggtacggctgcgaccgttgtttcgggcagatatatgctcgtgcaggtcgcaaagagatctctcggcatcgaaggcgatgaattcgggatcgtatttaaggtgacggataatctgcaaaaggatttcgacgttaccgacctttatacgaacggcgacgccgctcccatcggcaggatcaattacagttattataacggataaggaggtacagatgagtaaattattaaagagaattttcgcgcttgtttttgtcgccgttttcggctgctgcttattgatcggctgttcgacgacaaacgagccgggcggtgaaacgggaggggacgaccccggcggcaataccggcgggacggacgaagacccgcccggcgtctattcctacggcgaaaactgggcggatacttacgacgccgcgtatacgcaatctctgctcgatatgggggaacaggggttcaccctttcgcagatcgggggcacggacggcgcaggcaggagtttttccgcacacgggaccaaaaaggaatcctcgaggtatgtaggcgtattttatttcctttggctgaccgatttcggcgggatctacgacatttcgaagatccaggaagagaacgccgcgctggctacggataccatccgcaacccgctgtgggcgctccccggttcggaatactacgacgcatccgtttctcctctgtatgcgttccattattttgaggagccgctgtacggatattatcagagcgacgatccgtgggtcatacggcgtcatcttgaattgttggcgatggcggatatagactttttgtatctcgacttcaccaatgcgggattgagcggcggcagcgtagtgaatatctatcagaaacagacgtacgccttgctggatgcgatcctggaattgcagtcgaaggggtacgacgtgccgcaaatcgtgccgatggtgtgcaatccctctacgggcggcggtacgcagagcatcacgaagatcgtcgagtgggtatatgaaaattattacgcccacgacgatttcaaatacaaaagttgttggttcaccgccgacaaaacgcgcaacccgagcggcaagcccttgctcgtgtgctacgatttcgacgaaaaatatcttacgaacagcgccgcggccgatgcgttctggatgcggaaagtggtttggcccacttcggtttcgcagagcgactttgaaaacggcttcccctggatggattattctctgccgcaaaacaattacggcgggatcatgaacgtttccgttgcgcagcatttgacaggcagttggtcttcggaagcgtatctcgcgcgttcgcgcatgaacgcttcgtatcagtaccgcggcaggagcgcgacttcttcgcagaaatatgcatacgaaacggacagcgtcgagcaggctgtttacggtcagaatttcgcggacgaatggtataacgtcctccattacgagggcgacgacgaagtatggatggtcaccgtgacgggctggaacgagtgggtcgcgcagaaatacaaccacaacggcgcaaattcttatgcgaattttgtggataccttcaacatcgctttttcccgcgatatcgaaatgatgcgcgacggcggctattccgataacttctttatgcaacttgcgcagaacgtccgcgatttcaaatacgcggcgacgggaaaaaattcgtctgcagccatgtggatgcgccagagcgtcgattgggcaaatgtgagcgcctgggacaacgtttcggcaaaatacatcgatattaccgccgatgcgcaggcccgcaactattcgagcgtggcaaacgtgtatacctataccgacgattcggcgcgcaacgatatatcgtaccttaaaatcgcgaacgacagcgaatacctctatgtgctcgtcgctgcggaagacaagatcagcgaatataccgcgggggacgattgctggatgaatctttacctttcgacgggcaaggccggcggttgggaaaattacaatttcgtgatcaaccgcagtccgtccggcaataaaacctcgatcgaggcgctttctgtgggggctgacggcaaaatcgttgcgactgcgctctccgcacaggcggattatgcggtcaacgggcagtatatttcctaccgtatcccgctcgaagcgttgggcgttaccagtgcggacgaaattcagatcaaggcgtgcgacaacattttcggcgtaaaagcgaccgatgaaaacgacggggtgggcgtgtattcgttcggcgatgcaatggcgttctattgcggcggcgacagcgcacccatcggcagactgaattacgtttaccgtatggcatattaaggttttcatttttgcggcggggcggaacaaggggaaacccatacgccgctccgcgcttaaatactaaatttataggaggaattatggctaatttactggcaaagtccaaaaagtacatattgtgttttttggcggctgttgcgttgatcttcggcgttacgggagccgcaatgctttccgacggaagatccgtttccgctgcggaaacagggcattggatgtcgcataacggctcggggaatactattcagaacggattgacgaagtataccgcggcggcgatcctcgcaaacgaccagaatattttggaaatggagaataataccgtatatttccagatgatggtcgacacgggcagtgcatggtccgcattttcgtttttgaacggcttagagtcggatgtcaacgactggaaggacgtggtgtggacagggttaaatgcgggcgtcgatacgaaaccgcatatcattttccagaacggtgccggtcaggcgtacggaaacggaatttctcccgtctatggggtacgaaatgtgccttccttctcggatcgtctgatcagcgttgaattgcatatcggcacaggggaaggggacgacgtgtcctatatgaaactgaacgggaatatgctcttacacgaaacgagcgacgtttccgcaataaactatatcaccgaggcggatttccccaacggttgctatttaggcatccatatcaacttagcgggagatagcaaccagatcatttatctgggcgaatacaatacgccttacgtaacttcgcagagtgatgaactgaacgataagattctgcaatacgatccggattctatttcggataacctcacggtatcggtggcgaatcttgaagatgtttccgccgctacggtggaaatcaacggggcggctgtcgataaacagcactacacgctgacgtctgattccgattccacggcaaaactcacgatcaaaaagtctttctggacgaacgccgcttcttttgccgccgaaaattatctgacgatcacttcgaccaacggcagcgcgtttgtcgttttggacgttaccacgggcgttgcgcccacatgggtcggcgataattacgtcgtcattgacgaaattgccgatacgtctttcacgtttaacagcgtatataatacctatacggcagaatcggtcaccattcgcagcggtatttacagcggcagcacgctctccgatctgaccgcaggggaagattacacgctgagcgcgccggagaagcaggacgatgatacatatgattacacgcttaccatccgggatacgtacctggaagaggcgctgaaaacttattacggaagatatttccacatttctttcggcaccaatgcacttacagcctctctctattatcagcaggataccgaggggtgggtggcccgttccgtcgatctcgcttccggtacggcgctgacggcagatgattactatacgaccggcaccttcaacaagatgagcaccgtgtctctggcatcccgtatctattacaaccgggggcttgacgtcaccaaaccgatcgtgatcgaatttgcaagcatccccagttcgacgacctgggcaatgctgaacgtcacggacagtttggaaaccatggattacttctcggataatacgagagaatcttctcagttgcaggcgctgtttttcggcgaaggcagatcggatatccagaaattttccgggttcaccatcggatccggtgaatcgacgaatgcaagttatccgaaatcggaaatgaagggcatcgtcgtggagatttatttcggcaaaacggctgaagaaagttatttccgcatcaacgggcagaattgcggcagcccgtctgccgtacagagcgatttttcggacggcgttgcatacgtcggctggttcttcaacgacaccaagggcggttttaacttcaaagtgaacagcaacgtcaacgcggtagcggtcactgcgcccgtcgatgacaaagcgtatgcgatggatctcgccaaagcggccgatttcgagatttcgctcatcaacgtgaatgcagagggcgatatcaccgtcaaagacgccgcaggcaataccttggtcaaggataccgattacacatacagcaacgggaaactcgtcatcaaggcttcctatttcggcaggatcgactttacaaaaagcagcgttatttccgtttgggataacgtgaacaaaacgggaacgcaattctcgatggcttattcgtcttccaatatgaaggatacgtctgttgcgttcgtcacggtaggcgctttgacggatgccgtgtttacgctggacggcgtcagcgaagtttccatggtcctggataaggacagcaacgagatcgatgcatcgctgtatacctttaaagacggcacgctgactattaaaaaagacgtgttgacggacaaagcgggtgttacggagttcatggtcgtgagcggttctgccctgtatccctgctatgtgtatgcggatgcgtttgaaaacggcggcgtgaagacggaaggggacggctccgtatccaacaaggacggcacttttacgtttgagggcgatgccgtgtatacgatcatgcagtcggttgattttgcggctggggcggcattcctcgtagatttcacctccattcccggttattacaacaacggaaacggaaagacggcgggctacgtcacgttcgaattctatgatccgtacagcggcaataccttgtattacacgctttattgcaactatgcggacgatgccattacggataactatacggctctttacgaatcgtattacatggtcaatgaagaaggcggctacgtcattatgccgacgagcagaacgatcaatatcagtaactgcgaaaatccttccgctctcggaaagcatgagatcgtgttcagctacagcgacggcgtgatgacggtcaagatcgattccgcccgagcaacgacgatctcgtcgctcggttctttcagcgttagttcttgcgtctgcaccgtggcggtgcccgaaggaactgcggacgggaaaatggcgttgactttgaactattatgaaggaacggaagtccccgacgtgacgcccggtcccggcggcgacgatgacgacaagcccgacgataaccccggcggcgatacgaccgacgatgtcgagaaaggcggttgcggcggtgcggtcgtaggtaccggtaccgtagcgggcggcgccttgctcctcgcggggatcgcggtgcttatgaaaaaacgcagccgttccaaataatcaagaatatattgagggcgaacaaaaaagcgatctattttatagatcgctttttttctgtaaaataatgctttgttttacagaaatccgcatcgcctgctcacgtgcgatttcaagtatgatcttgccgatctctttctcctttgtgaaatgtctcgttacaagatactttttgccgtctgtttcgtgcagttcttttgaagtcgggcatgcggcatactgttcaagcaacggtcttatcggtctgttcgtatggtttccctccttaaaaacgcaaaatttttctattatttatatgaaaatgcattcatttttgtgtgacgttggaacgtttttctgagtacgggaataaaagaaaggtagcgaacctttcgctacctttttcccatatgttacctgctctgtcgggcctgtggggcctgtgattcccgtcgcgcctgttgcgcccgtgatgcttgcgcccgttgcacccgtaggtcctgtcggcccggtgggacctgtaattcccgttgcgcctgtggcgcctgtcgcacccgtgatgctaatgcccgtaggtcctgtgggtccgatcgcgcccgttgcacccgttgcacccgccgcgcctgtcgcaccggtcgctcctgt

SEQ ID NO: 3582 - DNA, 28832 bp, Unknown
  16S sequences of unknown bacteria
aagcaagcaagcaagcaagcaagcaagcaagcaagcaagcaagcaagcaagcaaggaatagttctgtccagatcgtagttcaggcgaaaattgaaatcagcgagtcagaaatagagggcgcattccgcccgcattgttgcgggcggaatgcgttctttttgtttttggcaggaattttatgagaggagagggaaacatatgaagaaaaagaaaaggatccgattttttgcgctcctcctgacactgtgcatgtgtgtcgggatgatgccggcttcggctgcggcgcaggaaacatccgttttcgcagacggcagtacggagaggaaaaattcgtcgaacatatcggtttcggttgctggtgaaaaatgggaaactccgacttatgcaaaaactgatgaggagggacgtgtttcaaaggagaatgcttccgcggacgactataatattttttgggatgcggaaaacggcgtattgactcttcaggatgccttgatatctacgcataatattgaggcagtttcagcggagaccgacagactgacgataaaattaatcggtgataatattgtttcagccgaaagcaatctgcagagtgctgatttttctgccatttccaacagcggagagatcgagctgttggatgaggggcaggatgcctcactgtctgtctccgtttcacagagcggcggtcttaattcttcgtacagagcggcgggaatttataccagcgcgggtttgataaattcttccgatctttgtgtcagggtgacagcggatgcgggcaccgactgcagcgggacactgaccggtatacagagcgggggatatggaaagaatcccgcattcctgagaaatacgggaaaaattgctgctgtcgtcaaaaacgatagtttaaatgcgggatacaccgccaattcttatggaattcttttatacggcggtgcgatgacgaatagcggagagctgaatttcaacgtatctgcgataaacggcgatgcgtacggcctgcgcgggacagacacagaggaatcctggaataatgaaggaacgattttttctgatgtaatcgcttatggcggtaatttcgaaggcgttccggaggaattgtataaggcttccaaccatgcgtgtgcggtttctgttgtaagcagcgaaatacagatgacgaacgcaggtgtgatgaatttaaccgcgaggaaccggggaaaaaatgaatacgctgaatacgctatcggacttgaactggacagcggttctacgtttttgaataataccggaacgatacacagccaggccttcgatgcgtacacatggggaatttatttaagtaatttaactgacaatgcggctttgataaattccggaaacatcgaaatcgaagctacgacagacggcggatttgacggggaacagatcggtaatgcctgcgcgacagggataggaataaatatggataatttcagttctgatccgaaacctgtcaaaacggagctgattctggaatccggatcttcgttgtcagtctccgctcatgcggtcgagggcatggaaaatgaggaggacgttacgtataatctctgtcaggcaattcagcttcagaaaatctattatggaggcgatcctggttatgaagtgaaaccgcaggaaatcatacttgcggatgatttagtcatcgtggacggcggtgaatacgacggaggagaacctctgacagaatttttagaagattatgttgatctcggcatgtatgtgtatatcaatacaatcggaaattatttcactgattcagcggatgaaagcacatattctgtaccgtccaaaaatgtagtcgttctcccttctctgcagggcacggttgccattgacggtacattgaaggtcggagagacactgactgcacgaatttcagatattcctgaagaagcgggaatcgtatatcagtggcaggaatgtgatacgaaggatggaatttttacggatataagcggagcgacggagtccagttacacacttacgagtgaacaaaaagggaattatatccgtgtaatcgttacgccgaaggaaggaacgggttatgccggcagtctttttgcagtttccgagacatatgtgacatcaccatcttccggaggttccgccccgacttatcctccgcagatcgaacagccggagaacggcgatgtttccgtctctccgaaatatccgcagagcggagataaagtcacggttgctccggagccagacgagggctttgcagtgggtgaggttatcgtcaccggcgaaaacggagacgctgttaaggttgcagataacggcgacggaacgtatacttttcgtcagccggcaggccgggtgacgattcaggttgtttttcggccggaagaatgcgacggaggcgctgactgcccggcaagtctcctgatcgatgtggacaagaatgcctggtatcacaaatctgtagactatatgatcgagaacggcatgatgaacggtacctctgagacgacgtttctcccagacagcgcggtgacccgcggcatgatcgtggaaatcctctatcgtctggaaggagagcccggggtgaaaatcgcagccgaattttctgacgtggcagacggtcagtattatgccgacgctgtggcctgggcggcgggaaatgagatcgtgacaggttacagcaaagaaaaattcggacctgacgatgcgattacgagagaacagttggcggcgattctttaccgttacgcgcagtacaagaacatcgatgtgacgaggaccgcagatttgtccggatataccgatacagcgcagatcagtgcgtatgcggaaactgcggtgaaatgggcaaatgcggaaggtctgattacaggagtaactgacacgatgctgaagcctgcgggaactgcgacgagagcgcaggcggctgagattctgatgcgcttttgcgaacatatcgcggagtaagctaagcgggcggaccgcagcggtgtatattgcagctgatttcgctgccgtccggtctctgtgctgagatttcgcagaggattctcggagaaaaagaaatagagggcaatcttttatcaaaggatttttctctgggctcaggttagggtgtcccgaagccagattatggatttgggacgccctttttttgaataaagggagaggaaagaggttcagatgcttttctgccgggtttgccgcagagctgcgctgtcaggtctgtcattttttgaatatgaggagtggaaagtgccggaaatttatagacggagctggattcttccggagtgtcgagaaaaaaataagcaaaacaaatatgatgattgacatatgatgtctattgtgttatttttaaatcaggagaagaaaagagcagcggcggatatcggcggccgcggcaccgagtaaatacctccgttcctcagccattggggcggcaggccgtcggctttcgatgatacggaatttttatcttgctgccggagagttttcctctgtctgtttcagaataaggaagattctcgtatttttagacatatgatgtcatatgttatattaatttgccgctgttttctccggggcagcgtgcagcgggaggctgcagaacgcgaaatacggtggtacttcatgtcatgtttacagaaataggaggtcagtatggatattttaaaggatttgactgggataacgggagcgggattcgtaacagacgacgagtcggttttatccggatatgcttcagatttgagtttttcggcggggacgaagccggaggcggaggtctgtccgggcacgacagaagaagtgagccgtatcgtgaaatgggccaacgaaaataacatgcctctgataccggtgagttcgccggtgcatctgtacggaagtacgattccgaaacagggaggcgtcattgtcaatatgagacggttcgatgaaatctatgagatcgacaccgtcaatcgtttcgtgcgcatcggcgcgggggtttcctgggaaaagctcacagcggcgctgagagagcaggggatgagagtgatccttccgctgactccccgttctgaccgttcagtggcgacagatcatctggagagagaagtgaccacgagtatggtctacgattacggcgagcccactcagtccatggaagtcgtctttcccaacggtgatattttccgcaccggctctgccagcgcgccgaaatttccttattcgcccgccagaggcgccaatcccgcgggaccggggctggatttttaccggctgctgcagtgcgctcagggtacgatggggatcgtcacctggatgtctttaaagatacagagcatcccggtgatcgaccggattaaattcgcggcgctggacagcatcgaaagaggaacggagtttctgtaccggattttgccgaggcggatcggccaggaatgtctcattctcaatcgggtggatctggcggctcttcttgcccgggaccggggggaatttgagagatacagagagtctctgcctccgtatactctgatcctcaccctcagcggtctgattcgaagacccgaggaaaaactgacttacgaggagaatttcctgaaagaagtcctgagaaacgaattttccgatatcgtcctcacagacgctcttccgggattcccgggagcggcgggaagactgatgaaaattctcagaaacccgtggccggcagaaataccgtactggaaatctgttccgaaaggcgggtatcaggatctcttcttcatcgccaggccggaaagagcgcaggaatttatctctgtggtggaagagaccgcgggcaggcgctcctatcctttcgattccatcggcatttataaacagcctatcgaacataacagagcctgtcagcttcagttcactttcttttatgatcccggcagcaaggcttcggaggcggaagtccgggcgctgtatcgggaaacgtttgaagcgcttcacagcgccggcgcgtactttacccggccttacggcgacatggcgccccgcctttacgacagagcggcatcttacaccacagctctgaaaaaggtcaaggatttatttgacccgaatcatatcatgaacccgggcaatctctgtttttaaggagcgcggggagtttcggcagagaggacgcagaaatgccggggaggcggagaaatgaggactgccggttccggaggacaggaaggagaagacaatgtcagtaatcgataaaaaatatccggagagattcgatacgccgaaggaaaagtttgccctgaatatcgaagatctcagcaattttacctatgatatgcagcactgcatcaagtgcaaggggtgctattgggtagatcatacctatatgccagggatgaagcacgcagtgcgctgtcccagcaatctctggaaggaattcgactcttacggagctttcggaaagatgagaatcggtctgaaaatcagtgaaggcgagatggaatggaccgaccatctgctggagctgatctatgcggatcccctctgcggagcctgcgacgtgggctgtaagagaaatctggatctggaggtgggactgacgctcgaagctctgcgggtaaaagcggtgaaagacggcgcaggcccgatgccggcacacagggaaatcgcttctttcatcggggagacgggcaactgctacggagcgaaaaaggatagaagcgcctggatggacggggatgtcaggcctgcggaaaaagcggatatcatgtatttcgccggctgctcttcctcttatgagaatccgcagattccgaaagctgtgacgaaggtgcttcagagtgcgggaattccgtacatgatgatggcagaagaatcctgctgcggcaatattctgttttcggttggtatgatcgatgaggcgaggaagatcgcggaaaagaatgtggagatcgtccgtcagtccggggcgaaggtgctgatgaccggatgcgccgaatgttaccgtatgtggaaagtggattatccgaagctgctgaatctgcgcacagatgagctgggctttgaagtaaagcacttcatcgaggtggcggaggaagccctcgcagagggcagactggttctcagcaaatcggtggaaaagagaatcacttatcacgacgcctgcaatgtcagcagaaactgcgacccatgggagccgtatgaaggagaacggggctggatgggaaccgtcgaaccgcgccttgcccgcagaagaggacggcacggtctgtacgaacaggcaaggactctgatccgcgccgtcccgggaatcgactttacggaaatgccccggaggaaggaaaatgccctctgctgcggcggaggtcggggagcgaaacaggcgtttccggagatgtcggaaacagcagcgagagaccggatcgaggaaatcaaatacgtgggagcggaggctgtagtcaccgcctgtccgtggtgtttcagcaatttcagtgaaacagcggaaaaggacagcgaaaccatcggaattctcgatatcgcccagattttggcagaagcagtaaaataaaggaggggaatcatgagtatcaacaggcacgcatacagagccatcgaggcagtggtgggaaaaaattatatcaccgatgaccccgctgactgtgaaggataccgttccggaccgggaggatacgagagcggtacaggatatgaacggatcatgacccggcttccgggagcgattgtcatgccccgcaccacggaggatgtgcagaaaatcgtgaagatctgcggcagatacggccttcctttcgtgccgtactccaccggtttttacggtccccggtcccatcctcatatggacgatgaactgattatcgatatgaaacggatgcgggattttgaaatcgacggaaagcacttctttatcaccgtgcagccgggggtcatctactctcagattcagcaggaatgctttgaaaagggcgcctatgtggtggtaggcggaggcggcgcacagacctccgccgtggccaatctgctcaacgacggctggtctcctctgagctttcgtatcggtcttccccagcgaagaatcctgggtatggagatcgtcatgcccgacggtgagatcgtgaagatgggttcccttgccgacggagacgatcccttctggggagagggaatcggtccggatctccggggaatcatgcgaggttatacggggctgctgggatgtctgggaatctgtacgaagatggcgatcaagacactgccgtttcagccggatattccgaagcctgcgggaatttctccggatacggcgctgcagctgaatccgaagcgggtccggtggatcaattttaccatgccgagtctgaagtccatcgaggacgcccatatcatgatcggaaatgcggagatcggcgccgcggtcaccaaagtgccgaccttctggcgggccatcgccaaagcggaatgcaaggaagagttctgggatctctggctcagagagacggaagaatcagtagcgaatttcttcctggtgcgggttctgctcatcggatacacttccgaggaacagatggactacgattatcacgtactctgcgatatcatcgaggagctgggaggaaaagaacgccgcaccaaaccatcggatgaatcctggtttaaaaatgccgattcggcgggaatgtggctgatgacaggctcctacgtatccgtggactatgtcatggattcctttacccaggcctttgaacaggggccgaactaccgggatctgaaagacagatatacgccgcctctcatgccggactgcaaggatctgggatggttccagagctgcgagatggggcatctcggatattacgaatatctgatctactgggatcagagagaagacaccgacggcatggatcagttctacgtggagagcgccaagatgaatatcgaaaacggctgctatcccgcactcctgagctcccaccagccgctgtatctgacaggaccggcctacggtcccaattatcaccggtggattctcgatctgaaagggatctttgatccccagtggatctgtcatccgcctcttccgctggctcacgacgaattcgtgaagagggcggcttggatgcaggaggtcaagacctgggagacgccggaggaattcccttatccggacagcctgaaagcgagaatgagctgatattttctatatataccacaagacgcagagggcgggagaatcgatctcccgccctctgcatcttgtgttcagctgccggaggaatgttttaaaaggtcatgtccggcgaaagtataatcattgtctgtgaaatctttcccgatagaatcgaaatcctcccggtcaaaagcgtttcgatgcttttttgtaaattcgcaggtaatatcgctgcccgtctgatccagcacgcgaagatcctccgggctttggaaaatcttcgtacagctttcgatgaactgagctgacggcgcggaaccaaagaccctgtccggattgttgagacaaaagaaaacaaaaatcacgccgatgagcaggatgcagaaaagaggaactgtcagtttttttgtcttttttatcatgcaccttcctgattttctctaacagtgtcaaatttactgtccgtttttattttttaagccttatattttcaaggaattctctgcatttcataactaatctgacagagctctttctcttcgcgtaggcctgagtgaagtttggattcataaaatgatagatatttttaaatataacattttttaatgaattgtcaaatatataattgttaagaaggggaaaagcagtctatttaacgaagaatggatatggttctatggtagttttaagcctcggacagtatgcggccctgacagaggacgcagagatgaggctggacgaaggggataaagcgtcagaagcagatgaaacgcgatgtagcgccggcgaagtattcggcaggatcagggagcgcgtaaatggaagagaaaaagtatgaggtacgttttcttccgttatttgaggaagtatttgtccagcatcgtcacttatattgcagagcgtctgaagaatccggaagcggcgaatgaattgattggtgatgtggaaaacgctgtcatgaagagaagcaattacgcggaaagtttttgaaccatgtcgttcagcaaaagagagaaaatacccatactatagaatttatgcgggaagctatatcgtttactatgctgcaattgataatacgatggaagtgagaaggattctctacaataaaagagataagttgtaaagcgactgggaacggcggaaaactcctgtcatccgagagatacttcctctgaagtattacttgtcgtgacaaaaaataagttgcgcagattataggacgtaaattataatgaacagcagagaaagcggcgccggtctgtggccgggaagtgtctctctgctgtttttgtgcttgtcaggaaacggtctgctccggacgctgcggggattcgtcagagggcggatattcacaggaattcacccggcgccgtttatgcggcttcgccagagggcggattttcgcgtgaattcgtctgaagccgcttacacggctttctccgtggatcggagtttcggaaagatccgtctgccgccgcttttcgcggatcagcgggtctttgcagccgtctgcagtattgtttgaaaaagtgaaccgaaaggagttttcgttatgaaaccatttccctggtggacagaggagcatatcgcttttcagaaagaagtaagcgcgtttgcgaaggaaatcgcgccccgggacgcggtgacgaggtggaccagagagtttccctatgatatctatcggaagatcggggaaaaaggatacacgggagccgccattcctaaggaatacggaggtctggggctgggagccaccggctcctgcattctggctgacgagctgaacgcactgatgcctggagtaggccggatcgtcatcggcaatatgaacggaggtctgcgccagatcatcgaatacggcacagaggagcagaagaagagatttctcccgaagatcgcttccggggagatcggcgctgtggtcatcactgagatgacggcgggtaccgacgccgccggcgtatcccttgcggcgaagagagagggagatcactatattctcagcggcaagaaacgtttcatcgtagcggcggggacggcagaccggtatttcgtctacgccagaaccagcgatgatccccgggactacaaaaaacgcaggcatctgacagcctttgtggtgaagagaggcacgccgggatttacctgcgagaagatcaatgagattctgggatttgaaaatattcagaacggttctctcgatttcgaccgggtgatcgtgccggaggaggaccgtatcggcgcggaaggagaaggctggaagattatgatggccgggctgaattttgaacgcacgaatatcgccgcgggaaccgtgggctggcagcgtcttctcctgaattactgtgtgccttacgctcagcggagagttcagttcggaaaggccaccgctgatattcccgcaaatcaggataagatcgcggatatggtgatgagactcaatatgctgagaaattctgtctactataccgcatggcagtgggaccggggagaggatatcaccgtcgaagccagctccatcaaagccatgggggtgcagatgactctgaagtccgccgaagacgccacacaggtcatgggcggagacggggtcaaccgtttttacccggttcagaatgtatttgaagtttcaaagactgagcacgtggccggcggcacggtagaggcctgccgcatgacagtgttccgctcggcgctgaagatcatgaaagaagatcttcagatggtccgcagagagatcgatgaagccacaggcgtaccggtgccggcttatcgcgatgtggagaaacgtctgccggtttcagaagaaaatgtcttatccgtactcgcagaggattatcgggtcaatccgggtcttcatatgacggtcggagatctccggcagtatatcgaaggggatgaggatgagatcctgcggactgcggaacgcctcgaagagcagggcagtgtgatggcgctccgggaccggaagaacggcggcatccggctggtgaaggccacatatgaaggtctggcaaaagcccggccgaaagaagactatcagtggtttcctgactgggtaaccggcgagagaagattctgatcctcctgctgtctgatgaaagccgacgccgctttgtgacggaagggggtctcgcggtgcggacgaaagcggcagttttctgcacggaactgtttcagcggctctttcccctgtcggatacacttgaaaaatcagtcctgttaggctatgattagacgaggaggtttttcaatggcacgagtaattttatcagaacagacggcggatcggatcaggcagctgatcgaacgtcagtacaagccgggagaccggattcccgcggagatggagctcgccgaatttctgggagtcagcagaacgacgatccgcgaggctgtgaaaatcctctgttccaggaatattctggagatccgcagagggcatgggacctttgtttgtgagaatcccgggcttcccgcggatcctttcggttcgaaagatatggatgaagaacagctgaaagccgatatcttcgagatgtccttgcttttagagccggaactggtgcgtctggcggcccgtaaagcttccgatgaaagtatcgtccgcatgaaagagattcaccgggagatggaggatcggctgaagcggtacgcagaaggggaatatattccaatgaaggagttccgcaagttggatatcgcttttcataaagcggtgatcgaaggctgtgaaaatcagattatctccagatctctgccgatgtttctcgctacctgtaccgagtggtacagcgtctggacaagtctggacttcggaaaagtgctggaaagtttccggcgttatcatcggaaaattctggaggcggtggagtctcacgacgccgacagcgcataccgatacgcggcggaacatacgcaggagatcatcgatatttacgagagcagcggcaaaaagagccggaagagcgaataatcgcttccgggcgtgtgtcccgaagctgtacgacgaatcacatctttaagtatctcgcaattttatgattgaaatgatacataaagcgtgataaaatattccttgtatttcgccggcgtgatggaattggcagacgtgcgggactcaaaatcccgtggtggcaacaccgtatcggttcgaccccgatcgccggcaccattttatgacagttggacgcgggttgcgtgcaaatcaggcgcattcaggaggaaattaatggaaggcaatacagcaacgagttatctcgttacattcttaccgctgattctgatctttgtggcgttttggttctttctcatcagaccgcagaagaagaaggatcagaaggttgctgaaatgagaagaaatgtctccgtaggagatgagatcgtgactatcggcggcgttgtaggaaaagttctcagcgtaaaagacgatgcgatcgtcatttactgcggatccgataagacgaagatggagttcaagaaatgggcggtttccgaggttacgaagaaaaacgaaaaaccggtgaaggaaatcaaagacgccggtgaggaagcggagatcgaagctcctcagaagaagaaaatcaagaagcttgtaaaaaagacggatgaggaatctgtcggggaataggcgtcaggcgtcagatattttccggttcgccggatctcaggatgtctcgttctttcctgccgcttcgcgtcaaaagtctgcggaagtggaaatcaaatcgcaagagagctgtctggatcggctttgaggccggcagagacagctttttatttttgtccggcgtccccgctcttgctgttctgaaacagagaagaccgcatataatgtaatgatatattttaccggttattttatgatttttccgcggatctgtctttcgcggagtaaagttgctgcggggtggaagaaaaatggacaaaaaaatgatgatagacagaccgatgaaaatactgaaaggctttctggccgcgtgggtgctgatcgctttgggcattgtcggagcggggcttgtgatgcttctgacgcctgccggaataaagacggggtcgtatatcatcatcggcgcggcttccgcaggaggctttctctgcgggtcatcggcgtcctcagccgtaggcagacgcggcctgatcgtcggtttgatctccgggatgattctttcgctgacgattttagcggcgtatcttctgtttttcggggttgccgccgatcaatctctgaattacctgcctctgggacttcccgcggcggcgggagccgcgggcggtcttttcggcatggcggcgggttcttcgccggccagaggaaacggaagggtatgaggagcccgcaaaggatttgaaataccgtaaaaatggccgattttctccgggcttacttgacaagaaatacgctgttattataaaatacaaatgttaatcaggtatacgaaatacacgcagaatcgcgtgcggtcatcatatcgatgttaaggaggaaacgaactatgaagagagtaaagaccattgcgagaccatcgttaaaggatgcggcatgcagcacaggatgcggcgaatgtcagacttcctgccagtccgcatgcaagacttcctgtacagttgcaaatcagaagtgcgaaaatattaagagaagataatcgaatccttgagataaaagagggtgtccgaagcgttgctgcccgcgcgggttctggtgtgccttgcggcacaactgcagacagagcgcgggttcttcgctgacaggcagcttctcttttttttaggagatacgattttggaagcatctgaaaatgcacaacgggaagcccggcgaaagccggaaagggagtgataatttgatacataagtatatcttcagggacaagcctgtcgtcatcgatgtcaacagcggtgcggttcacatggtagacccggtgatatatgacgcactggatttttacagggataagacctgtgacaaaacagcgatggaagccgctctcgttccaaagtatggagcagaagcgctggcggaagcctgcagcgatatcgaagaactcatcgcggcggacatgctgttcagtgacgacgaagtcagtacggagatctttgagacaaagcagccggtagtcaaggcgatgtgtcttcacgtcgcacacgactgcaatatgaactgcgcttattgtttcggcgataaaggggcgtttgaaggcgtccgctgtcttctgactccggagatggggaaaaaggcgctggactttctcatgcagaattccggaaaccgcagaaatctggaagtggatttcttcggcggagagccgctgatgaatttcgacgtcgtaaaggaacttgtcgcttacggcagagaaaatgaaggaaaatacggaaagaatatccgctttacgatcacgacaaacggaattctcctggatgacgagaaaatcaaatacataaatgaagtcatggacaatgtcattctcagcatcgacggacgcccggaggtcaacgaccgtatgagaaagacggtcagcggcagagggacttacgatattatttcaaagaattataaaaattttatctcgaagagagaaggtctgtattatgtgagaggcacttttacgagatataatctcgacttcgccgaagacgtgaagcatcttctcgatcagggatttcagaatgtctctgtcgaaccggtagtgacttcgccggaatacgattatgccctgagggatgaggatatcgaaagaattctcaacgagtacgacaggctcagcgatatgtatctggaacgggcgctgaaaggcgagcctttcgattttttccattttaatgtggatctcaaccaggggccgtgcgtgatcaagaggatctccggctgcggagccggcacggagtacgtggcggtgtctccggaaggagatatctatccgtgtcaccagtttgtaggcgatccgtcgtttaagctgggcaatttagaagatgaaaaatttgagaataagatgttcgatcagtttaacagcgcgcatatctacaataaagaagagtgcagaagctgctgggcgaaattctactgcagcggagggtgccacgctaacgcctatcagtccagcggcagtattttagagccgtataagctgggctgtgaactggaaaaaaagagagtcgaatgcgctgtcggcatacaggcatatctttcagatgaatttgaacaagaaggagttttgtagagaaaatgaaaaagctgaataaagttctggctgtcctcattattctcattctcatcgccggatggacgattacggtgggaggagcaggagataaggtcggttcgatcaaagattatatcaagcttggtctggatctccagggcggcgtttatgtcgtcatggaagcgcagacggatgcgagcggtgaagaattgagaagtctgatgacgcagacgcaggctgtcatcgaaaagcgggtcaacgagatgggtctgacgaatccgatcgtaaccatcgaaggcgaaaaccggatccgagtggaacttccgggagcggaagatgcggaaagcgctatcgaacagatcggaaagacggcgcagcttcagttcgtcttagcagacggtacggtagcggtagacggcagcaatgtaaagaatgcggaagctgccatcaatcagcagggcgccggttatgtggtggctctcgagttcgattcggagggtgcgactgcattccagaacgcgacacagaagattgtcaacggcgaggtcacggccagcgaagaattcacgaatatgggaatttccgcaaatcagctggcgatcatcctggataatgaagtgatttcacatccgaatgtcagcgtggtaatcagcggaggaaaggctcagatcgagggggatttctctcaggaagaggcttctcagctgtccgctctcatccgcggcggttcgctgccggtgggtctgacggaggttcagacgaatatcgtcggtccttctctgggcatggattctcttaccgacagtattgtagcggctctcatcggcgtggctctcgtcatgctgatcatgctgatcgtctaccggattccgggtctggcggcggatatcgctctgattctgtattgtctgattttcatctgggttatcgcggctttcggcacagttctcacactgccgggcattgcaggtatgattctgtcggtgggcatggcggtggatgccaatgtcattatctttacgagaatcaaggaggaagtcgtaaaaggcaagacgatccgggtcgctacgtctcagggatataagagggctctcgctactgtcatggacgctcagatcactacgctgatcgccagcgtggcgctgtatgaattcggttccggcgatgtcagaggttttgcgctgaccctcatgatcggtatcgtgatcagtatcttcacggctacgatcatcacgaatatcttcctccgcatcctggcggaaagcaagaccttcggaacgaaaaagttcttcggcatcaaagatacgcctgccgttactgaaggaaaggaggcgttataatgaaagagagactcaagaaattcgattttctggggcaccggaaaatttattacattttctgtatcgtgctgatcatcgtcagcatcggcgtgggaatgatccgcggctacaacctcggtatcgactttaccggcggtacgatgatagaaattgagatgggcgagcagattgatctgggcagagtggaggacgttttgtccgagacggagatcgacggcgctgtgacttatgccggggaaggcaatacaggaatcatcatcaagacgacggattcgctggacaatgatcagagagcgacgctgctcgatgcggttaagacggagttttccatcgatgatgaggcggtcacctccgtttcaaacatcggaccttcggtaggcaatctgctgaagaagaacgcggcgaaggccatcgctatttccgtcgttctcatgctgatttatatcgcggtgagattccagtggaaatacggtcttgcagcgattctcgccctggcgaatacgcttctcatcgtattcgggttctacggattgttccacatcaccatcaatagtccgtttattgcagcgatgctgacgatcttgggctacggcatcaacgataccatcgtcatcttcgaccgtatccgggagaataccggcggggctgcgaaaaagaacatcaccgcactggcgcctctggtgaacgccggtatccatcagacgctgggacgttcgattatgacgtctctgacgacggtcatcgtcatgataccgctgcttatcatctgcggctcgacgatccggagtttcattcttccgctgctcgtgggcgttattgcgagcacgctgtcgtctatttttatcgcgacctctctctggtatgatatcaaccggatcacagagaagcgctcttataatggaaaatcttccaaaccggcgaaaaagaaggtttcaaaagagccgacggtttagaagtctgtcacgcgggtatcggaaaagaaaggcggattttcatcaaaacggaaaagaagtggattttttgggaattcgcaaagaagcgtgaaaaatacaatgatataatcaggttatcaggcgcggcaaaaccgcgcctatgaccatatattgaataaagtggggattaggatcagaaaacagcgtacataatattctaatcaaggctctgcagtcaggcttgatcaggcagagtcaggcgcagaagcagcatctgccgctctgaacacattaacacagcaataagaacagtaatcggtgtgaatcatgaatgaatttttagattatattcaatccctcaatccaaattatgaactggagggtataaaaaaagcatatgaactggcggctgagatgcacgaagggcagctgagaaaatcaggcgagccttatctcattcatccggtggaggtggccaaaattctggcaggtctcggtatggatgagcagacgattatcgccggtttacttcacgatgtggtggaggatacggaatacaccgaagaacagctgaagcaagattttggagaagaggtgactcttctcgtggacggcgtgacaaaactgggaaatctcatatttgagacgaaagaagacgctcaggcggaaaatctcagaaaaatgtttctcgccatgtcaaaagatatccgggtcctgattatcaaactggcggaccgtcttcacaatatgcggacgatcaattatatgtcgccggagaagatcgcggaaaaatcaaaagaaaccttggaaatttacgcgcccctcgcaaaccgactgggtatgtttgccataaaattcgaactggaggatatcgctctgaagcagcttcatccggatttttacaaagaactggcacagcagatcaaccagcgaaaagagcagcgcgaagagtatataaataaaatcatccgggagctgtccaaagctctggatacactgaacattcactatgaggtgaagggccgttcgaagcatttttacagcatctaccgtaagatgcacgacaagcacaaacagctggacgagattttcgatctcaccgcggtccgcgtgctggtggataccgtaaaagactgctatgcggttctcggcgtcgttcataccatgtggcgccctattccggggcggtttaaggactatatcgccatgccgaagtccaatatgtatcagtctctccatacgacggtattcggcaaggacaatatgccgtttgaaatccagatccgcacgtatgagatgcatcagatcgccgaatacggtatcgcggctcattggaagtataaagagggcatcaaagacgagcgcaatgaagaggaaaagctctcatggctccgtcagacgctcgaatggaataaagacatggataatccgaagcagttcatggcgacgctgaagatggatcttttttcaaatcaagtctatgtctttacgccggcaggcaaagtcattgagcttccttccggttctacgcccatcgatttcgcgtacaagattcattccgatgtgggcaacaagtgcatcggcgcgaaaatcaacggaaagatggttcccatcgaccatgttctcgacaatggcaatatcgtggagatcatcacttctcccaacagcaaagggccgagcatcgactggctcaagattgccaagagcagccatgcccgcaataagatacgccagtggctgaagaaggaaaataaaagcgaaaatgtcgaaaagggcagggtgatgctggaacgctatatccgccgcaagggttacgatccgcagcagattatcaaaacgcagcgcatcaatcgcgcggcaaaagaactgaattgctcttccatggaggatctgtactcttccattggttacggcggcactatgatggcgaaagttctcgacctccttctgcggttttacgaggaagagaagcagaacgagcagaaaaaaaatgaaatcaagaattttgagtcgaagaccgcaggtgcaaagcataagggcggcgaaaccggggggatttccgtcaaaggcgtcgacaatctgctgattcgtctttccaaatgctgcaacccggtaccgggagatgaaatcgtaggttttatcacaaagggccgcggtgtttccgtacacagagccgactgcagcaacatccggtcgatgtccgacgaagagcggcagcggtttatcgaagttgaatgggatacggagaaacagtcccgttcctttgagacggatatttcgctgctggccgaagacagaaaaggtcttttcgccgatatctcaaagatctgcgaggatatggacgtccatatcacgggtgtgatgggaaagagcaacagcgacaataccgcgcagtttacgatcaccgttcagatttcaaatgtcaatcagatcgcacagctgatccgcagactgaaatccatggaggggatgatcgaaattcacagaggaaactcataagttaaggagataaaatatggatatcaaattatattataccggtccgatgcaggtgaatacctacctgtgtgcggatgaatccaccaaaaaggcttttgtcgtcgatccgggcggccccagcaaatatctggagaattatgtgacttctaacggttatgaggtcgaatatatcatcctgactcacggccacggcgaccatatctgcggcgttccgtattttaaggaactgtggaaatgcccgctggtaggtcataaggatgatatctatctgtttaacgatgctcgtgagaatctttcccttgagtttatgggacagaaaatcgaatttattccggacgtcctcgtggaggacggcgatgttctcaaagtaggcaatatggaattaaagatccttcacacgccgggacatacgctgggaggaatctctatcctcgtgggcaacgttctcttcagcggcgatactctgttcgctgattccatcggaagaaccgatttcaaaggcggatcttatcctcagctgaaggaatccgtatatacgaagcttttcgttctgcccgacgatacgcatgtccttccggggcatatgggtcagacgaatatcggtcacgagaagaaattcaatccgtttctgtaaggcagcgatacagcgccggcgctcttgtgttccgacgacgggcggcgttgctttccgagcgcccgtctttgtataagctgcttctgaaaagacgggaaccggttctgttcctgccgtctgtccgcgaaagcggcggtagaatacggatcgcatacggaataatcaaagatgaaaaaatatatagaataaatgtatagattaaacgtaaaaaaagaaaagcaccggtatgtcttagaggaactggcaaaggaatttctgcggccggaggagtatgaagtcttcgtagaagagaaggcggagaccgctgagggatcttctgatcagcaaaagatcgcggccggagagaaaaaagcgctgtcagaagaacagcgcaggacagagaatgaagaacgggatgcggagaagcgccgggtcttcgacgagctggcagaactcaccggttatcgtccggaatgggggacgctgaccggggtgcggcctgcaaagctggtcaacgagatgatggacggagggctgtcggaagaggaaacggctgaaatattccgccgccgttactatgtcagcgaggagaagatcgatctgcttttagagacctgcagaaaccagaggtttctcacatcggtgcctgcggaaaacaccgccggagtatacatcgggattcctttctgtcctacgaggtgtctttattgttcttttgcgtccaatcaggcgtccggggaagcgatggagcggtatcttcaggctcttctcacagagattgaggcggtgggagcgaaattccgcagtctcgggattgtgccggaaagcctttatgtgggaggcggcacccccacttctctcagcgtatttgcgctggagagactgctttcgtgcgctgtggaatctttcgatctgtctgaagtccgagaattctgcgtggaagccggcagaccggatacgatcaccggggagaaactgtctgtaatgagacattatggagtggatcgggtcagcgtaaatcctcagtccatgaacgacgtgacactgaaagcgatcggccgttcgcatacggtggaggaaatctgccgcgcttttgaaatggtcagacagagcgggattcctcacgtcaatgcggatatcatcgcagggcttccgggcgaggattatgccatgtttctccatacgctgaaaagtgtcatcgccctgggaccggacaatatcacggtccatactctggcggtgaagcgggcatcccgcttaaaagaacaaaatgaaaattaccattacgaaaatgccgcaggagtcggacggatggtgacggacgcccggcggattctggcggagaacggatattttccatattatatgtatcgtcagaaacatatgacgggaaattttgaaaatgtgtcttatgcccgtccgggcagcgaatccgtctataacatccgaatcatggacgagcatcagacgatcgcggcgctgggtgcaggcggcatcagcaaagcctattatccggaggaaaaccggctggagcgggtgccgaatgtgacgaattttgaaatatatatcgaaaggctggacgagatgattcagcgcaaggaaagagcgctctacaagccttttggcggctgagcggcgcgggaattccgaaggaaaaaagagccgccggcgtgggccggagtttttttctgcggcgtgcatccgtccgggcgttctttgtgaaaagaggtcgaacctgcgggaacgccccggttttgttctgtctttcgtatcggataaaaggaggattaatcaatgcttacaaaggcccctaaggggacgaaggatgtccttccgggacagtccaggaaatggcagtatattgaaaatacattccgggagatctgcagaaattacggaattgaggagatccggacgccggtattcgagcatacggaactgtttcagcgaggtgtgggagatacgacggatatcgtccagaaggagatgtacatatttgaggatcacgccggcaggagcatcgctctgaagccggaaggcacggcgggggtggtgcgttcctatatcgagaataaagtctatgcggataccaaaccggcgaaattctgctatgtgattccctgtttccgctacgaaaaaccccaggcgggacgtctgcgggaattccatcagttaggcatcgaagtcttcggtgcggaaaatatgatggcggacgcggaggtcatcgcgctggcgatggacttctttgagaagctgggggtaggagaactggagcttcggatcaacagcatcggctgtccggagtgcagagccgtctaccggaaagcgctgcaggagtttctgaagccgcattacgatgccttctgcgatacctgcaagacgagatatgagaaaaacccgatgagaatcctggactgcaaaaatcctcactgcaacgagttgtctgagggggcgccggtgatgatcgattatctgtgcgatgactgcagacaggctttcgaagagctgaaagcgaacctgcaggctctggatatcggttatgtggtggatacgggaatcgtccgagggctggattactatacgaagacggctttcgagatcgtcacgaataccatcggcgctcagggaaccgtatgcggcggcggaagatacgatcatctggtagaagagctgggcggcccgaagacgccgggcatcggcttcggcctgggaatagagcgtcttctcatcgtcatggaggctaccggcgcttacctgccggaagaggagggcaccgatctcttcgtggcatatatgggcgacgacgcgaggatgtatgcccagaaactgattcacgatctgagaaagcgcggttttaaggcgatgctggatgtggcggcgagaaacatcaagggccagttcaaatacgcagaccggctccattcccgttttaccgctgtcatcggcgacgatgagctggcgcagaataagatcacactgaaagatatgaagacgtcgacccagaagcagatcgctcccgaagagctgatcggagaactggaaaatgcgaaataattcgaaagagcaggaagaggcagtactatgagaaatgtctggaaaagaacaaatatgtgcggatcgctgagactcagcgacgcgggcgcggaggtcgtattgaacggttgggtgagcaagaagagaaacctgggcggtctgattttctgcgatctgagggacagaaccggaatcgtacagatcgtcttctccgatgaagttccaaaggaacttttcgaagcggcggatacgctgaagagcgagtatgtcatcggcgtcagaggaacggtcatcgagagagaatcgaaaaataaagaactggcgacgggagacatcgaaatcgcggtcagcgatttcgtgatttattccgcatcggaaacgcctccgatttatatcagggatgacgataatgtagatgagaatctccggctgaaatacagatatctggatctgaggaagcagaaaatgcagagaaatctcaaagtcagacaccaggtgaccatctgcgcgagaaatttcttcgacagagaaggttttatcgaagtggagacgccgacgctggtcaatccgacgccggaaggcgcgagagactatctcattcccagccgtgtcaacagcggcagattttacgcgcttcctcagtctccgcagcagtttaagcagattctgatggtctccggagtggaccgttattatcagatcgcaagatgttaccgcgacgaagatctcagagcggaccgtcagccggaattcactcagatcgatatggagctctcttttgtggaaccggacgatatcatcgacattcaggagagatttctccagacgctctttaaggaagttctggatgtggacgtggcgattccttttgaacgtctcccatatgacgaagccatggcgagatacggcagcgacaagccggacactcgtttcggctttgaactgaaggatctgggcgatattgtatccggatgcggatttaaggtgtttaccggcgctctggaaagcggcggtatcgtaaatgccgtcaatatcagcggcggcgcggaaaaattcagccgtaaggacatcgacaagcttcaggaagccgtcaagtcttacggagctaagggtctggcatggatgaaggtcacggaagagggcgtcacctctcctatcgccaagttcttcgacgaagagcacacagcagccattctcgaaagaatggaagcttccgcgggagatctgattctcttcgcggcggataagaaaaaagtcgtttacgactctctgggattcctgagaagagatattgcaggaaaactggggcttttagacgattctgtatataatttcctctgggttacggacttccctcttttcgaatataatgaagaggatcagagatattatgcgatgcaccatccgtttactcagcctgcggaagaggatatcgaccgtctggaatccgatccgggcagcgtcaaagccaaggcttacgacatcgtcctcaacggcgtggagctgggcggcggcagtatccgtattcacgacagagagcttcagaagaggatgtttgctgccctgggactctccgaggaggaagcggagagaaaattcggcttcatgatggaagccttcaagtacggcgcgcctcctcacggcgggctggcttacggcctggaccgtctggtgatgttgatgctgggcgaatcgagcatccgtgaggttatcgcttttccgaagaatcagaacgctcagtgcctgatgtcgggcgctccgggggatatttccgcagaacagctgcgggaattatcgatacaggtgacggcgcagcaggattctcaggaatcgtagaagtgcagagggcggcattatgaaaatcggaatacttggggggagtttcaaccccatccatcacggtcatctgattctggcggagaacgtcagacaggaggcggggctggataaggtgctcatcatgccggctcatgcgtctccttttaagctcaaccgaaagatcgctcccggagaggaccggttccgcatggtacagcttgcggtagaagacaacgaacacctcgaagcttccgatttcgaatcggccagcgaccggatttcttatactgcggataccatgagaatgctggaggaaatttacccggaggatcagctctttttcattaccggggcggattccattctggagatcgaacgctggaaggactgcgaagagcttcttcgccgctatccgtttctcgtgggaggacgcccgggctaccgggacgctgaactggcggagttcgccgagtatctctgtagagagtatcaggcggacgtccggatcatcgatatcccgaaagcggatatttcctctaccgagatccggaggaggagccgagcgaatcagagtatcaaatatctgacaccggataaggtagcggattatataaaagagaaaaatttgtattaaggggcccggattcaaatcgggaaatgaacgggattaggtatgcgaaaagacgcgtacagagacggagtgttttatggacaaagaattcagaaaaaagctggacgattacatcagagtacggctgacagaaaagagataccgtcataccgaaggcgtcatctacacagcggtgacgctggcagaacgttacggcgcggatccggaaaaagcggaaatcgcggcgctgtttcacgatgcctgcaaaaatcttgacatcgaggagatgaatacgctggtggaggaatatcagctcggcgattattatatcgataagccgcagctggcgcacagcaaattggcggcggccattctcaaagcgaaattcggcgtggaggacgaggatattctcaatgccgtcagttatcacaccacgggaagagcggatatgagcctgctggaaaagatcattttcgtgtcggacgccacggagccgaatcggacctatgacgacgcggagcgtctcaacgcgctggcgttttccgatctggatcaggcctgctgtgaagtgctggagtggacggtgcagatcgtgggaaattccggacgctatatggatcaggatacggtcaaagcgctggaatggttccgggaactcatgaaagaccgttccatcgaagacagccgcacttttgccgttttcgccgcgcaggttctggatgataagaagggatttgatatcgtcgtgctcgatgtaggcagccagtctatgttcgcagactatctcatcatcgccgcaggcggatcggaacggcagatcaacgcgctggcgtcggaggtggaagacagatccgaaaaaaacggacgctttgtcaagcacatcgaaggcaaaaatggttccggctggattctcatggattacggcgacgtgatcatcaatctcatggtggaatccatgcgggagaaatacaatctggaaaagatctggtccgactgcgagcagattgagtgggaggtttagcggtatggcagaaagatatgactttcagtcgatagaaaagaagtggcagagatactgggaggaaaatgacgtctttcatacagaagaggattcgtcaaaagaaaaatactatgtgctggaaatgtttccgtatccttccgggaaactccacatgggtcatgtgagaaattattccatcggtgacgtgacggccagatatatgagaatgaagggactcaatgtccttcatccgatgggctgggactctttcggccttcctgcggaaaatgcagcgattaaaaacggcgtgcgcccggatgactggacttgggaaaacatcggagagatgagacagcagctgaaagcgctgggactcagctacgactgggacagagaagtcgctacctgccacagagattactataagtggacgcagtggatttttattcagttctataaaaagggactggcatacaagaagaaaaatccggtaaactggtgtccttcctgtcagacggttctggcgaacgaacaggtggtagacggcaagtgcgaacggtgtaagacgctggtgggaaagaaagatctctcccagtggtatctgaagatcaccgactatgcggacaggctcctgaaggatctggacaagctgccgggctggcccgagaaggtgaagctgatgcagaaaaactggatcggcagaagcgaaggcgcagaggtcacattcaagatcgacggttttgaaaaggatctgcagatctacactacccgcccggatacgctcttcggcgccacctttatggtattggctccggagcatccatatgtgagggaactgatcgaaggtacggagtatcaggcggaagcggaagcatttatggagaagctgcagcatctcagcgatatcgaccggagttctacggctctggaaaaagaaggctgcttcatcggccggtatgccgtcaatccgctgaacggcaaaaagattccgatttatatcgccaactatgtcctgatggattacggtacaggcgcgattatggctgtgccggctcacgacacgagagacttcgactttgcaaaaaaatacggcatcgaagtgattccggtggtggatccggcaaatccggaaatcgacatcgaacatctgacggaagccttcgtagcggaaggaacgatgatcaactccggttcttttgatggtctgaacaataaagacgctatgaagcagattatcgaatacatggaagaaaaaggaatcggaaagggtaccgtcaacttccgtctcagagactggctcatctccagacagagatactggggcgcaccgattccgatgatatattgtgaagactgcggctgggtgccggagaaggaagaaaatctgccggttctgctgcccgccgacgtagaatttactggtaagggagagtctcctctgaccaccagcagggaattcgccgaggcggtctgcccgaaatgcggaaaaccagcgagacgcgagatggacaccatggatactttcctggactcctcctggtattttctgagatataccgatgcgagaaatgagcagaagccgtttgataaagaaaaagcggattactggatgaatgtggatcagtacatc

SEQ ID NO: 3583 - DNA, 29942 bp, Unknown
  16S sequences of unknown bacteria
ccccgccgttatcataaaaaccaacgatacataaccctggggtagggtggtaaaagccatcccaatcccgggagccccgcagggcgcctataccatatacttgatccactgagtaacagaaagaagggatcctgatgcgcgtactcatgactggcggcggtacggccgggcatatcaaccctgccttagccatcgcggcgacgatccgggataaatggccggacgcggatatcctgttcgtgggggcagcgggccggatggagacaaagctcgtgccggcggcgggatacccgctgaaaacggtggacgtgcgcggtttccagcggaagctcagcgtaaaaaacataggacggaatctctccgccgcgttccacgctgtgacggcggggggcgcctccgcccgcattctccgggattttcgtccggatatcgccatcgggacaggcggctatgtctgcggcccgatcctgcgcaaggctgcgcggatggggatcccggtggtggtgcatgagtccaacgcctatccgggggtgacggtgaaaatgctcgccaaaatggccaaagctgtcctcatctgcgatgagtccgcccggaagtacctgccggaggacgcgaacgtgatcgtcaccggcaatccgcttcggcgggatttcctgcttgtggaccgggaacaggcccgccgtcagctcggggtggatgaacggccgctgattctggcttacggcggcagcctcggcgccgcccatctcaacgaggcggtgatcggggcgctcgcccgcaatcagcaggcaggcgcctatcagttcatcgtcgggaccggccggggggaaaactgggacaaagcccagcggctgctgcgggaaaaaggggtcctcaccgacggcgtgcatgtgcaggtccgggattacatcgacgatatgccccgctgcatggccgcggccgacctggtgatctgccgctgcggggcgatgaccatgagcgagctgccggtgatgaaaaagcctgccatcctggtcccttcaccctatgtggcggagaaccatcagttttacaacgcgaaggccctggctgaccggggtgccgccgtctgcatcgaggaaaaagatttgacagaatcccgcttatgggataccatacaggaagtggtttcctccccgctgaggctgcaaaagatgggggaggcggccggacaggcggccgtaaccgacgctgccgaccgtattttcgacgtgatccgacgggtggccggccgctgaccgccgcacccgtcccgcccgtgccgcataggatgccctgtggatgattccgaagggtattttattgcgaaggggtgcggtcgatgtcaaagctcttcattgaaggatgccatcgtttgaacggcgcggtcgccgtgcacggcgcgaaaaacagcgcgctgccgatcctggcggccgccttgatggcggacggggtctcggagctccagaactgcccgggcttgtccgatgtggacgcctctgtggcgatcctccgccatttgggctgccgggtcgagcgggaagggcaccggatcctggtggacaacacggggctgtccggcagcgatatccccgacgacctgatgcgggagatgcggtcctccatcgtctttttgggagccatcgccgctaaaaccggcgccgccgtgctctcctttccgggagggtgcgagctcggcccccgtcccatcgacctccatctggccgccctgcgccagctcggcatggccatcgaggaggagcgcggccaattgcgctgccgcgtccggggccggctgaagggctgtaagatccccctgtccttcccaagtgtgggcgcgactgaaaacatcctgctcgccgctgcgacggcggagggcaccaccaccatcctgaacgccgccagggaacccgaaatcgaggatttggccgcgtttctcaacagctcaggcgcccggatccggggggcgggcgagggcaccgtcgtcattgaaggggtggaccgcctgtcggcctgctgccaccgggtgatccccgaccgtatcgagaccgcgacatatatggcggcagccgcggtcacgggcggatccctggtcatcaaggatgtagagccggctcatgtggccacagtttttccggccttcgaggaaatgggatgtcagatcgacgtgtggaaaaacgagctgctcgtcagcgcacctgcgcggctgaggagggtccgcagtgtgcggaccatgccttacccgggtttcccgaccgattgtcaggcgctgctcatggccatggcgtgcgtggcggacggcaccagcgttttcattgagaacatatttgaaagccggtataaacatgcaggggaattgatgcgtctcggcgccaaaatcaaggtagagggccgcgtcgcggtcgtcgaaggagtcccggtgctgtccggggcgccagtcgagtgtaccgacctgcgcggcggcgccgccctggtactggcgggcctggcagcggaaggggaaacctctgtcaccgccctgcaccatatcgaccgcggttacgaagcgttcgaggaggcgttggcgggggccggtgccgtgatccggcgcgaggacggaaccgtttagttaaaagcgagggacgacatgaaacaggacgtacaacatccggccggccccagcaatacagcggggggatctgaagggcgcgccaagagacggcccaaaaagaaacgaaaccgcttccatgtggtcatggcgcttttcctggcgatcgtagcggtttccatcgccctggtggtggtgatcgtggccaatctgaattttgaccggaaaggtgccggcgcgcagcccgacaccgccgccgtgttcggagtcaaatcaatatcggtagaaggggacacccgctattcacgcgaggccattacgggaatcagcggcatttatgtcggacaaagcgtgttttcggtgaacaaacggcgggcggctgagcaaatcaaagccgcgttcccctatatcgaaacggtggaggtgtctagttcatctttcgacaccatccggatccgggtcaaggaaaccgaacccatcggggcgatctacgccggcgggcggtgggtcgtggtgggcgaggacggccgggggctggaagcgttgcccgtcgaaagcgagcgcccgtcccgctatctctacatacggggggccgacccgctggccgaggagctcggcacggtcatgctggatgagcgcagcctcgccatcgtcaacgagctgcgcgcggcgtttgtgagcgcgggcctcgacggcgtggggatgatcgatctgaccgataaaaccgatatcctcctcgattggaagaaccagatcatcatcgcgctcggcaacgacgccaacctgacttatgaaatccaggttgcggtcgcctcactgcccatcatcctgcgggagcggggcgcgaccgtccggggagagctggatatccggatgtattccgaccccagcatcaccaatccgatcatctcgttcaagcccgaaaccgccggagaggaaggcgggtaaaccggcgccgccatgccggtggaaagcccgttgtaaaaccggaacgaattaccaggaattccctgattttaagcggaatttatccgatgaaaaattgcaaattccggttgaatttcagggatgggcgtgttagaataaaaaaggtatacttactacattttgctacatagaccagatgacggaacatggacgcggcgtccggaaggcccgcggggactataaaagcgtgggaggaagtttcatgagctttcagtttgacaatgaattcgtggacggtgttcagataaaggtggtcggagtcggcggtggcggcggcaacgcggtcaaccgcatggtggttgccggagtgcagggcgtggaattcgtctccatcaacaccgaccgccaggcgctctaccgttcccaggccacgcagaagatccagatcggcgagaagctcacccacggcatgggtgcgggcgcaaacccggaaaaagggcagcgcgccgcggaagagagccgcgaggaaattaccgccgcgcttaagggcaccgatatggtgttcattaccgccggcatgggcggcggcaccggcacgggagcggcgccggtcgtggccgagattgcccgcgatctcggaatcctgaccgtcggcatcgtcaccaagcctttttcgtttgaaggacgccgccgtatggagcaggcggagaacggcatcgccgccctgcgtgagcatgtggacagcttggtggtcatccccaacgaacggctgaaaatggtcagcgagcagcggatcactctcgcgaacgcgttcgaggttgcggacgatgtgctgcgccagggcgtccagtccatctcccagctcatcaagatcccgggcctggtcaatctggatttcgccgacgtgacggcggtcatgaaggacgccggctatgcccacatggggcttggccgggcgggcggcaaggaaaaagcagaggcggccgcacaggctgcgatcgccagcccgctgcttgaaaccaccatcgacggcgcccgcggcgtcatcatcaatatcacctcctcccccgacatcgatcttgaggatgtcgagatcgcctcctccatgatttcgcgtgcggcccatcccgacgcgaccatcatctggggcgcggcgttcgacgagtcgatggacgacgagctttgtgtgacggtcatcgccaccgggttcgtcaccgacggctcttacaaggcccaggacggcacggtggtcgcgcccgggcaggtgacctcaccgaacgtcgcggaggatgacgattacaccgatattctggggttgttccgcaaacgtcatgaataaggctcacgccaaagtttccggttaaaaaggcgccgcgtctgcggcgcctttttaagtagattcatagggcatcttgtgggttgccggcgcgttgtttgtataatcatgccggaatataccccaggatcgggtggcacagttcctcaaaaaccgacccctaatcctggggcggcagcccctttcttgtatataggcgggttcggctgtccgccctcccgccggctttcctgaaaagaactccggaccggcccctgaagggctctctatactggcggcactggggccggtcacccgccattgtggtgtcccacaatggccctaaaaatcaaaatacctgggggttcagggggcaaagccccctgacgtctctttgcatcctttcttcacgtggagaaaggatgtgacaaagcacacctgtgctttatggcggcatgagcgcatagaaaatcatagcttattgaatgggtttggcctgcgggccacttccttttgtcctcggcgacaaaagaaagcaaaaacgccgccggggttcccccggaccccagggatcctgtcggttctcttttcaggagaacctccccaccgttatcataaaaaccaacgatacataaggggacacggccccaggctttgggccgccgcatgttttcagtcccgcgcccaaccggaccccgggggcctcgggccccctcattgtatgggttgggttaagtgtccgccttcccgccggctttcctaaagagaaagccggctagccgcccgggggttcagggggctttgccccctgacgcctctttcccccctttcttggcgtcaagaaagggggtggccctcaggccagacctgaaaaagacgggtatggcgggttgtccgcgcataaagaacgcagtccttctaaaaaggacatcccatgcgcggccacgtcctttctccacgtggagaaaggacgcaaagagacgcttagggggttcccccctaagcaccccgaggtgatcagccggttttctctttaggaaaaccggcatgggcgcgtccgcttgaatcgacgatatttgatgaggggctgcggccccaggctttgggccgctgtattgtttcagtcccgcgcccaaccgggccccgggggccccagggttcggttggacgcgggatcattttttacgccgttatttcaacaaataagctttgacatattccacctcgacgtggtcggggagcctggagtcgtccaggccggcccacggagcggtctgggtggccacctgcatatacaggggtttggtataccgcccgaccgacgcgcgccatgtttccttgcggtcgatataaaaaataaactgggactcggtccattccacgccgtaagtatgcattccttgaaacaagtcgggatcggtcacgttctttttgatgtggcagggattgccgtccgtgtcggtccagctgatggtgtgggcgaccgaactgttgctcatgggggcggagttcaggatttccaggctcagcccccgtagctcgtcggaacggggatcgggttcggattccggatacggcttcagcccgaaggccagccaccagccgggcaccgtctgcaagcggcagcggatttcaaaatagccgtatttttgatcgaaattgttcatggtatagacggccccgcagccatagccgttctcttccttgacaatcgagagcttcagcaggttgtccgccagagcggcctgcgtataccgccaacgggtgccgtcctcgtgttcgtattccgggcagaggtaccatttgctgccgtcgagagtatcgccgccgaaatcgtcataaaaagtctgcacccatttccgctggttattctgcttgtattcggtgggggacacgccgtattgctgccggaaaaaccggctgaaggaatgaatggaggtatagcccagcatatccgacacctcggtgacggaaaggttgtgatccagaaattcccgggccttgctgattttcaaatcgttataatattccttgagggttttgttgagattttgtgaaaaaatatgcgaaatataagaataggcatacccaaagtggtcgctgacctcctttaactgccggatgccgatgatattctgctccatgtactgcacgatgctgtaaaacagcgtctccgagctgttgcgtctttcagcgggggtgtacaccaccttcgtcacctccacgaagtcccggtacagggcgcagagtagctcgatcaagagggtttcgagcaccgtttcccgcatggcgttccggctcatatattcgttgaagatattggtgaaaatggtgtacatattgaatttgtcgctcgccaggggcatgtccgcgctgtcgagcagttcacggatcggataaaacaccgacatgcgggggtcggtttcatcgaaatcgaagccgcagtagaaaaaacgcagcggggcctcgttgtccgatttgatattgtgatggtcccccgtgcggagaatgaacacgtcgccctggcgcacgtcgtaatacttgccgcgggtaaagcaggtcccgcggccggtggcaatataggtcagttcatagcattcctgcgtatgcaggccgttttcaaagtcctgatcgcagatcagatcccccacctggtgcagcaggatgggcccgaaatgcagcggcgcccatttgtggacgttgtcaaaatggaatttcacgttttgcagatacgacatgcgtttttcacccctatttgaataaatatacatattcgacatgctcccttgattatttgtcctttgatggataataccataagaagaggacaataatcaaggacatttcgctgcaaaacagcatgtattgcaaaacagcaagttttgttaagcagcatatcatgtcatgacaaagacagaggttataggattattgtatactaaatttgcagagacagcaagaagtttgtgtgaaataccgacatctggattgaggggatatgtatggtagacataaatatacgggagtttggcgcgcagggggatggactggcggatgattcggccgcgattcaggcggccatcgacgcctgcccggccggaggggtcgtcctgatccccgagggggtgttcgcctgcgcggaaatccggatgaagccgcatatcaccctccaggggacgctgacctggggataccgcgacaaccgcgagaccggcgcctgcatgattccggcccgggacgggtccgcctgcctgatcgacatcaccgacgcggtcggctgtaccttgacggggctgtccctgtgcgggcagggacggggcgaagggatgcatggcgttcaaatcgtcaaatccgacggatacggcagggaagaggacgccatccgggtggaaaagtgccgcatttcggagttctcgggggacgcactgcatttgtcccatgtctggtgcgcgaccgtgcgggataacatgcttagttcctcccgtcatggcctgtacatagacggctgggacctgtttatttatgacaattggctgaccgccaatcgggaatgcggtgctttcggggaattttactgcaatacggcgattatctgccagggcaaccgggtggaatggaatggccgggagggcatcctgtcgaacggcggcgtcacgtgggtactgaacggcaatcatttcgaccgcaacggccgggagggtgcccggttctatcacgccaagcatatcaatatcgtcggcaatgtattcgcccgggacggctggaaggttccggaggatgaatatagcgccgggctgaccatcgaaaaatcctgcggcgtatccatccagtcgaacgttttccgctcgctcgggggagacgggggcgaaaaagcgcggcattcccctgattacgacatgcagctccaggggctcgataccgcggcggtcagcggcaatatcatgtaccaggccgcggtggtgcagaacatcctcgaccggggtggacacgccaacctggtcatgacgggcaacatcggatccctggcggccgacaactgttaacgcggacagaaaaaggaggcagttcggatgaagcaccccattcgcaaagccctgaccgccattctggtgatgacactgccgttctgcggcgggctggtccccagcatccccatgcgggtgtcggcggcaggcggctccgcaagcgacatctatgccaattccatttcctcgatccccctttccgatgcggccgccagaatggccgcggcccctgtgggggggaccccgtccctccttcccgtcaccggcggaaaaaccgtcaatgtggcggatttcggcgcgaatgggggcgaccgctccagcgacaccgaagccattaggaaggctattgaatccctgggcggggcgggaaccgtcctgttcccggaaggctcgtattactgcgcagacatccgggttccctccggcgtcacgttgatgtcgatgacgacgttcggcttcgacgggaacggtgccactcagctcgtgcggaacaaggcgaatgcctcctgtatcctggatttgacgggatcgcgggatgttacggtctatgggatttcgttggacggcctgagcaagagcgcgcagtccacggtccatggggtgaaggtggtcggggcgaaaaacgttctgatcgccaattgccgcatcaacgcgtgcaacggctcggccgtgctagtggacaattccactggggtgacggtgcggggcagcatgctgtgcggcagcgcatacggtgtgggcgcgatcagcggcagcgatctgctggtatatgataactggctgacgagctgtcaccccgccggatacctggcccaatcgggagtgacgagcgccaggataacagccaaccgcatcgaatggtgcggtacgggagtactgctggaaggcgccagcggccagaccgtcgccgggaattattttgaccgctgcaacatcggtggcatccgcgcgaacggcggccgtaacctccagatgctcggcaacatcaaccagcgcaacggggtgcttcacgggacggatgaatcctgcaacctctacctgaacggagtgagcggcgccgtctaccgcggcaacgtgatggaggccatccggggagacggcagcgataccaatgtcacaccggaaaccgcgatgatcatccgaaatctgaaggacagccagatcctttataataccgcttataaaggctttacccaggatctgctcaaagactacggtggacacagcggcactaccattgagaacaatgtgggaacgaaatactgagagggtgcgggatgaaaaataccgtatacagttacgccggcctgatggaacggctcatcgacctgcccgcgctgaccaagccgccttccccgggagagaaaagcggcgcggtaacctgccgcagccggtcctgccgatacgacgaggaaaccgacacctacatcaaatggagcgttaaaaacgagccgggcgccattgcctatgaagggatagacgaacacggccgctacatactcatggaggaagacggccccggcgtgatctggcggttctggaccgttgcccacggccactataacaccgtcatccgggtttacctggacgaggatgccgaaccggtcgtggaagcgacactactggattttttcacacagtatcacgacgatctgccggtatccaatttccctctcctgcacaacatcaaccaggcccgcggctcggtcagttatttcccgctgccctatcagacccatatccgggtaacggcgacggaaccgatcatgtaccagctgacctactcccgattcccggaagggagtattctgccagattaccgggaccgatacaggaatgaaaacaccatcaccgacgcggcgatggaacgccggctggagagacgcgggcaatacgaaccgagccgaaactggcaggccgtaaccatcatcgttcctccgggtggggagctagtgctgtatgagaaggaaggagcgggggttctgcacggtctgcggtactacccggatttccggtcggacgaggaagccgagacagcgctgcggggcctgatcctgcgtatgtactgggatggtagagccaaaccggcggtttggtctcccctgggggattttttcggtaccgctcccggcctccatctgttccggacgatcccgaccgggatgagccggctggaatgctacagcgaatgggtgatgccatacggcagcgggatgcgtatggagcttgagaaccgcacggaccgcccgcagacggtccggttcgaggcggcgttcgaaccgctcgagggaaatccggattcccggctgcgcttccacgctaaatggcatccccgcgaatttctcggccgggatgaaacacgctttcttccgggtggggatcgttaccccgactggcccattcttctggtaaaagatgcctgcgggcggttctgcggcatgtcgatgcacgtgtacaacgatttcccagaaccaaaacagcaggccgcggcctggtggtacgggaaatatcatcccgattacgagtgcacggtttcctatttctggggagaagggcgcgaaaaattttttgtggacggtgaaaaagagccgagcaccttcggcaccggcacggaagattatatcggatacgccttcagcgccgagccgcctttttccaattgggacggagcctttgctgcggcgcccaatctggcctatacctgccggggacacatttcccattgccggttccaaattccggacaacatcccgtttcaaaagagctttgaggcctatttcgagaagtattccgacgatatctggaccgacggcgtcaatccggcagcccgcggatgctgctatgtggatgtcgtgagctactggtatcagcaggcgggcacggacgacgagtatccggcctatccgcatcaggcggtgaacggattttaccggctgccgccgcaagacctctgaatggaaggagccgaacgatgaaacgacaactcctgagcgggcttctttgcctggccatgctgtgtggcgccctgtttttggccggctgcaaaaccaaagacccggccgtatccgatccggccggctccggcctgtccgggtcggataccgaactgacgggagaggaaacgggggagagcggcgtgcggacggacaccaccctgccggaaggtccggccaacagcggaaacgcatccagccaaaccgtgcccgggacgaccgggacgaccggccctaccctgccgccgctggatccggggaaggaatcctccctggccacggtgaacgtcaaggattacggggcgaaaggggatggcgcgtccgacgataccgcggcggtgcaggcggcgatcgacaaggtctgcggggacggcggcgggtacgtctatatgcctgccgggatctaccgcctgaacgccgtgaacatccgggaaaacgtctgtctgtacagcgaccggacgtggaatccggacgacaagaacagcaagggcgacacggtactggtcccgaaagacagctccgtctcctgcgtggtgagcatgacggggaacggaaacaacaccaatcccgtgctcatgaatgtctgcatagacgggcagaatctcggcaccgcgctggccggggtggcctgtccggggaagagtgcggtgaccggtacctctatgcgggttgaaaacgtccgtgtcatgggatgcacgggggttggcctggacgcctcctacaacgcgatcgtgtccctgcggggcaattatatcaccggatgcgggaccggcatcaagctggtcggctgggacctgttcatcaacggcaacaccgtcgctgggaaccggggagacggcgtgctggtatcgggcgggacggcgatgaacttctgctacaaccgggtcgcgtggaacgacagctgcggcatccggttcgagggattcggccgtgtgtccatgatggggaataccttcgactccaacgcctgcccgggtgtctatttcagcggttcaagcaatatggcgctgcacgacaatctgtttatccgcaacggctgggcaccccgttccggtatggccaacgccgacacccatgtctcggtcaacgcgtcctccggcatcaatatcacgggcaacaccttcaaggccgccgccgatttcgacgtgcgcgcgccgcgctacggcatcatcggcgatgtcatgacgaattgtgtgatccagggcaacaccttctcaggggcggcgacggatcggaacatccagaccaaccacgataccaataccggctgtgcgatctcagaataacagacgagacagaaaggatggaggcaaatgaacaaacggctttcctgcatggtgtcggccgcactggcggcactcctgatgttggcgggatgcggagggggtgagacacaatccccttcctccggccagggcggcgacaccccggtttccctggatttcggaggggaggagatcatcctggcctatccctggtctctaaactcgccggacagcagtccggccgccgaacggcattaccagtacgtgcaggaactgaacgcgaagtatcatgtgaccattacggaaaagagcatcaacggttcctattacaacaacaacatggtcacgaccgtcctgtcgggcaagccgatggggcatattatgatcggctatgaccagtttgccgccgattattacaaagccggcatctttgccgagctcaacgacgccatgtcgaaaaccgggatcgattttaaaaacgacgcgatctacaaccagcttgtcacccggttctgtaatttcaacggtaagcaggtgggtttctccaacagtgtcgaggtgcaaaaagacctctggttcgtcaatctgcggatgcttcgggaggcgagtatcgacatttacggcatggtggaccggggcgaatggacctgggacaaggcggaagaattggggaaacgcctgaccaaggatacgaacggcgacggcacccccgacatctacggtatcggttcgagctccgcccagaatctggcggaatccctggcctctgcgaacggcgcggcgctgacccgccttaacggggataaccgtcccatcctcgcctggagcgatccggcggtgctcgaagccatcaaccggatgtacaaatggtgcaccaccgacaacatctgccggcccaccccatccaaccaggcctggacccaggctgccaccgatttcgtcaacgggtcctatgccatggtccaggggccgatcgattatctcagcagtttccagagtgcggccatgaaggacgatttcggcgtcatcccaccgcccaagggccccaaggcggacggcgactggtatacgtcgatgggcacggtatccttcttccagtttatcccggttacgtatcaggaccgggcggcggagctgatccagctctatcaggagctctccaagagcaccgatggcatgaccaagtcggaggcctggcaggatcagtatctcgacctggtgagggacgatcagtcgatggaatacctgatgaagctcggctttgaaggacggcagcgcctgagtctgaccagtgcagttgcggtcaattggggcgatccctccctggccgtcgtgtttgagaacatggctaagaataccacctctcccggcgcggcgatccaggaatacggcagccagttccaggcgcagatggacgacaagtggaaggacataaccctgacgggtattcagtaaatagagggaaaggatgatttggatgaagaaggctctatggaaaaaggccggcgcggtgatggcctctctagtgctgctggcgggcgtcatggtcctgccggccggcgcggccgcgctgtcggagaattttgaggaattcggttcgaccgacgacctgagtatgaactggtttggctacggggatttcatcagcgacataacgctgagtaaaaccggcggcgtcgacggctccaagggcctcaagatcgcggtggagtatgatgactcggtcaaagataaatggggcaccctgcggggctcctatgcggacgacatgagcagcaaggtggctacgggcatccggttctgggccaaggcggaccaggagggccaggagatgcaggtcatcatggtctacaacaacatgagctggaaatacgatgccacggtcaagctcagcaagaccggcaaatattatgaggtgcctttctcctccatgaagctcaattacggcaccgtcaccgtggagaacggcaccgatccgcagtatatcaacgagtggcagttccaattcccgcggaatctggaggtcggcgcggtgaatgtggtgatcgacgacatctcctacatcggggacggaccggcggtcggtccgaccgatccgcccgtcacggacgcgcccacaaccccgcccgtaaacaaaacggacccgcccacaacccctccggtcaacggagggtcgacagccccctccgacgatccggccactaccggggatacaggggatggcaccaccgacccgactacggggacatccgacgtttcggacgcggcggtggggccggcatcgaatgtcacgacggctccggatggatccagcgttccgcctccggatgaaacaggcgggctgggcacaggggcaatcgtgggcatcgtgatcgccgctgttgtggtactggcgggcgcgggcgccgccgtctatttcctcgtcatacggaaaaagaacccggaggaaccgggggatcccggacaagaatccgaatgagccggaaaaatcggtttcttgataatcagaaaggatgagtggtcaactatgttgaaaaagcccctgagcatactcttgactctggcgctccttctctcctgcgtgtgtgtgttttccgcatcggcggatcccgatccgtatcttatagacgattttgaaggatatgcggatacggcggcccttcagggaacctgggcgactaccaatggcggcacgtccgcgctcttgaccgacagtggcaaggcgatgtcctttggatacacggcttggaacgatatttaccgagcagtcgatttcagtaccgctcctgccgatgcggtcggtctcaagctgaacatcaacagtgcttcggccgtcaataacgtatccgtcaagatggggtataacaacggcgccgaatatcggtttgtgtacacgatggacctgaaggccggggacaatgaaatcctgctgccgtttgacgatgccggttggaccggagttgccggatggggatcggtggggcccatgaaacccttgagcagcgtcaagcagctgatgatctcgtccggcggcggtaccaatacgctggcgatcgacaatatccgcttcctgaaggcctccgaaatctctgacccgtatagtatcgcggatttcgacggctatgcggacaaaacggcgctggaggccgactgggagagcgcggacgacgcctccctcgatctcgacggcacgacggccaaggccggcaaatccctgaaaatcgcctacaccaattatggcaacacctacatgaagcgcctggccgacgcgctcgcggccccggcagacgcggcggggatcggcgtgtggatcaagagttcggccgccacctccaacctgaagatccgggtgatttacgggacggatgcgcaccggtatgccattcctgtgaccctcacggaagggatcaatgaaatcaaattgagctttgacgaccccgcctggagccgcgtcggaggatgggatgccgccccggccgcgatgcccggcaaaaccggcatcaccgccgtgcagttcgagtccgccggcggagcctataccctgaacgtggatgacatccgttttctcaaagaatccgaactggatggcggcggggacaatccgcctgtcgaggttcccgaagagccgacgctgcccgccgatccctacaagctggacgatttcgagggctacgccaacagcgcctcgctcggctataacagcttgtgggcggacaacagcggcggcggatgcaccgcgaagctcaccctcgaaaccggcacgggcaacgtgcatgacgggacttcgatgaaggtcgaggccagcgatacgggctggatgaccattacccgcaacggtgtcacgatcccggcagacgccacctctatgaccttctgggccagggccgaggccgagacgagcctcaagctggaattccgcctgaataacaacgactacaaatacgctcccgccgctcccatcgcggtcgggaccgaaggcgcgctgtacacggtgtattttgaagattgcagctatctgcccggcagcggcggggcggataaaggctggatctttaatgaaaagtgcctggtcaacgccatcaacttcatgcgggacggctatgacgccctgactctctatatcgacgacatctccttcggcaaggaggcgaagccggtcgatccgaacgacccggtcctcaagctccaggccgccattgaggaactgcccatggccgacaagctgacggtttcggatatcgccaggattgaagccctgtatgaggactacagcgccctttcggccggggacaaaaaacgggtggccaaccgggatctcctgctcgacgcgaaggacctggccgatacatggacggacattctcggtgacgacctggacacggtcctgaagctcggcgaggatatcgcggcccttcccgccgccgtgacggcggccgataaagaggccgtcgaagccctttggaagacctatgcggcgctgaacgccgaacagcaggcactggttcccgggagggaggcgctggaagcggcgcatgaggctctgagcggcagcccccagaccggtgcggccctgccggccggcgctggtgtgctggctctgctctcggccgcagccttcctggctctccggaaaaagaaggcgtaacgcgagcctttcgaacctccgggccggatcttccggcccggaggcttgtggggccgtggcggattcaccgccggccccgggtgcttgccacggtgtaaaaggccccgccgcagggccttttacacggaggcaggacatggcgggcaaaccggtcggcttttccgatgtcggcccggaattcctgagactggacagtggactttccgttaacagaaaggcgtgttggcatgatgcaatcctggatccgaagactgacggggatcgccgcggcctgcgtatcgacgctttgcacgatcccgctttgtgcggccgcgcctgcggccggttcggacggcgtgcaggcggccgatcttctggccctgaacgacgcgcccgattatatgagttatctggcggcccacgccggcgcctcccgtccgtccgggcggatcgtcctgacttcggcgcaggtcagcggggaagaggggagccgccgggtgaccgggtatctggatgcccggcaggaggccgtcctgaccgaggagggcggatatgtcgaatacacttttgatgtggaagaggccgggttttacaccatcacggcgaaattctgcgttccggaagggcggcatacggcggcagagcgggatatcctcgtcaacggcgagctcccttacgccgaggcggcggccgtgaccttcaaacgccgctgggtcaacagcggcagcatccggcaggacacccgcggcaacgatatccgccccatacaggaagaagaggagggctggcagtgccgcaccctcaccgatccgttgggataccatgcggcgccgctgaccttttactttgaacaggggaggaacaccctgcgttttgacgcggtacgggagcccctgattctcgaggcgctgatcctcgaggcgccgcaggagctgccgtcctatgcggagcttgcagctacttacgaaagcaagggttatgccgatgggacacagacgcccatcacgctgcagggagaggacgcggatatcaaatcggatcagaccctggcccccgcgagcgaccgttcctctcccgcgaccgtgccgagcagcccgtctaaaatacggctgaacaccatcggtggggagagctttgcccagacgggacagtttataacctggaaattcgaggtgacacaggccggtttatatacgttcgcgttcaaatggcgccagaatatccagcggggcctgacctcggtgcggcgggttatcctggataacgaggtcccctgtgcggagctgaaccaggtggaattcccctatggcggcggctggaacctcgataccctgggagacggcacgtccgattaccgcttctttctggatgagggctggcatgagatcacgctcgaggtcaccttgggcgacatgggcaaggtggtccgcctagcacagcatagcatggaagagctcaaccgcatctaccggcggattctgatgattaccggcagcacacctgacatcaatcgggattatcattttgaaaaactgattgcgggcgatcttgaagcgctggcggaacaggcggcggcgctggaatcgatctgcgacgaggtggaagccatcaccggctcccgcggcgccaatgtggcgtcggtgacggccctggcccgccaatgcctccgcttcagcaataagcctgaggatatcgccaaagggttctcggtgttcaaaaccaatttgggcgcgctcggcacctggatcatgagcatcgcgtcccagcccctggaaatcgattacctgatcgtccagcctgccggaacgcctctcccccgggcggacgcctccttcctccaatcggtttggcacgagctgcagatgttcgcctattcctttgtggaggattacaattcggtggcggataccgccgccgtggacaactaccgcaacgaaacccctttgcggatctggatcaccaacggacgggatcaggcgcagatcatcaaaggcatcctcgacgatacctttacccccctcaccgggatccgcaccaaaatcgagcttgtgcaggataccgcgatgctgccggccaccgtcgcggggagaggaccggacatcgtgctgagcacttatgacggcacgccggtcaattacgccctgagaggggcggtggcggatctctcgaaattgccgggattcgaagagatcatcggccggttctatgaggatgcgatcaccccctatcggtacaacggaggcgtttacgccctgccggtcacccggacccttccggtgatgttttaccgcaaggatatcttgcgggacctggagctggagatccccgaaacctgggacgacgtcatccagatggtgtcggtgctggcgcagaacaacatgacgttcacactgccggtgtcgacaccgaccacgcccgggaccggaacgggatcgttctacatgttcctgttccagcacggcggccagatttacagggaggacgggattgcctcggggctggattccgatgtggcgtccatcgctttcaaggaatggacgaattattacatcaactacgagttcccgaaaacctatgattttgtcaaccgcttccgcctgggtgaaacgccgatcggcatcgcggatctcagcgcgtacaacaacctgatggtgtcggcccccgagatcaagggcctgtgggattttaccgttgtgcccggaaccaggcaggaggacggcacggtcgaccattcggtagcctccacaggcacggcctgtatgctcttcacctcctgtacccagccggatctggcatgggaggtgctcgactggtggacgtccgccgagacccagacccggttcgggtcggaaatggaaagcctgctcggcgcttccgcgcggtatgccacagccaaccgggaggcgttctcccagctcgcctggagcgtggaggagtataagaccatcgaagcgcagcgtgcctgggcgcagggagtcccggaggtgccgggcggctatttcacctcccgtcatatcgacaacgccttccgccgcgtgacctactattgggaggatcccaaggacaccctgaccgattacgtctataccatcaaccaggaaatcaccggcaaacggaaggaattcggcctgccgtatgtcgaacaggagaggggaggcaaagcatcgtgaccaaaaccattcccctgcgggcggccccgcggaagaacggcctgctccgccgcaaaggacgggaaatcgcgaaaaactgggacgcctatttgttcgccgccccgtttttcctgatcttcatcgtattcaccgtgctgccggtggccatctcgatcggcctgagcttcacctattacaatatcctgcaggcaccgagctttgtcgggctgcaaaattacttcaacctcttcctgaacgacgataccttcctcaccgcgatcaaaaacaccctcctgatcgcggtcatcaccgggcccattgggtatctggcctcctttttgtttgcttggttcattaacgagctcaaccccaagctgcgggcgttcatgatcgtcgtgttctatgcgccctctatctcgggcaacgtttatatggtctggtccatcctcttttccggggatacatacggctacatcaactcgtttttgctcaatatggggatcatccacaagccggtggaatggctcaccgatccgaacaccatgctgccggtcgtcatcatcgtgatgctgtggatgagcctgggctccgggttcctcgcgttcgtcgccggcttgcagacggtggacaaatccatgtacgaggcggggtatgtcgaaggggtcaaaaaccgctggcaggagctgtggcatatcaccctcccctccatgaagccgcagcttcttttcggcgccgtcatgtccatcaccgcggcgttctccgccggagacgtcaccagcgcgctgtgcggtttcccctcgacggattacgcggctcataccatgatcaaccatctcaatgattacggcaatatccggttcgaaatggggtacgcctgcgcgatcgccaccctgctcttctttttgatgatcggatgcaatcagctcatacagcggctgctgcgcaaggtggggacctgatgcggatcccccgcggacagcccgtcttgacggcttgccgccggcggagaaagcttgtgccccccggtctccggctttgatgaaaggaatggtcatcctatggcagccaaaaccatctctctcagaacccggcggaacagccgcctgcacgggcgctctcgggccggaaatcttctcaatttcctgtttctggccctgatcggcgtgtttatggcgctgcccatggtatatgcggtcagcagcgctttcaagcccctcgacgagctgttcctgtttccgccccggtttctcgtccgccggcccaccctcgacaatttcagcgacctgttccggctgatgtccacctcctgggttcccttcacccggtacatgttcaacaccgtcatgctcgccgtgctggcgacggcaggaaacgtggtgatctgctccatggcggcctatatgctggaaaaacggaaatttccaggctccgggctgatgtatcagacggtggtgctggccctgatgttctcaggcgcggtcaccgccattccgaactatctgattatggcgcggctgaactggatcgacaactatctctcgctgatcgtccccgcctttgccacccccatcggcctattcctcatgaagcagttcatgggcatcgtccacgacagcctgatcgaatcggccaagctggatggggcgagcgaatggcagattttctggaggatcgtcatgcccatcgtccgccccgcctggcagacccttatcatcttctccttccagtccacctggaatatgaccggcggcacttttattttcagcgaggagctgaaaaccctgccctccgcgctcagccaggtgctgcagggcgggattgcccgcaccggcgtcagctgcgcggtggcgctgctgatcatgatcattccgatcgtggtgttcatcgggtcggaaagcaaggtgctggagaccatgggcacctccggcatcaaagaataggaaaggggggagtgcgttgagtcggaaatacctgcgtttcgcggtggtgctcgccctgttgctgggcctgtccctgccggtggcagccgaagcccctttctatgattacacctatgacgaatggggggatccggtaggggcgccgcgcgcctacgacctgtttcaggtggcggacgccgcggtgatcggcacggcgctcaagggcccgagcgacctgtgcgtcagcggggacgagatctatatcgcggataccggcaacaaccggatcgtggtgttggactccgggtttcgtagggtccgggagtggaacgggaccgacagcccggacggtcggctggattttgcggccccggagggggtgttcgtcgccgaagacggccgggtgttgattgcggataccgggaacgggcgattggtcgtcaccgaccgggagggccgttttttggacgtatacggcgcgcccgtcaccgatatcctgccggaggacttccaataccgtcccattaaggtcgccgccgacaaggcgggccgcctctttgtcgtatcccagagcttcaacatgggccttctgcaattcgaccgggagggccggtttatccagaccctcggggcggccaaagtccaggtgacggcgttcgacctgctgtggcgcctcatctccacgaaggagcagcaggaacggatgcagcagttcgtgccgacggaatataacaacctcgctgtggacgaggacggatttgtttacgcgacgacgtcgatctatgaggaatacaatatcgaggcctacggcttgaccgcggtgcggaagctcaacgcgtcgggcaacgacatcctccgctattccatgccgctcggagagctcgcctatacggtgagggggcaattcgccggcccgtcccggatcgtggacgtgtatgccggtgagaacggaatgttcagcatcctcgacgccaaccgcggccgggtgttcacctatgacaacacggggatgctgctctacatcttcgggacctatggggacatgggcggggcgctgaagaatccgcgggccatcgacaagtcgggggatctcttcctagtgctggacgggtcgaaaaacacggtgacggcgtattcgcccaccgcctacgcgcgcagtttcgaccgggcaaccgcctaccactatcaagacgagtatgagctggaggcgcaggaatggaggactatcctgtctctgaacggcaactccaacatcgcgtataccggcctcggaaaggccgcgttccggaccggccgctatgaagaggcgatggaatatttccacaaggcgggtgaccgcgccaactattccaaagccttccagtaccggcggcgggaaatcattgcggacggcttcatgtgggcggttccggttttcctggccgtcctggccctgctcgtcgtcggcgtcaagctcaagcgacgatattgtccggcccgcgtggatccccagtccttccgcggcaagctcgcttttggccggtatgttgccttccacccgatggatgggttctgggatctcaagcgggaaaatcgcggcagcctgcgggtggccttgctctttaccggcctgctctgtgtggtgatggtcgcgcagcggcagctgaccggcttcctattcaacaccgccaatatcaaggagctgaaccttcttatcgaaatctccaaagtcctgctgcccttcggcctgtggtgcatctccaactggtgcgtcacctccctgatgcagggggaggggaaattgcgggatatcgccaccatgaccggctacgcgctccttcccatgctggtgctgaacacggtggggatcgtgctgtccaacctgatgaccagcaaagagggcgatttctatttcttctgcgtggcgctgggggccctctggagccttgggctgatcctgctgggccaccagcagatccacgactataccctggggcgctccctgttcgtcacctttctgaccgtggtggtcatggcggtcgtggtatttctcgccatcctgcttatcgtgctgctccagcagatgatcgggttcggaagcgacctgctgaatgaaatcttttaccgggtataaggagggaaagagcagatgacgaccaaacgcttatccctttctatcctcgccgcgtcgctggcgtgtgtgatgcttctgggcggttgcggcctttcttcggccattgtggaggggctcagcgaagagcatttcatttatgctggcaccaccccacacgatccggaatctcgggagttccgggaggttctttcccgggacggccttaccctgtatgtcaacgacaagaccgccgagatcgccgtgcgggataccgccggggtgatgtggtattccaatccgcaggaacgggccgccgatcccgtggcatccgaagaaaacaaggataatatgtccgcgcaggcccggatcgtctacagcgacagtaccggcaacgtccggtcaatgaatacctataccgacgcggtctcccgaggacagttccggatcacggccgagggggataccctggctgtgcggtatactctcggcgcggtggaggaaaagaagctcgtccccatcgtcgtggaacaggagcggttcgagaccctcattctgaaccgcctcaccgacacgcagaaaaagactctcgaacggtattacatgctggtggacctcgacaacatgcaagaccagaattaccgccgggagctggaggtcaaatatcccgcggccaaaaaagggccggtttgggtgctgcggaacaatccgcccgccccgaatatcgaggataaaatccacgagatcgtcgtaatgaccggatatacccgggaggacctggaggcagacaacgcggccaatcaggtggcggactccggccccgacatggtgttcaacctcgtcatccgctacaccatagaggacggccggctgctcgtgaccctgccggccgacgagctggagatgccgacggactatctgatcgagcgggtgtgcctgctggagcatttcggggcggccctaaaaggctccgacgggtacctcctgcttccggacggctccggctcgctgctctacttcgacaacggcaaagacaccctcgccgcatactcggtgccggtctatggacgggataaagccctatatatggaggagaatccctataacgcggacggggtcaatctgccggtgttcggcctgaaaaatggggcatccgcgtttcttgcggtgattgagaaaggggatgcgcttgccaacgtgggtgcccggtcctcgggctctacgaccagctacaataccgtgtacgccgaattccgggtccgggaaaaggcggtgcagaccatcggcggcactgacaacgtccagaacatctatcagcaggaacggtataagggtgcgttttccgtcagctaccggttcctgtccggcgaggatgcagggtatgtcggcatggccaaagcctaccgcgccaccctgttcgacgggcagagtgcgccgatacgggaaaaacgcccgctgtatctggagctgatcggggccatcgatgtgaccgaaaatgtggccgggatcccggttgggaaaacacgggccctcaccagctttgaggaggccgccgccattctggaagagcttggtgcgtcgggggcggatctgtcctccgcggtggtgcggtacagcggcctgtggaacggcggcatgcggcagggatacgccgaccggctgcatgttgtgggagcgcttggcggtccggaggggtttgcctccctgcgcgataccgccgcggccatgggtgccgcactgtatccggatatcgatcttcaatacgtctaccgcaattcccccttcgattcgtataacgtcaggcgggacaccgcccgttttctcattcgcacgacagcggcggtttatccctacaatccggccacttttgcgctggacacgcaggccaggccgcggtatctcatcagcccccgccgttacggctccctgttcgcctcgttcggaagcgcgtatgccgcgttttcgtgcacgggagtgtccctgcgcagcgtgggacgggatctggcggcggattatcgggagggtcaggtcgtcgaccggcagaccgctctggacggcctgactgaagccctggacggccttgacgcctattccctcctggtggaaaacggcaacgcctacaccctgccgcgttcctcccatgtcgtggaactgccgatggattcctgcggatacgatgccaccgacgaaagcgtcccgtttttacagctagtcgtcagcggctgtctgaactacgcgggaaaacccgtcaacctgacggcgggcagccgccgcagcttcctgagggctgtcgagacaggcgcggggctgtcctacacggtgacggccgccggcagcgacaaggtgcgggacacggactatacccgctatttcgcctgcgcgtgggcggatgtcaagccgtctttgctcgaaacgttggacgaggcggcgccggccgcgccgacggccggattggaaatgaccggccatgtgaagctcgcggacggggtctatcagacgaccttctcgaacgggatgcgcgtcgtggtcaactatatggggcagccctataccggaccgggtgtccatgtggaagccgaaaactatgcggttctgtaagggacggacgccggccggcctgcgcccccgatgccgcaacatttgctgcctgctaaagaaagggaagggatctgcctgtggctaaacaagcaaccaagcgccgcaaccggtcgcttgaagtcaagcagcgccggatggggtacgtgttcgtggcgccgctgattgtcgggatgctggcgttcgtggcgttcccggtaatccagtcgctcttcttcagcttcagcaagctgaacgtcgtggcgtcgggctatcggctggatttcctggggatcgagaattaccgctatatcttcgccgtggatccggatttccgtacgatggtgctcggttccctgcgggatatgctgatcaacgtgccggtggtcatcctgttcagcttttttgtcgcgagcctgctcaaccagaagttccatggacgaagcctggtccgggcgatcctgttcctgcccgtcatcattgcgtcgggtgtggtggagagcgtggacaaggcggacgcgttcagctccctgctctcctcgggggcgcagacggcgggggcgtccgcggtgggcgaacagctctcggaaaagctcatcgtgtacttacagcagctcaatatcagcccgcaaatcacgaatttcatcatcgacaccgtctcgcgggtatacgatatcgcgatcatgtccgccgtacccatcatcattttcctcgccgggctgcagtcggtctcgccgtccctgtttgaggccagttacatcgaaggagccaccaagtgggaggtcttctggaaaatcagcctgcccatggtgagcccactgattttggtatcggtgatctactgcatcatcgattccttcaccaacgtctccaatcccgtcatcagccgcatccattcctctgcgtacgattccctcaatttcgggctgagttcagccatggcatggagctatatgctgattatcctagccgtgctggggatcgtgtacaagctggtgagccggttcatcttctatcacgaatgagaaaggagcaccgatttatggaagcgatggccagaaaagggcggcttcccgccgagcggcggcaggcggcggcccggagggccggcctggctgcctggagcattgtccggggtattctgctcgcgggcatctgcttcgtcgtcctgttccccctgttttccaaagtctcccgctccttcatggcggtagaagatctctacaacctgaccgtgcggtacattcccgcccatttcactctgcagaactaccagctgatgtgggcgtggatggatatgccgaaaaccctcttcaccaccctggggatttccttgcttgtggcgttttgtcagacggcggcggccacctgggtgggctacgggttcgcccggttcaaattccggggccggaatgcgctgtttatcgggttgatcgtgtgtatggtcgttccgcccgatctgatgctgatgccgctttacctgattttccagggcctgcacatgatcgacacccccctgccgttcgtcctgatgggactgacctgcacggggctgaaaaacgggttgtacgttttcctgctgcggcagtatttcctggggatgccgaaggagctcgaggaggccgcctatgtggacggcgccggaccgctcaaagccttcgccaccatcatgctgccgggcgcggtgccgatgatggtgacggtgttcctgttttcctgcgtgtggcagtggctggacagcctgtattcctcggtgtttttccaggagatcaagaccatgacctcggccctgaccgggctcggccacgtcaacgatatgacgggcatgggggtttccgacccgatggcgatcaccctgatcaagtacgccggcatcgtcctgctcatcctgcccatggtcgtgctgtatctgttctgccagcggtattttgtggagagcatcgaacggagcggactggtcggataaaaagaggaaaagaggggatctgatggctcaaaaagagatgcggatcgacaaaccgtatctgaatctgccggtccggccggacgcgcccatcgcctgggtgaactgggaacggccggacggcggcctgctttatgagctctacgccgagctggattttgatgacccggcctattatgtaccctgccatgtcgaacgctggatgggggaaaccctccggcttcggatcgatgctgtttccgaggaacggttggaggcgctcgtctgtgaggataagccgcgcacctggacgaaacggccggacgacggccggccgcgggtgcattttaccccattccgcggcgtcatgggggatcccaacggcctgttcgccctggacggcgcgtatcacgcgttttaccagcacaatccgtacggtacccagtgcggagattggaccgaaacctgcaatttcggctggtcgcccgcggtgagcaccgatctctgccgctggcgtggcgggcctccttttatga

SEQ ID NO: 3584 - DNA, 3604 bp, Unknown
  16S sequences of unknown bacteria
atgtctctgagctgtcctggcgccggatcaagaacccggcagaggtggtcaaggtcggcgacgagatcgaagtctacgtcatctccttcgacccggagaagcggaagatcagcctgggctacaagacggccgagatgaatccgtggaaccagtttatggaaaagtacgccgtgggcgacgttgtcccggtcaagatcgtcaagctcatgaccttcggcgcatttgctgagatcattgacggcgtggacggcctgatccacatctcccagatcgcggaccgccgcatcggcaagccggaggacgttctgtccgagggccaggaggtcgacgcgaagatcatcgacatcgacgccgacaacaagcgcatctccctgtctatccgcgccctgctgtctgacgaccgcgacgaggaatacgacgactaattttaggcgcagacgcgcgcacaaagccggggctctgccccggctttgcggttcttgggaattgtttgcatagcgttacggaaggggaatactatggtaaagcacattgtattttacacgctgcgtgaggattgcgacaaggctgcggccattgcggagatccgggcagcgttggagccgctggcggggcagatcccggggctttcctgtatgcagatccgcccgatttgcaagggcgggtatgactacgccctctattcggaattcgattccatggaggccctggcagcgtatcagcaggacccgcggcatctggcggtcaagcccatcgtccatgggtatatcacgggccgggtctcggcggatttcacagtgtaacgcggaggaggcggaggcgatgcacgtttgggggcatttcaagacgattacacgccatcggcatatcgtccggcatctttgctttcaggtcggcctgtactggcaggggctgacacacgacctttccaagtattccccggcggagttttgtgtcggcgcccggtattacaccggcacccgcagccccaatgccgtggagcggcagaagctgggctattccacggcctggatgcatcacaagggccgcaacaagcaccactacgaatactggacggacctgtgcattccggcgaaggtctacgggccggtcccgatgccgccccggtacctggcggagatggtcatggaccgggtcgctgcgtgcaaggtctatctcggcacgcagtatcacgacggcgcggcgctggactatttcaacactgcccacgacaccaccttgatgcaccccgagacgggggaaaagctgcggtatatcctgaccctcctggcccaggcgggggagcaggcaatgctggcctttgtccgggattatgtgatcccagaccggccctatccgccgcttgccgaaaaaacattaagggaagcgaaaaaagtggaaaaatgtagttgacaacagcagatggatgtagtatactacgatccgttggtgttgattggagtgagggtccacctgttcccatcccgaacacagaagttaagcttactttcgccgacgatagttgccgggcgactggccgcaaaaataggtaacgccaacacaataaccggtctgccaaaaggcgggccggttttttatacctgtaagcgttggcgccggctcggcgtggacggccgatgagcgttcggccggttcctgttcggcggggggacgcgagcaaatcggcagcgccgcaggcggaaaggctgcgggccagaacaaggcgcagcaggcgtgcggtcgttgtttcattcgcaatgctcctttctgcttctctgcattggcagagaaccccataaattctctccttttccagtgttgtgcagcggccggcgaatcggcaatggcaacgggggtcaaaatctcagattgtgtccctcacgtttatacagcggcgccgcgtttgtgtgcatgtgtcaagatttcttttttgacacacgcacgtatcgatttaaggtcgcgccgtagaagaagatacacatacagaaatagagccagagcatggtgaaggcgacgatggagatgctgccgtagatggacgacgcgccgaagcgctttacatagtgggagaacagcccggagaagatgacccagccgcagctggcggcaaggctccccggcagcacctggcgcagtgtgctgcgctggcagggaaagacgagatagctggcgctgaaggcgaccagcagcacgaccccggcgacgaaccagcggtagtgcaggagcgtcgagagcagccggtacaaaaccgagccggggagcaggattttgcttaaaaagctctggctgacggtatagagcatgacggtgatgagcaaaatcgccagcacggcggcggtatagagcacgcacagggcccggacgagcagatacggccgggtctcctgcacccgcagcgcctggttcagcccccgaacgagaccgtagacccccttcgacgccgaccagaggaggaagaccgtcgaaagagagagaatcccggcggagttggagcgggagaggtcggataagatcgccgtcaccagcggctccagggcgtcgggcacgatgggggagagaaaattcagaatcccatccatggagacggtggtatactgggtcaccgagagcagaaacagcagggcggggaagagggagagaaacaggaagaaggccgcattggcggcaaaggctggaatttgcgcgcctgcaagctcccgctgcacggcgcgggcgatggttttgagtcggttcatggcattcctttccgggtacaaaagcggcggcgcgtttttttcgttgatttttgccgcctgctgggatataataaagaaaaacgaaggaggttgctcgtatggctgctaaaattgaaaaatccaccattattggtgatgttctggatatcgcaccggagacggcgcccctgttccaggccattgggatgcattgcctgggctgcccgtctgcccgcggcgagacggtcgaagaggcctgcatggtccacggcgtcaacgccgacgatttcctgaagcaggtcaaccatttcctggaagcggtcgaggccgctgcgcaggaataagccgcgagaaacggaaacacaagcactcaggcggcccgtgtggccgcctgctgcttttctacggcgtttcgcggggaacgagaaaaggagaagaaaaacgtgcaggtaccgatttccgcgcggctgttgtgctgcgctgagatgatcgcccccggggcccgggtggcggatattgggacggaccacggctatttgccggtgtatctgctgcgcgcgggccgggcggccagtgtcctggcgacagatctgcgccggatgccgctggacaacgcccggaaaaacgctgcgcggtttggcctggcggggcgcatcggctttgtccagtgcgacgggctggcgggggtctcgccccgggcggtcgataccgtcgtctgcgccgggatggggagcgacctcatctgccgcatcattggcgacgcgccctggctgcgggatgcgggctatacgctgatcctgcagccccaggggacggtccatgatctgcgccggtggctgcaggccaatggctttgccatctgccgggagacgctggtgcaggacggcggg

SEQ ID NO: 3585 - DNA, 29289 bp, Unknown
  16S sequences of unknown bacteria
aacgaggttgtcgatatcgctttcgatgaaattggatacgcccgcggtgactaccgcgcccgacgaaacggcggaaagaagttcgttaaaaacagcggcgttttctttttcgtagcggtaaggaaatttatcgctcatttcccgccagggtttgggcgcatggataagcatgaggtcgacgtaaccaagcccaaggttgtcaaccgagcgcatgatatgttcgcgcgcgccgtcggcggtctttatttccgccggaacttttgaagtgacgtagatttttttacggtcgataccgctgtcgcggacagctttaccgacggacttttcgttgccgtaagcaaaagccgtgtcaatgtgagtgtatcccgcgtcgagagctgcgcgcaccgcattatagcacacttctccttcgggaatctgccacgtccccaaccctattgcggggatagatgtaccgtttttgatattaaaagactgagataaaacgtttttcataattaaactatcttctttatattaataaaaattatatgatttcaaactgtcgcagcagtaaaatttgagagtgagtatttttttaccgaaaaccgacgaataattgcgtatttaccgcatttatttttacatgaaaagcgtcaaaccgataagaaagaaatcacggttaaaagacaaagctgaaaaattcaggtaaacgtatcggtcaagaaacgcaaagggaaagaaaaaccggacaaaaattataatgtagaaaaaaaactcagatttcgtgattaccgtcgttaatgaacagaataccgattgtgcctttaccgcaatggctggtgatggtggcgctggcgatagtctcgtaaacttcggaaaaagtaaaatgcttttctacctgggcgcgaatttttgcgacaacctcggggtcggcggaagtatgagtgatgaaaatgcgcttaaggtcgggattgggatacatttcgaagatgttgtccacgtatttatccgcgatatttacggaagtgccgcggaattttttacccacgacgattttgccttctttaagtaaaagcgagggtttaagcttaagcgcggtggcgaaaaacgaagcgagaccgctgcatctgccgcccttataaagatattccatggtgtccacgaaaaaggaggcttccacgaaaggaacgcgcgccgtaacgaggtcgtatatttcctttgcggagtatttgccgctgtcgcgaaggtcgcaggcgtacatgaccagaagacccgtgcccgtggaaagcgacttgccgtccacgacgtacacgtttttaaagctttttgccgcgatggcggcgttttgagccgtgactgaaatttcgcccgaaatggtaaagtggataaggctgtcctcgtccgacttgattatcgaagaaaagaattccttgtgctcttccacgcttcttgcggcggttttaggtagaatgttgttttttctgacaaaggaatagatatcatcgggagtgatgtccacgccgtcaaagaaagaattttcacccagaatgaccacgagcggcagtgtaaaaacgtttctcgttttataaagagagttaaggtcggaagtagaatcggaagaaatgtatatcataaaaaaatctccttaatgattattgtttacggaatctgattttgtgtagaaaaacgaaaagaacttatcgaaaaagccgccttttttaaggacggaaaattcccttcctacaattgacgaacacttgaactgtccgtaataacgcgagtctttactgacgttgcggttgtcgcccaaagccacgaagcagctgtctgaaacggtggaaaacttttctgacgaaacaagatcgtcaagactgtcggcaacggtaaaagctttgaagattctgtcgccctcgccggaagaagacagcgtatttatgatcatgggttcttttatataaggctcgttaattcggacgaaaccgttgccgtcgcctttatccagatacagcgagatataatatccgtcaaaatactgttcctttacaaagccgatgcggtcgccttccaccgccactacgcgttttatgagtctggtgtttacggcgtcgatgaccacaatgtcgccgcgcttgggggaagaatacagcttatcgatgaccaccgtgtcgccgtcgtgaatgttgggggccatggaagagccggaaatttccacaggttctacggccaaatacatggcaagcagcagaatcataagcgcgataactacgtttaccagaaaggaaacaacgcgttcgaacttatcgcttttttcgtccgacaaagtccggcacaatagaatttcgtaatcgtaagatttcaatctgtctccttaataaaggcggaaaggacggatttgacggatttaactgctttatccgacggcataagcacaattttgaggcacttgtcgcaccttatttttacgtccgcgcccactctcatgacagtccaaaggtcgcagccgcaggcatgaggcttttttgtgacgactttatctcccgctttaaatgtaatcatatccataaaagcgagtttataagcaaagtatcctcgctgctgacggtaaaagaaaccgcgttatcccacccgtccatgggtccgtcgggggatttgaagtcgtcgacggaaagcgtaattttactccattcgtcgaaagagtccgtctttttggacgcaaaataagtcttgtagcccgattccgtatggcaggtaacttttatcataagcgtctgcatacgggcggaataaatcagcatctgtaaaaggctgtcgcgttccccgcaggtgtgcacgtcgcctattttcagagtggtaagcgagtttacggagcttgttacccccgtcacgcccaaagagccttccttcagcgaaatttcgcccgaagtattgatattttcggtaataagccaatcgtccacgcccatttcggtgtcgtagacaagccttgatttgacgatttcctttgcggcaacgcccataagatagggcgttttggtttcgatgccgcccgaaagaagcaatccatttttgtattttacagtaacgtaagccgaagtttccgccttaagcagataaacgtccgctttagcgatgtattcgttttccgacacgcgctcgaggttaagccgcgaccagttgcggtattcgcccttttcggtgccgtaaaaataataaagcttaacggcttcggcgtcctgacagtcgcttattttaacttcgtaataaagcgcgcggtcgctgtttttggcggtaacgacgggcggcgcgggcagcggagcgcatgaaaaacaacggctgttgagaaacgatacgatactgtcgcgctgaattttgtttagagtgttgtcggagtgttccgccacgtaaaatcttaccgaatccgacgccgcgcggtaaaggtcgtcggtataaaaaagcgaattttcgcggttattgctgctttcaacgatgtaaaaaggcacgcttacgaggggtgcgtaagcggacggagcaagacacgtgttgtaaaccatggcgtcgtcgaagtccgtgtccagaccctcgatataggaggaattgaacaaagccaccgcacaggccgcctctttcattacgtaagcggctttataaacctgtatggcgccgcggcgtacccccataaagcagatacggcttttgtcgacggaaggcatattttcaaggtagacgtaacccctcagcatgaccgaggcgtaaacgtaccagcaggaaactttgggattgtcgggaagcgaataaaagccgctggtttccgtatagtaatccgcgcggttaagcgaccgggggtaaatggtgaacctgccctcggtgcgtttacccgcataatcggggacaagcacggtgtagccgcagtcaagcagcatttcggtataagtggtgtcgaaaggcgtttcgatatcgttcataagcacaaccgccgcgcccgaaggaatggacgcggggacataaacgcgcgcgtaaatgcgcgtgcaaccgtcgcccgttgcttcaccgttgaaataaacgtgttttacggaatatttttcgttatattctgtgataagaaccgtttcgtcgagaggaatgtttctcgggtcgtaatccttccacagcgtttttgcggtaataagctccattaacctgcctttgcccgtaaaaaacagggcaccgattattattctattatataataccgaatttgtcaagcggcggcaaaaaaagccgttatcccccgattttttgcgcccgatggcaaatagcgcgtcacgcggtcaaagccattttttaaaaaagttttgtgactttaccgaacgaacacgcgaaaaccgcgcaaaaaacagttttgtatcgcatattctcttttcataagtatcatcgcaaaaacagcaaaaccttttccgtcggcgccataaaggaaacatgaagaaaacttaacgcgaaaaataattactttaaaaattataactacttaacggtagttaaaattcaagcctctgctccgctgacagggacatagcaagcggaaacaaggttaacaaagcaaaatttgtttcgcataaacgccgcgataaaaggtaaagcggcggaaaaaaaggttaagtcagcaaatttataaaagacgcgtaaagcagcggcgcgtaaaagcttacggaatttaacaagtgaaaaacaggattaataagtcgccgccggcatcaaagcggaagcgtgatgcaggcggaattgtccacgcccatgtccgtgagatcggttttatccctgccctcgcccgcgagatagcggaaagcgcgaatcgtgccgctgtgagtgacgaccagaacgtttttgcccttataattttctttaaggaaccgcataaaagagccgactcttgaaaaaaggctgtccaaactttccattttcaatctgtccgcgtcgtaatcaatatgccagcgcatattgaattcgggctgggttttgtgcgtttcgccctcgaggtagccgtaatcgcgttctctgattctggggtcgacggtgacggcgacggggaaaggatttttttgcaatatgcaggaaattgtttcttccgtgcgatacatcggggagcggaaagcggcgtcgaatttgacaaaggacagtttatcgcccaacgcaagcgcgacaagcttacccgattcggtaaggtgggcgtttatgttgccgcacataagacctcttttgttgaacgacgtttcgccgtggcgaacaatgtaaagcataaaaacagttaactcctttttatttcggtaaaattatataataaattcggcttgcaagtcaatcataactcgcttttaagcagatttaaacgaaaaaaagcgaacggctgaaaataacggcaaaaaagaattgatttatgatataaaatatgataaactacccgggtaaatgtttttgagaggaggaagttatgctcgagataaaaaacgtgactaagacttaccgtcccaaaaaaggcgtacccgtaaaggcgcttgacaacgtaagtcttaaattcgaagacaaaggaatggtgtttatcctgggtaaatccggaagcggtaaatccactcttctgaacgtattgggcggacttgaccgcgcggacgaaggcgaattcatcataaaaggaaagtccagcaatgacttttctcagtcggacttcgacagttaccgcaacacgttcataggcttcatttttcaggaatacaatattctgcccgaatttaccgtgggcgcgaacattgctttggcaatggaactgcagggcaagaaagccactacggaagctttgaacgaaattctggaagaagtggaccttacgggttacggcaaccgtaaacccaacgagctgtcgggcggacagaagcaaagggtggcgatagcccgcgcgcttataaaaaagcccgaaatgataatggcggacgagccgacaggcgcgcttgactccaatacgggcaagcaggtattcgacaccttaaagaaactcagccgcgaaaagctggtgctggtggtgtcgcacgaccgtgattttgccgagctttatgccgaccgcataatcgagcttaaggacggaaaaatcatatcggacgtcagcaagacaagcgtgacgcccgacgttgtcaatgacggcgtaagcgtggtggacgacaaaatcatccacatcaaaaagggttacaagcttacggaaaaagacctgaaattgataaacgactatatatcgaaagccgacggcgatacgcttatatcggtggacggcgacaagaacgaggaaataaaaaaggtcgttaaaataaacgaccagggcggcaaggacgaatttctggacaccaagcccgaaaacgtcaagcttaaatcttacaccaaagaggatagcaagctgatacgctcgcgcctgccctaccgcaactcgtttaaaatcggcgcaagcagtcttaaggcaaaacccgtaagacttgtgtttacgatattcttgtgctttgtggcgtttacgctgttcgggcttgcggacacgatggcgtcatacgacaagataaccacttacgagcgcagtataaccgactctgcaatcgaaagcgccgctttcaccaaaggaaaatactattcttacagcggaggcggcggatataccgacaatcgcctgcttaacgacaaagacatcgccgtaataaacgaaaacagcggagtaaacgttttacccgtatacgtcgacggacaaagatacagctccggcggggtgaatttttcttccagcttgctgaagccgggcgcgctggaaaacgaaaacggcagcgagttttacacctctaccgcgtcgggatttacggagataaatcaggagtctttcgacaaaaccggacttacgcttgcacagggttcacgattgccgcaagccaaaaacgagatagttatcaccaattatatttacgagcattttaagtacgcgggacttacctatacagacccctcgacgggcgaaaccgtcaaaatcgaggcggaaaatctttcgaccccgcaaagcgtacttggtaaatacatcagtttttccgacagatattcgggaagcaatatgacgtttaccatcgtgggcgttgcgcaaaccaatttcgactcttccaaatacgaagcttatatgcccggtgcgcaaagacaggattccggtatgctggaaatggttactttgcaggaaatgaagaccaagcttacttacagctatcattcgctttgctttgtgtatcccggagtgatttcggatataatcaagagcaccgcaaccggcagaaatcaatcaccgataggaaaagatatttccgacagcggaaacttggcgcttaacggcggaaccgataatttttattcgttcagcgcggtggcgaaacttgaccagtttaccgaaaaagacgcaatcgtctggacggagggcgaaaaaacaacgcttgccgcgggcgaaatcatagtgcccttctccttcagctacaattacaacaccggcgaaaatcagggcgacagaatgttaagcgccgaatccgtagattacatcataaacactttcgggtttggggacagacaggaagaaatcgaaaacgccactctttatcaggttgtttacgatctcggtgtttgggcggcggaaaaatacgttaacgaaaacggctatcccgacagcgaagacttccgcaacatggcaaacgcttactggaaatatctcaacggcgggatggaagattacgtccttaccgacgaaaattacaggcaggtatataaaactttcctgcaagccaaagactttttcactgacgaaaacaacgtatattatgcgggcggatttaccgtcaacaaatacggccctgccggctatacgttgatgcgtccttatttaaaggaaatattcgcgcttgaaggcgtgacttcgcaagtcaacgcgtcgggcaacgtggacctttcttccatgtacgatcacagtaaccatatttccgaaagctacagggtcgtgggttactacttccccactgcggaggcttacagcagcgtagatcagtacggcaatccggttgtggactatattagcacgaacgttttgcccttaatcgtccccgattcgtattacaacttctttgaaacggaagacgcgggttattactccttcgcgataggtaagctgccctataccgacgccgccgcggtaaagaaaatagtcaaattcaactacaccgcatttgacggagatatttattacgagcttaacaacgaagtaagctttatgcttaacaacgtcaacagcctgattgaacagcttgccaagattcttctgtacgtgggcatattcttcgccgtctttgcttcgctgatgatgtacaacttcatctccgtgtccatctcctacaagaagcgtgaaatcggtatcctgcgcgcggtgggcgcaagaagcagcgacgtcttcggcatcttcttcaacgaaagccttatcatcacgataatcaacttcattttgtcaagcatcgcgacgttcgtggtggcgtttgttgtcaacggcgtgataagaagtcagtacggctttacgctgacgctgcttagcgtgggaataagacagttcgcgttaatcctcggcgtaggcgtgctggtggcctttatcggcagcttcctgcccgtaatgcgcatcgcgagaaagcgccccatcgacgccatccagaacagataaaagctttgcttggcggaaagcaacctttgttgtttttgcggaatacggcgtaaaacgcacgccctgcccctaaagacaaaaatttcgggtcgccttgttgcaagcgaaaaagcaatcttaaagtaaacgtaaagccgaatacatccgcaggggttgtttcccctgcgacataaaacagatcaaaacaaaaaactttaacgcgcgtttacttaaaaaacaatcaataaaaaccgctttgacgaatacggtcgaagcggtttttttataaaatcaaaatacattaaagttataattgaagtacatattgaattttaatataaaatatgttataattttaacacacggtaaaaagtgaatatggaggaagttatgctcgagataaaaaacgtgactaagacttaccgtcccaaaaaaggcgtacccgtaaaggcgcttgacaacgtaagtcttaaattcgaagacaaaggaatggtgtttatcctgggtaaatccggaagcggtaaatccactcttctgaacgtgttgggcggactggaccgagcggacgagggcgaatttatcataaaaggcaagtccagcaaggacttttcgcagtcggatttcgacagttaccgcaatacgtttataggatttatattccaggagtacaacattctgcccgagttcacggtaggagcgaacatcgcgctggccatggaacttcagggaaagaaagccacgacggaagcgctgaacgagatattggaggaagtggacctgacgggatacggcaaccgtaaacccaacgagctttcgggcggacagaagcaaagggtggcgatagcccgcgcgcttataaaaaagcccgaaatgataatggcggacgagccgacaggcgcgcttgactccaatacgggcaagcaggtattcgacaccttaaagaaactcagccgcgaaaagctggtgctggtggtgtcgcacgaccgtgattttgccgagctttatgccgaccgcataatcgagcttaaggacggaaaaatcatatcggacgtcagcaagacaagcgtgacgcccgacgttgtcaatgacggcgtaagcgtggtggacgacaaaatcatccacatcaaaaagggttacaagcttacggaaaaagacctgaaattgataaacgactatatatcgaaagccgacggcgatacgcttatatcggtggacggcgacaagaacgaggaaataaaaaaggtcgttaaaataaacgaccagggcggcaaggacgaatttctggacaccaagcccgaaaacgtcaagcttaaatcttacaccaaagaggatagcaagctgatacgctcgcgcctgccctaccgcaactcgtttaaaatcggcgcaagcagtcttaaggcgaaacccgtaagacttgtgttcacgatattcttgtgctttgtggcgtttactctgttcgggcttgcggacaccgcaggttcgtataataaagtaactacatacgaaaaatccattatggattccaaaatcgaaagcgcggcttttaccaaaggcagatatatcccttacagcggaggcggaaatatagaatattacttgcttaacgacagcgatattgccgcaatcaacgaaaaaagcggagtgttcgttttgcccgtttacgtggacggacaaagatacggatacagcgatataagcttttcccccagcgtactgaagcccggcgcgctggaaaacgaaaacgacaacaaattttatacgtctaccgcttcgggatttgtggagataaatcaggatacgtttgccaaaacgggtctcacgcttgtgtcgggatcgcgcctgccgcaggccaaagacgaaatcgtcataaccaattatatttacgagcattttaagtacgcgggacttacctataccgacccctcgacgggcgaaaccgtcataatagaggcggcaagcctttcaactccgcaaagcatactgggtaaatgtataatttttttagacagatatacgggtaaagaaaggacgtttactatagtgggcgtggcggaaacgaatttggatacttcgaaatattcgaagtatatgcccggtgcgaaaagacagaactctgacataatggatatatttactttgcaggaaatgaagaccaagcttaaatacagctatcattcgctgtgctttgtctatcccggagtaataaacgaaatttactcaagtaacccaaacaaaaaccgggcttcgatagggaaatttattggcgaatccgggaatatttcgttaggcgaaggcacggacaattttaattcttacggaatggtggcaaaactcgaccagtttaccgaaaaagacgccatcgtatggacggagggcgaaaagacgacgcttgccgcaggcgaaatcattgtgccgttttctttcagatataatgacattaacaaagaaaatcaattggacaggacaataagcgtcgaaacggcagaatatcttataaacacattcggactggaagaaaatacggcggaaataaaaaagttcagccttaacgatgcgatttacaacttaaataactgggctgtaagcaaatacgtggacgaaaacggttatcccgacagagaagagttccgcgccatagcgaaagaatattatatatacaaatataataaggatgaagattacgtcatgacggacgacgattacaaggaaatatataaaacttatctgcagtccaacaccttttacgtagacgaaaacagagtatctcatacgggaggttataccgtcaataaattcggtaccgcgggctacgtgctggtgcgtcccttcattaaggaagtttacagactggaaaacgtgacctcgattgtaaacgcttcgggcgacgtaagcctttcctccaagttcgacacttccaaaaaatttaccgaaaaatataaagtcgtgggttattacctgcctacggcagaggcatttactattaagggtagcgataacatccctatagtggattaccatattaagtctaactattttacaataatcgtacccgattcttattacgacttttttgaagaggaggaagatagctactacgagtttgcgataggtaaaatgccttacaccgacgctgcggcggtcaaaaaaatagttgagttcaactataccgagttcgacggcggaacttactactcgcttaacaacgaggtaagcgttatgctggataacgtcaacagcctggtcgaaacgctgtcgcaagtgttcttctacgtgggaatcttctttgccgtctttgccgcgcttatgatgtataactttatatccgtgtccattaactataaaaagcgggaaatcggtatccttcgcgcggtgggcgcaagaggcggcgacgtcttcggcatcttcttcaacgaaagtctgatcataaccgcaatcaactttgtgctttcaagcgttgcgacttttgtggcggcgtttgtcatcaataaagcgataagaagcgaatacaactttacgctgacgttgcttagcgtgggaataagacagttcgcgttaatcctcggcgtaggcgtgcttgtcgcctttatcggcagcttcctgcccgtaatgcgcatcgcgagaaagcgccccatcgacgcaattcagaacagataatttcaaaagccttatactccgtcgtaacgtaaaaaccgttatttcataaaccgaaaggaaaagcttaacgaggcgacggaaataagagaatatcagtaagaaaaaagggcttatccgctttttgataaagtgcggataagtcctttttgtattttaacagagctcaggctttttttaagataaaagcgaaaatcgcattcaatttgattgcgcccgcgcggctaagctgcttgtgtcacggaaagagcggcgcgttttatcggtaattgtaaaagcccgaaaagaacgaaacaataaagtcattcggtgcggaaaagaaagagtctttcagtcgcgctttttaaccatgacgaaattggtaagggacacgccgcggcgcatcaccgtctgacttttgacgacttcgtatccgcgaccaatgaaaaaaggttttgcggtaacggaggcgtgtacggtaatatccttgccgcatacgccgctttccaacttatccgctatagcggtagccacgccgcatcttaggaaatccttgcttacgtaaaggcggtcgaaatagcccgattcgtacatattgccgaagcccgcaaccacgccgtttacttccgccaccacggtttcggactctacaaaatcggcgttccacttctctacgtccgcgcccgcagtccatgcctcgatttgagcctcgtcgtaatcggcggcgtttacagagcgcaccgtgtcgcagaaaagccgcaagagagttttacagtccgacgggcaatacggtcgcaatttaatttcacaattgtcttttttcatgtttttcggcgcgtaaaacgcacaaatcgttttattaaatcagtaaacggagattttacgtctttccttttaaaaaatctcggtaattgtaataaagaaaatttaacgcacggcggactttttgacggtaacctccgccgaaaacgcgcaaagaaagtgttttaaaacaattagcgcggagtgtgtttttcggcaaacggcggaaaaaacgagaaagctttttaacaatcgatttactgtatcggttttcgttacagccgccttgtgcagtaagcaaaacggtgcttacagccgccgcaaagcctttttaagctaaacagaacagtaaaatcattcggtcctcagcgccacaacggggtctttttttgccgcggcgcgcgcggggaatactccggaaacaagggtaagcaaaacgcttacgcccaccattatggccgcctggtaccacggcaggatggcgatgcgggataccacggtcaaagagcttaccacaagatttattattaaagtacaaaggtacgtaatggctatgcctatgagtcccgacgcaagacctatgatagcggtttcggcggtgaacagacggctgacgtcttttttcctgccgccgagagaacgtattacgccgatttcctttgtgcgctccactaccgaaacgtaagtgattatcgcaatcatgacggaggaaacgaccagagaaagagacgtaaagcccacgagagcaatggtgacgatgtcgataaactgattaatcatattgattattacgctgagattatcggtatagacaatgtcttccctgtccgcggaagtaatggttttgccgtttacgacaatgtcttcgtcgctgttccagcggtcgaggtatttaagtacgttttccttggtggtaaagtcgtgcggataaacggaaatactgtttgcaacatttacaccacctacctgttgtttggtaagtacatacatatcaggtatctgtacatcaacattgtttccgaaaatacccataatagcactcatgctgttgggagtgcctacaaagccaatatcggtgaaaacggtttcttcgttgttttcgtttaaataagtgtatgaaaagatataggtaatgcctttagcgtatggtatttcgtctttatctacattccaaccagactcctcgtaaggtttgtccgtatcgtcgaagtattttacgatttcggattgagcgttttgctctaaaatatagtcggtaagcgcgcttgtatagtaaaatccgctggtcatacatccgtaagaaatagtttccttgggctgcaggattcccacgactttaagcgggagcccgtcgccccactccccttcgaggtgattgtaggtaagcgagtaggaaactttttctcccgaggaggttttttgcacgttgtaaacgtcgtcgttggggtaataagtaaaggttttgcccagaatttcctcgtaggaaaatctgtctttgtcaagcgcggggtcgtaaagctcctccatggaggggtcggtttcctttgcgccgcggtaaataaggttcatgaactcgtcctgcgagtagtacccaagctgagcaagcactatgtccgtaagcatactgtcgccgtcaagcaccaccatgacctcgtctttttccttggcaattcggccgcttttaaggtcgtactgctctaaaacgtagctttcgtcggcagggcactgggcaaagttgtccaccaccgtggtgacgtaggtcgcgtattgcttgaacatcgtctttttaagaatggcgatgtactgcgtgcgtatggcggacagcgacattgttttggtgtttgtgtccgcattttcttccgaaggctgggctttcagcgaaaaatcggtgtaaatgttgttgcttacgtctaagccgtaatctaagaataccgccgcggcgtcctcttcgggaagagccgaaacatagtccacgtaatcctgagtgatggtgttgtttatcattaaactttcggcggttttggattttgcgataaggttttcgatcatggagttgacgttgacgtagcccgcctcctgaatgacttcaagtttttcgccggtgccggtaacctgtaaaagcgcgctcatgtcgaaagcggtttcctgcaccatgatggggttgcccgacagcatatcgttttgcatgctgttgatgtaagtccttacgccgaagctcatggcaagcaccagcgaaacgccgataatgcctatcgcgcccgcaacgctggtcatgattgtgcgcgcctttttggtgaaaagattctgcgcgctcagccgaaaagcggtaaacggcgacattttggctttttcgcgtgctcgttttgttttgcctgtctttttggctgcgtttgtttctttagccgaggtagaatccgaatcggctttttctttatcggcggcgttttcgtcggcaacgtagtccaccctttcttccgccatttcctcttccgccgaatagggcatggtgtcgtccaccaccactccgtccagaagctttattatacgcgtggaatactgctcggcaagggcggggttgtgcgtgaccattattaccagtttttcgcgcgcgatttccttgataagctccattatctgcacggaagtggtcgtgtccagcgcgcccgtgggttcgtccgcaagcagaatttcgggttcgttgaccaaagcgcgggcaatagccaccctttggcactgtccgcccgaaagctgattgggctttttgttgtactgccccttaagccccacgcggtccagcgcttttttggcgcgctcggtacgctccttgctgcccacgcccgcaatggtaagggcaagctccacgttgccgagaaccgtctggtgaggaataaggttgtaactctggaagataaatcccacgcggtgattgcggtacacgtcccagtcgctgtcgcggaaacgcttggtgctgacgccgtttatgctgacgtcgcccgacgtgtatttgtccagtccgccgataatgttaagaagcgtggttttgccgcagcccgacggacccagtaccgaaacaaactcgtttttccgaaaagacaggctaatttcgtttagtgcgcgcacggaggtgtccgctactttgtagtcttttgttaccgatgtaagtctgagcataataaaaagctcctttatgattataaaaaaaaagtttcgtttgttttacgccgatacttgttataaaaaagtttcaaaaaagcagatttcaggctgaaaagcacgtaaaaacgcagttaccgaaccgcgcgcgggaaaaatgctttttgtacaccgcgttttttaccgtgattaatattatattaacgcttttatatgattgtcaataaaaaatacgatgtttaaaaaatatccgaaaagtgaaagcataaacacaattaagaaaaaatcaggacagctttgcgatctcctctacgggaagggcaagcacgaccgctccgctttcgcttcttacgccgtgtcgggcgtttaccgactccatgacggcggcgcgtttatcgcgggtggtgacgattgctattatttcgcgttcgggagtgaaagccgcgccgaaaaggctttcggtttcctcattggaaaactgccgtgcgcggataagagtgccgccgcgcgcgcccgcttttttacagcacgccatgacttcgtccgcgtaaccctggtttacggatatgagaataagactgtatttttgttcgtccacggttttttcctccgataagttttttgcggttttgatttccgcggcttttataagcagtcccggcgcggcgcttaacctcagacagaaagcaatgcctttactgcccgtgccggcggaaagacggtcgtttaaggcgttcatgacggcggcggcagagtcataagagccaaaaccgagcaccacgtctttttccgaattttccagtcccagaatgtccatgatttcggagcctgccgtcccctgccccataaaaagcgacgtcaggaaaattccgtattcgtaaaacaatctgacgattttgtcgtgtttgccgcgttccactacggcggcgacgacgcagggcggctttaattgacggtcctgatttttttgtgcggacgccgaagcggattttgtcgggcgctgagataaggaagtctgttttttacgcatttaacccacctgtcctttaatcgaaatacactataccgtcgtcggctttgagcaaagcggactcgaaatttcggtcggaaagtttctttttgactgcgcccgtaaagcccagaagctgaatggttacaagcggagtcatcgccaccatggctattatgccgaaagcgtcggtcatcaggtcgccgcccaaagccgaacacgcgcccatggcaagcggcaaaaggaacgtcgcggtcatggggccgctggcaacgccgcccgcgtcgaaggctatgcccgtgaaaatctgggggacgaaaaaggaaagcgccagcgccacgacgtaaccgggaacgagaaaccacagcagcgaaatacccgtaagaatacgcagcatggcaatgcccaccgacacggcaacgcccagcgacagagcaatgcccattgatttttgcgaaactctgccgttgcttacctcctccacctgttttttgaggacgtggacggcgggctcggcggcgacgatgaaatagcccacaatcattcccacgggaataagcagccacttgtaaacgcccgacgacatcatggttcccaggaggtggcctacgggcataaagcccacgttgacgcccgtaagaaacagcacaagtccgaggtaagtgtaaagaaagccgcttattatgcggataagctgatgctttttgaagcgttttgtaatcagctcgaaaaacaagaacaaaactccgatgggcgcaagcgcgacgatgacttccccgaagtaatcgggaaacgcgtagacgaagtaccttgccgcgtccttgacggtcacgatgtcggggacgactacttccgcgggcgtgacttccccggggttatagactatgcccagaataagcaccgaaagaatgggaccgacgctgcacaaagccaccgtgccgaagctgtcggaccccgcgtccttgccgtttttgactgaggcaagacctatgcccaacgacataatgaaaggtaccgttatcggtccggttgttacgccgcccgcgtcgaacgatacggggataaagtttgcgggcgcaaaagcggtcactgtaaaggccgttgcgtaaaaaaagataagcacatacgaaagcggcagctttaaagcggtacgcagcagcgagagcacgaggaaaagtcctacgcccgccgccacggacaatattatgacggggttttctatggcggggacctggtttgcaagtacggtcagatcgggttccgccaccgtgacgagaacgcccagcaggaaacacagcaaaacgggaacgatgcggctcctggatttagccatcgaagcgcctattccttcgcccatgggtatcatggacatatccacgcccagcgtgaaaaacgacattcccactataagcaaaagcgcgccgaacaaaaacagcacgacgggtccgggcgtaagcggaacgaacgtaacggacagaataagcactatcgccgcgacgggcagtaccgattttaacgcctcggcaaatttttgttttaaattgagggaaatttcaaagtttttcatatcgtcattaaattaaagaaattttattaaggcaggcggaatcagaaaggtatggattttcccgcgaggtgttttttgtattcgtcgtctcgtcattaagttaaagaaagtttattaaggcaggcggaatcagaaaggtatggattttcccgcgaggtattttttgtattcgtcgtcgtggcaattcccgaaagacgcgataaggttgcagaacgcgcctttgccgccgtccgaacccgttttaaggatatagttatcctttgcgtcgggtctgaaggccacggtgaaaccggaaacgagcgcgtcgaaatttttttcggcgttaaacgcgatgtgcggcgcggactgcgacgtataccacaggcagaagcagtcggtgtatttgccgggcagggcgtttttgcccgtaaaaaagcccgtggaaaactggtcgctgtaacaaaaactgtaaaaattattgccgcccgtatcgtaaaagccgcaggaatcggggaaaaaggcaaagtcacccgtaaaaagcggatgaatgtttcttaaactgttgccctggcttaaaattttaacccccgtgcgcacgtttgcgatgcgcatattcgtaaaggtgttgtcatatccttcgataagcacgcctacggaatcgaacgcgccgtttcccacgatgttgacgtggtttatgtcggcgtcggaggagccgctgttggcgccgtgcttaacgtgaatacccacaagcgcgtttttaacggaaacgtctgaaataaaagtttccctgccgccgtctatggaaacggcttttgccctgccgcttccgtccacgatgccgccgcgcagcgcatagttgctgcccggcaaacggatattgttggcggcgcattttccgcccagacgaaccattgcctcttccccgcagaaatcgtccgcggcgcgaagaacggcaaagtcagataaaaccagacttacgctttttaaggggtcggcgggagttgcgacgggctttgacagcagatattctccgtcgggaaagaaaagcgtgcggttgggattaaggtctataatcttctgtaaagcgtcggacacgtctttcccggagtgttcgcccaacgcgtcggcaacgtttaacaagcaggaggaattatatttttcgtccataaaacctactccttttaataaaaagaaaattctccgcgcgcagaaacggcaaaattaaattacaaaccgccgcacgcgactttttacgcagattttattaattgtgggtattaatacgtcggtacgtcaaaatacgggcaacgatgttttactgcgggattttcaatccgctttcagaaaaacggttaagcgtttttttccgttgaaacgcaagccgttgcacaggttaaacaaaacgcttataaaaacaaaaaaggtttttttccgccgcagtcttttatggaaacagccttaaagaaaccgtaattgttataatatcggttaatagtatgtttaatgaagcataattcgttgtaaagggcaatggaaagacttaaataaacgcgaatatgcctgacaaaaaaacttaaaagactaaaccgttttaatcggaaaacgccccgcctttaagacgggacgttttattctcctatcagttaaaaagatctttgtaagctttgccgaatttaagcgaaggagctttgctcgctttgattttgaccttttcgccggtgagaggattgatgccgtctctttcgggtttggacttaagctcgaaagttccgaatcctgcaagctgaattttatcgccttccttaagagcgtccgcgacaactgccgtcatggcgtcgaaagctttgcccgcgtccttgtcggtgatacctgccttttcggctattgccttaataaattcccctttgttcataagatacctccaaaaagtataataccaattataacataatgcggtttttaagtcaatacgttaaaacaaataaaatcggcgtaaagcgcgcaaagggtctttttttgacgaaaaagagcgtttttatgttcggcataaagattaagggcaatcatcgactttttaaaaagcctttatgtgacttaaaacagcgcgtttttttacggcggaaagcttttgcttttagtcggataaagagattttcaagccggtttttaacggtaaaaccgaacggcgtgaaacagagggcgtaaaacccataacatgcaggctgcgcgaaaaatgcttttataaaaacggtaaaacccgcagtttaaggcattaaaagcgtaagagcgacaagaaaaatcactccagctcgaacgcgccggtgtaaagctgataatactgccccttaaggtcgagaagctggctgtgggtgccgcgctcgataattctgccatggtcgagaactatgatgacgtcggagtttttgactgtgcttagtcggtgcgcgattacgaacaccgttctgcccttcatgaggttatccataccgcgctgaacgatggcttcggtacgtgtgtcgatactgcttgtcgcctcgtccagaatcatgacgggagggtcggcaaccgccgcgcgcgcaatggacagcagctgacgctgaccctggctgaggtttgccccgttgcccgtaagcatggtgttgtatccgtcgggcaaacgccgtataaagtcgtccgcgcccgcaagagaggcggcggcgatacactcttcgtcggtggcttccagcttgccgtagcgtatgttttcgaggacggtgcccgtaaagagagtggtgtcctgaagcaccatgcccaaagattttcttaaagagcttttcttgattttgttaatgttgatgccgtcgtagcggattttgccgtcggcgatgtcgtagaaacggttgagaaggttggtaatcgtggttttgcccgcgcccgtcgcgcccacgaaagccaccttttgcccgggttttgcgtaaatactgatgtcgtgaaggacggttttaccctcctcgtaagcaaaatccacgtcaaaaagccttacgtcgcccgcaagcggcgtgtaagtaacggttccgtcggcggcgtgaggatgcttccacgcccagcagtgagtgttttcctcgcactcgacaagcttgccgttttcctcgcgcgcgttgaccaacgtaacgtaaccgtcgtccgtttcgggcttagcgtccataaggttgaaaactctttccgcaccggcaatgcccatgactacggagtttacctggttggaaacctggttgatgttgcccgcaaactgtttggtcatgcttaagaaaggcacgactatgctgacgcttatggcaaggcccgaaaagctgatattgggcgcgttaagcgcgagaagaatgccgcccaccaccgcgaccagcacgtaaagcacgttgccgatgttgttgagtacgggcattaaaatgttggcgtattgatttgctttgacggattcgcggtaaagcgcctcgttgcactttgcaaaatccgcctcgctttccttttcgtggcagaagaccttgacgactttctgaccgttcatcatctcctcgacaaaaccctcggctttaccaagcgcggtttgctgacggaagaagaattttgcggagccgccgcccacctttttggtaaccaaaagcataatcaccactccgaaaagcacaaccagcgtcagccacagcgagtaataaagcattatgataaacaccgtaagcgaagttatgcccgaaaccagcagctgcggaaagctttgggaaatcatctgccttaaagtatcgatatcgttggtgtaatggctcatgatgtcgccgtgagtgtgagtgtcgaaaaactttatgggcagtctttgcatgccgttgaacatcttgcagcgcagttttttaagcgttccttgggtgattaccgccataagctggctgtaaatcaggcaggagataagcgacaaaacgtaaaacacggcaagaattcccacaagcagcatgatttgcgaagcaatttggctccagtcgccgctttgccagttggcttccaccacctctattactttctgcatgaaaatcgaggggacggcgcttactatcgcgctgaaaattatgcagaatatggtcacgggaagcagcacgggatagaaggaaaacagagttttgaatacgcgtcccacgacgtgctttcttgattttttgttattcattgtcggtgcccgccttgttttgagaagtatagatttcgcggtagatgacgttgttttttataagctcttcgtgagtgcccacagcgtttatcctgccgccgtccattaccactattttgtcggcgtcctcgaccgacgaggtgcgctgagcgattatgaacttagtggtttcgggcaggaattcgcggaaagcttttcttatttttgcgtcggttttcgtgtccaccgcgctggtggaatcgtccagaatgagaattttcgggtttttcaaaagcgcgcgcgcaatacaaagcctttgtttttgtccgcccgaaacgttggttccgccctgctcgatataagtgtcgtagccgtcggggaactgcgaaacgaattcgtctgcgcacgcaagcttgcaagcctccacaagctgagcgtctgtggcgttttcgttgccccagcgcaggttttccttgattgtgcccgaaaacagctcgtttttctgcagcaccaccgccacctggttgcgaagggagggaatgtcgtaatccttgacgttgacgccgcccactttgacttctccctccgtgacgtcgtacagtctgcagataagattgacaagcgacgacttgccggagcccgttccgccgatgacgcccacggtttcgcccgactttatgtgaaggtcgatgtccgaaagcgcgttgcgttcggcttttttggaatatttgaaattgacgtggcagaactcaaccgagccgtctttaatctcgtagacgggattatccgtgtcgtgtatggtgggttcctctttaagaatttccactatgcgctgtcccgactccattgccatggttatcatgacgaacacgaagctgagcatcataagactgctgagcatcatgaaaccgtagcttaaaagcgcggaaaacttggcgacgtccagctttgcacccatggaagtgacgattatgtaggagccgaacgacagcacgaaaaccattaccacgtaaagacagaactgcataagcggattgttgaacgccaggattctttcggctttggtaaaatccttgcacacgtcttccgccgccgcgccgaactttttctgttcgtaatcttcgcgcacgaaggatttgacaacgcgcatgcctttgacgttttcctgtacggaattgttaaggttgtcgtactttctgaacacttttttgaaaacgggcatcgccttgaagattatggtcatcagccccgccagaagaagcggaagaaccgccatgaatatccatgccacctgaccgcccgtaacaaacgacatgacgaacgcgaaaatcatcatgagcggcgcgcgtattgccgtgcggataatcatcatatatgcgtgctgaacgttggtcacgtccgtcgtaagacgcgtaaccaacgacgaagtcagaaatttatcgatgttttcaaaggaaaacagctggattttgtgataaatgtcccttctcaggtttttcgccagtccgcatgaggctattgcgcaggtgtaccccgccagcccgccgaaaagcagggacaaaagcgccatcacgaccaggattccgccgtactttaatattacgtcaagtcccgcgcccatgcggattttgtccacaagcaaggcaatcagaaagggtattatacactcgattaccacttccaaagatacaagtatcggggttgccactgcggactttttgtattcccctatacttttggcaatctctttaaccattttttaagctccttaattttcttgtaaaataaaaaagttttatgtaagcggcgaaactttttttgcgtcctgcgttttatcggtaaacggattgaagcacgtttataaacaaggcaaaaaagttctgcgtcggtgttttttctttataaatatgtgcggctgagttaaaacggaaagactgcatctcgaaacgcatgaaaccttaaacaacggtaaaacgcgccacgcataaatcggggttaaaacgcgtccgtacgcgttttcgggttaatgaatacaggtttttccgccgcgcgaatcagggatttttaattgcgttttcacgaagcggaaagattgcgtatcatgacggcggcaatgcgcagaaactccccgatttcgcttttagtaagcccttttgccagctgcgcctcgttacgggcgatgttgtcctcgatttttttcataagtaccacggctttgtcggtaagcgttatctttttaagtctgccgtcgttttccacgtccgaccttgttatcatgccctttttttccaaaagctccagatagccgctggccgttgcgcgcctcatgccgaattcgttttcgatatcgcgggaacagcagtcgcccttaaaattgtatatgaaaaacattatcacgccttgcatacccgtagtatgctcgctgaggttgttgttttccatattgcgctttatgagattgttaagtttgcttaccgcttttcccacgtccacggcgcgtctacctccccgaaactcagtgcaggattgttaggttacttacaaatattaaactctttcaacgcaaatgtcaatcgaatttgtgtgataaaatcgtgaaaattgttttgttttaatgtatcaataatcagaaaaaaatacgtaaaaaaaccgcagcaaataaaaccgcgccggtttagcaggattttacggcaattaaatcgcgcacaataaaaccgcggcggaaaaacgcggcccacgaaaaaagcgtaaactttaatgttttatcaggaagatattccggcggcagtaccgaaataagattagtcgcgtggacgtaaaaggctgtttttaaggccctagaagcgtaaactttaatgttttatcgggaagatattccggcggcagtaccgaaataagattagtcgtgtggacgtaaaaggctgattttttaaggccctagaagcgtatactttagtgttttattgggaagatattccggcggcagcaccgaaataagattagtcgtgtggacgtaaaaggctgattttttaaggcccttttagcgagaaagctgaatgagttaacttatatacagagagcagaaataatatttatcttacaataaccgaacaaaaataatatttatcttacaataaccggacaaaaacaaaaacgcctttacttaaagcgcaaggacggtaagcaaaaagcgtttacgttttattgaatattagcctttttgtcggggtaagtcttttctcagcggcttaaaagattaagcggccaaaaacgaagaaaccacttcgccgacggcattgtaaagctgagtcgtgcgggcgttaaccacaacgggggaaacggaataatattcggaagaaatttcttcgtcctccgcttcgttacccacgcgggaatcaaggtagaacacgatttccagcgtgcctatctcgttattggaatttcccacaagcactattgcgcggtcgtaagtaagttcctctccttcaacggttacggttttagcctccgaaaacacgaacacgagtttataaagagtgtcggtcgcggcaaccgaagcgatatcttcggcggcgatttccacgcggctttcctttgtttcgccctctttgacttcggttttgaacttataggataccgatgccttcccctcgagtatgccttgcattacggaaaaagaggtttcgtcgatagccttgtcgagttttgccttttggtccgctttgtcggcggtgatttcgatacggtcggaggaggacagattgtaaacctccactctgtcgtaaccgtcaagcgttttgacgggttcaaggctgacgaggcaaagcaccaggattgccacggcgagaactgcgactacgcaggcgacgattattatcgtttttgataatgcctttttcattgtttgctcctgttattattaatctttaattgttgttttttgtaaacccgtgattttttttggttaagccgcggctttaaagccttgatatgctttttggttaaggtcggcataaggcatttcgtccgcaaaatacacgcaaagttttctcgtaaaactttcgcccgttacccgattgttttatcagcgaaaggattgccccgttgactttaatatataagtcgtgctgccgggaacggaatcaaaccgtaaaaacgaatcgaggtaaaagtccgaaaatgctttgacgcccttaaagaacctttcagcttccgagcgaaaagcgaaatcggctttcgggtaaacggtcgcgtctttagggcgaaataattgcgcttcagacgttgccttctttaagtgcggcctgttttttctcgtatttagcgttaagtctttccttaagctcgtttttcacttcgtcggcggacgcgcctttcataatcatgtccacctcttcggtgtaaatcgtttcgcattccaaaagcacgcgaaccatgacgtccatcaccgcgcggtgagtgcccagaatttcgacggctttggcatgagcctcgtccagaatttcggaaacttccttatcgatttttgcggcgatttcctcgctgtaagtatgggtggactggtaatcgcggcccaggaaaacctcctggttagagccgtaataaacgggaccgaggtctttgctcatgccccactccatgaccattttgcgcgcaatgcccgttgcctgtttgatatcgcccacggcgcctgcggaaacatcctcgatgacaagctcctctgcggcccttccgcccatggacatggcaagattggacttaagcttgttgacggtgatatggtcgtcgtcgttttcgggtcgggtcatggtgtagcccgccgcctgaccgcgggggattatgctgatttcgtgtacggggtcgcagtgcggcatacagcgcgcgactattgcgtgacccgcctcgtggtaagcggtgatgcgcttatccacttcggtaacgagcctggattttttctgcgggcccatgacgaccttgttgatgccttcgtaaaggtcttccatggttatcttgctgcggttgtcgcgtgcgcagaggattgccgcctcgttgagaaggttagctatatccgcgcccgaaaaaccgcttgttatgcgcgccagaacctggaaatccacgtctgaagccatgggtttgttgcgcgcgtggaccttgaaaatagcctctcttccgcgcacgtcggggatgttgacgtaaatctgacggtcgaatctgccgggacggagcagcgcggggtcgagaatgtccgcgcggttggtcgccgccatgactataatgccgtcgttggtggcaaaaccgtccatctggacaagcagctggttaagagtctgctctctttcgtcgtgaccgccgcccagacctgcgccgcgctgacggccgactgcgtcgatttcgtcgatgaagataatgcagggcatgtttttcttggcggtgtcgaaaaggtcgcgaacgcggcttgcgcccacgcccacgtacatttccacgaagtcggagcccgatatcgagaagaacggaacgtttgcttcgcctgcaacggcctttgcaaacagagttttacccgtgccgggagggcctacgagcagaacgccgcggggaatttttgcgccgaccgcggtgaacttttgcggcgacttaagaaattccacgatttccttaagttcttctttctcctcttccgcgcccgcaacgtcggaaaatcttaccttgatgtttccctgaacgtttgcgcgcgatttaccgaagttcatcgcctgcttgttgacgccgcccatcgaacggaaaagaattatggcgaaaacgaccagcaggacgaaaccgattatgggtataatggtcgaccagatgctgcccgcgtttctgtcgttgaagtatagctgaatgtccgctccgtccccgttgttggcgttgtaataagtgacgtaacccgaaaaagaaagctcgcccgtggcgtcgcttacaaaccagttgttgacgttttgctgaattttagcctcgtaaccgtaagttttttcacctgtaagtttgacggaaactatgtcgttgtttacggatatttccgcgactttgccttcgtcgataaagttcttgagttccgtggaagaaatttccttcgacgtgttgcggaacaggaaaaacattcctatcacggcgaaaaccgataaaacgattattacggtaatcaggcctttggtacttgatctcaaattaatttaacctccgtagtcgggcgccgacatattgaattttgcctcggtccgacatgatcattggcgcttgcgggcttttaa

SEQ ID NO: 3586 - DNA, 5068 bp, Unknown
  16S sequences of unknown bacteria
gcgcgatggtgggcagcagcgccacgaccatcaccagcgcaagcagcagcgcaagaaatcgttttttcatctttttccgtcctttctgtttaaaaatattttcaaaaaccgcaacgcggcaattgacgacaatgaaaatcatgctttgcccaacggtaaagcatgtcgcgaccagtcgcgacgcaaaaaagcagcataataaaaacgcacggtgctccaccgtgcaaaagctgctttctttggctccggctaaggcataaaccaaggcacaatcctagcgtatctgacttatcctacatcgcgcaggcttcacagtgaccttctcgcggggccttgcaccccattccgcctccggcgggctatgccgccgagcgtattgcccttttctatttggtttgttctttgacttgtttgctggttctcttctttttcaaacatatcactttaaattcgttctgtcaaccggatttgtacaaaaaatgatcggcataaacggcaagcgcgcatagctgcttcaccgctgcctcaggttccctcggcattgcttgcgtcgttggcctttgtgaccttttccggcggcgctgcaaattttgttattttttgtgcgccaggcattgacatttgtaatttttcagctataataaagaggaattcaatacaaacgattccgtttatgttctgcaggaaaaagccccgtgcttgccgaaggagttaaacttacaggtgcccgccccggcgggtgtgactgcagaattcaggaacctctggagaatctccaccgtgagtgccgaaggtgcaaggcgtttttcgccgaatctctcaggcaaaaggacagagtgcgcatttttgatttatatcaatttgtgctgcagcgctgtgcagattcggcagaggtcctgccggatctgttttttctttccattttattcccatcacagaaaagaggagcacccatgtatcaagatctgcagccgaacatcgaatttgtcaatcagtatgacccggagatcgccgccctgatgggcaaggagctcgcccgccagcagcggaatatcgagctgatcgcttcggaaaatatcgcctcccccgccgtcatcgccgccatgggcacaatcctgacgaataaatacgccgagggctaccccggcaagcgctattacggcggctgcgagtacgttgacgaggtcgagtgtattgccatcgagcgcgccaagcagctgttcggcgcggaatatgccaatgtgcagccccactccggcgcccaggcaaatctggaggcctaccaggccctcctacagccgggcgacaccgtcgtcggcatgagcctggccaacggcgggcacctgacccacggctccccggttaacgcgtcgggcaagctctaccacttcatcccctacggtgtcgaccccgccaccggccgcatcgactatgacgaggtcgagcagctggtcaaggagaatcgcccgaagctggtcgtcgccggtgcgtcggcgtaccccagaacgatcgacttcaagatcttcggcgagatcgcccaccgctacggtgcgctgctgatggtcgatatggcccatatctccggcctcgtcgccggcggtgcgcatatgagccccgttccctatgccgacgtcgtcacgacgacgacgcataagacgctccgcggcccccgcggcggtctgatcctggccaaggaggaatgggccaaaaagctcaactccgccgtcttccccggcacccagggcggccccctgatgcacgtcatcgccgccaaggccgtctgcctgaaggaagcaatgcagccggaattccagacctacgcccacaatgtcgtcaaaaacgcgcaggcactggccgccggtctgatgcagcggggcttcgacctcgtctccggcggcacggataaccacttgatgctggccgacctccgctccatgcacctgaccggccgtgaaatgcagcaccggctggacgatgtctatatcaccgtcaacaaaaacgccatccccaatgacccggagaagccctttgtcaccagcggtgtccgcatcggcacgccctgcgctacgacccgcggcctcggtgtcgccgagatggatcggatcgctgcctgcatctacgatgcagcgacgaatttcgatgccaaggcagacgcgattcgcgccgccgtcgccgaaatctgcgctgctcaccccctgtatcaataagccaaatttcctcctgatcgcgccgcccggcccaagcccggcggcgcgttttgccccccaagacttgtattttcctacagggacaggtataatagagaaaacccgaccgttctgcttcctctgcaaaataccgcccgctgccgccaaggccagtgcagaaaggattgtgccttcgcgtacaatacggccaagtaccatgaatcacgacacctatttttatctgcttaagctaattggcgaatatgccaaaacgacagatcgcctcccgccagaggagacgcttgcccagcagctgggcatcagccgcgtcaagctgcgcgatattctctctgttctgcagagcaacggctatatcagccgtaagcgcggcattggtaccctgatcaataagcacatgctccaggagcacgcacggctggacacggatatggtctatgacgaaatgattgctggcaccgggcatgtacacagcgcgaatctgcacaagatccgccagatcgacgccctgcccagcgagatccgcacaaagctggagcttccctcggatgaaaccgcttggcagattgaaaagacgacctttgtcgacgggaaacccgcgatcttctccgttgactatatcccatccaaatactttcatgaggcggacttggatattgccttgatcacccagtgcaactttttctttgtgcagcagcaatgtgacgacctaatggacagtttgatcctgcacatcgccgccatcgctgccgatgaagtgatttgccagcgtttagctttgccccaggggaacccggttttacaggtttgctctgtctgctacagccaaaagctggcccccattatgtattccttggaatactataatacagacctcatccccctctcctgtctgaaacgcctctaccgtacaaagctacagcagcgagagcaggcacccacctgagaaattccccccataccgcgctacagagcccggagtttttgctccgggcaatttttatttgtaatacttctcaatctactaaataaatgcatttgtatgatttatataaattatacgccgcaaattttgtaatgcctccaaattttaatggggcatcttgacaaattggcgcatcttttttatactctagccacatcttggtaatacttattttcagaacgcaatcaccacaaaggctctagaattggaggtagcaccatgaaaaaacgcgctgcactgttcctgtccatccttctggtattctcattgctctgcggatgcaaccaggcacccgcatcccctggcacagcagaggctgcaaacgcccccgccatctcccttagcgaaatcaaaatcggttttatcctggacaacaccgccaccgacggcggttggaatgagcaaatggtcgagagtatggaccgtaccatagaaaagctccggctcaagcccgagcaagtcatcacgatcgaaagcatcgccagcggcacccctgagttagattccaccatcattcagctggtcaatgagggctgcgatctgatcattggctcctcttccggctatgtcaccggctttaccgaagcagcaaaggccaacccggacacccgttttctggagtttgagggcggcacggcggaaaatctcgccagcttcacttgtcatgatgtcgacgcaatcttcctgctgggctattgcgccgcgcaaatgacagagcaaaacgcgcttggcttcgtcgcctctcagccgcaagcctctgtcatccgcgcggtaaatgcatggtctgccggcgcaaaagcggcaaatcctgacgccacagtccaggtcctctggacaaacagctggtgggatccggcagcggaaaaagaatgtaccaactccctgctgcaaaccgggcttgactgtattggctattacggctccacgaccgcttgcgcccaggcctgcaaggaaggcggtgcctatacgaccggtttcagtgacgatcttcagacttatgtcccggaagcgacactggtctgcttctattggaattgggagccgatctttacccaggccattacagatatttgtgaggataactggtcctctgaaacaaaagttgccggaatggccgaaggcaccgcatgcctgacagactttaacacagccatcgtcccacaagctgtgatcgaccagtgtatggatatgcggcagaaaattttagatggcagctatcaagttatggcggggcccctttcggataatcagggcaatccgctcctggcggacggcgagacctttaccctgcaggattacacggatatgtattttctgctggatcatgtcattggctcgctgccctaatgcccgaggtcgctgctatgcaaagctctgctaaaaaacgctttgacgttctgggcacgacaccgccccgggcggacgcttatgagaaagtcaccggccgcgcccgctacaccgcggatatgcacctgccggatatgctctacggcggcggcaaaagtgccgggatcgccagcggcaggatcgtctccatcgacgcaagccgcgcccgggccatccccggcgtccgctgcgttctgaccccggcagatgtgaaaaagcacgtctcctgcagctcgcaccgctatatcactgaccggccccgcttctgcggcgatctcgtcgccctggtcgcggcggagtccccgactctggtgcagcaggcgctggacgccatcgccgttcaatacgaggcgtaccctgccgtcctgaccatccgcgacgctctggcgccggatgcgccccgggtccgggacgaataccaggataaccgctttaccgagacccattactccatccgcaagggcgatgtcgaagcggcctttgcccgctgcga

SEQ ID NO: 3587 - DNA, 16314 bp, Unknown
  16S sequences of unknown bacteria
acatctccgagtacaagatcgaataccccgcagagcacaacgaaaacatgatgttcgcggtttccgaattcacgcgcctcgtcaagcaggcatgcggtgcggatctttccgcatccgaggggatcacctccgccgccaaggtcatcgaattccgtcattcggccgatgcggagctcaaggatgacggctaccgctacttcttcgagggcgacagattcgtgattgaaggcgcggtgaagcgcggctgcatgtatggtgtataccgcttcctccagaatgagcttgattgggtgggaatcggcagctacggtcagaccgttctctccgaatccgatcacatcgacatctccgccgatacaaagaaatccgaaacgcccgcattccagcatattgacactcaggatcagagtcagtctcccgttgcagcgcgtttttcgaccgacagaagaactccctcggctgcgcagaattcctacggtgcggtaacacaggcacatcacggcttctctcgctacagatggggcagctactatgttgactataagcagatctgctacacggatgaagatgtgatctgcaacgtcagagacagcgtccttgagtatatcgaaaacaaactcgccgccggatcggtcatcggcgttgatcttcagttcatcgatcttgcacagggagacaacggctactattgccactgcccgaactgcatgaaggtgatgaaggaagaaaacggcgcggcatccggtcccgtcgtgcgctttgcaaaccgcatcgacgaagaggtaagcgagcagtacgaaggtcttgcgtatctcatattcgcgtacatgggaactcagcctgcctgcgtaactcccgcaagttccggtgtccgtgtgacctttgcgccgaacggctgctgctccgcgcacaagctcagaggcggtgagtgcaacgaacaattcagcctgtatgccgtaaccgattccgatataatcaacaacgacgatttcggcgaatggctcgagacgtggtgcaaactctgtgataacgtgtatgtatggtactacctgctcgagcagaacgttcagacatacacggtgcttgacaatctgtacgacgacatgaagttcttctttgaaaacggagtacagggaatgttcttcaacagcgacaaccaggctataagcttcaaccacctgtatctccagctcgcgtatgaaatgaattggaatcccgacatgacccgcgaagagtacgacgagctgacggagaagcttctcgcactcaactacggcgacggctggatgtacattgaggaatacatcgacatcctccagaagggacaggacctcgaaaacaagtgctgggactgctggggatacggaagctacgacggcaactacgatcccgcatacatgatggagatgtccgactgcacgagcgagctgatcgagcgcgcggttgacatggctgtatttgccgatcagcgcatgcgctgcgagatcctctccgcgaccgtatattatcagggatgctactcatcctatttcaaggcatacgacgacggagacgaagcgcgtctcaacgtgctccgcggccgttacgcgcttgcgatggagcgtcttgcgaaggtcggatacaatctcgattccttcacatgggcaaagctctacatgaacagaaccgtagacgacgaggcatggaacaagtgggtcggtcagcgcgaggataagcttcctcacggcgagaccgtgcgtcccgctccgccggaatacgcgaaataaacgaaaaacaaaaaggaggatcgaccgatcctcctttttcatttacggtgcagacgtactgtgtgatcgccgccgtaagcggacagcacaaatcggaatgccgatctcccggacggtgcggaaatacagagccgaaaaaaacaacatcagcctatgaccgccgcaatgccgatacatacgcaaagatatgcaagaatcacaccgaacgggcgaaatccgtccacggtcgagtgcgcttggggtcgagtgcgctttgcgtcggcggaatgtaggcgcacgggtttgatacgttttttgcatcggctgcaggcagcacggcggacgcctccgatgacgcgcggcaaacacctccggagatgccacgccgccgcggggtcaaagtctgtcgatatactcgcacgcctttgtcgccgccgccgcgccgtcaccgaccgccgtggtaagctgacgcagctccttgcggcggcagtcccccgcgacgaatattccgtcgccgaccgaaagctcctcgccgaccgaaacgtatcctgcttcatcgagaggtagaattccctcaaacggcgcgttctgcgggatctgtccgaccgcgatgaacagtccctgtgccggtatctcacgttcgcgtccgtcggtatatttgaccgtaacgctctcgagcgcgtgctctccgcctaggcgttcaatcacagcgggggtgacgatctcgatattttccgtgttccttatcttatcgacgagcgccgcgtcgccgcggaactgctcgcgccgatgtatgagatagaccttcgacgatctcgcgctgaggtatatcgcgtcctgaagcgcggtatttcctccgcccgcaacgcagacatcgcgccccgcgaagaatgcgccgtcgcacaccgcgcagtatgacacgcccgcgccgacaagctcctcctcacgctcgactccgagcggacggtggcgggaaccggatgcgattatgaccgtgcgcgcactgtattccttaccggccacggtcacgattttatcatgcactccgtccccgtcggcgatgcggatcgaggagaccgaaccgaagcggaccgacacgccgatcgcgcttatctgggatagcagcgtttcggcaaattcgtttccgctgacctcggggataccggggtagttctcgaccttcggcgaatatgtgatctgtccgccgaacacctctttttcaaaaactatgacgctctttcccgcgcgtcccgcatagagtgcggcggtaagtcccgccggacccgcaccgactacgagcacatcataaatgtcattcatcatgtgtttcttccttccgataataccgattttgccgcgttttctccgcgaaatcacggcgcggtatcgtaaagtttgccggggtattgccgccgcaataccccggcactgtttattatacccttgccgattccgcaatataagcgtttatcgctcccgctccggtgatcacctcggtgttctctccgtcgggcacaagaagcgtcggagcctgtctgattccgaactgcgccacaagctcgggaacatcgtccgcaagcaccgtcttatagacgattcccgcttcatcgagcattgcctccgccgcgcggcagttagggcaggtctttgtggtcacaaggatcgcgcaatcgaccgaacccgcgcggacgacctcctcgggtgcgggctcctgcgccttattctccgcgtgaacggttccgatcgttccgtgatttgcatacgaaaatccgatatcgtaaaccttgcggtcgcggtactcctgcgccttgccgtcgttccaattgcgcacgggacggtagtatccggttatgcgggagttgacctcgcagggttcgccgcacttcggacaggtgaactgctcgcccttgatatatccgtgattcttgcataccgaatatgtcggagaaagcgtatagtacggcaggcggtaattctccgcaatcttccttacgagattggccgcagccttccaatccggcagtttctcgccgaggaaggcatggaaaaccgtgcccgaggtatacaaagtctgaagctcgtcctgcacgtcgagagccgtgaagatatcctcggtatatccgacgggaaggtgagagctgttcgtgtaataaggagttccgcaatccttggacgatgcggtgatgatatcgggccagcgttcgacatcgtgctttgcaaggcggtatgcagtggactcggcgggagtagcctccaaattgtagagatcgccgtacatctcctgatagtcggacagtctctctctcatgtgattgagaacgtcgcgggtgaacgtctgagctttttcgtttgtaaggtcttccctgatccacgatgcattgaggcacgcctcgttcattccgacaagtccgatcgtggagaagtgattctcaaaagttccgagatatctcttggtatagggatagagtccctcgttcataagcttcgttattacggtacgcttggtcttgagagagcgcgcggagatgtccatcatatgatcgaggcgcttgtagaactcctcctcgttctcggagaggtacgcaatacggggcatattgatggtgactacgccgatcgagcctgtcgattctccggagccgaagaatccgccggacttctttcggagctcacgcaggtcgagacggagacggcagcacatcgagcgcacgtcgttcggctccatgtcgctgtttatgtagttcgagaaatacggcgtgccgtacttcgatgccatttcaaagagaagcttgttgttttccgtttccgaccagtcgaaatcctttgtgatggagtatgtcgggatcggatactggaatccgcgtccgttcgcatctccttcgatcatcgtttcgatgaacgcgcggtttaccatatccatttccgctttgcagtctccgtaggtaaaatccgcattctttccgccgactatcgcgggggtgtttgcaagatccttcggcacgatccaatcgagcgtgatgttcgaaaacggagcctgcgtgccccagcggctgggggtgtttacgccgaagatgaaggactcgatacacttctttacctcgcggtacgacagattgtcagccttgacgaacggcgcgagatatgtatcgaacgacgagaacgcctgagcgcccgcccactcattctgcatgattccgaggaagtttaccatctgattgcagagcgtagccaaatgagatgcgggggaggaggagatctttccggtgacaccgccgagaccctcttcgataagctgcttcagcgaccagcccgcgcagtatccggtgagcatcgaaagatcgtgcaggtggatatcggcattgcggtgagcgtttgcgatctcgtcgtcatacacttcggaaagccaatagtttgcggtgatcgcgccggagttcgagagaataagtccgccgacggaataagtgaccgtggagttttcttttacgcgccaatcgtttgcaccgatatactgatttacgagatccttatagtcgagcagcgtgttcttgaccgagcgaagcttctcatgctgacggcggtacagtatgtacgcctttgcgacctcggcgtaatccgcctgaatgagcacctgctcaacgctgtcctgaatgtcctcgacggcgattgcgccgttcttgatcttcggctcgaaattagccgttaccttgagtgcaaggaagtctattatgttctggttgtactgcttttcgcatgcgtcaaatgcaagagttatcgcgttcgagatttttgcaagatcaaattcaatcagcttgcccgttctttttctgactttgtacattatggttcttccttccttataaaatccttatgtttaccggaaaagccggaacacgccgccctttcccggaaatattcgtttttgagcgccgcaggcggcacggtgttcaatgcggctcagtcgtcctcgccgcgtattttcgcattcggaaaatactcacgggcggctttgaggagttcttccatgccgtcatacgaaaacggggcaaatcccttttctatcgtatattccgattccttgaaattttgaagataatagcggtcgtctccgccgaaggcttttccgagagagcgtatatcgtccgcggtatggagcccgacggcgacagtggttctgaattcgtgatcgaccgctccgcttcggagaaaatcaatgctttcgcagatcttttcgagatccgctttgtttatgcctgcggtaacatcatatttttcgggcgaatttttgatatccatcgcaacgtaatcgacaagtccgtccgagacaagcgcgcgcagctttccgggattcgtcccgttagtatcgagcttgacctgatacccgagctcctttatcatgcggcacagcccgtcaagctccggataaagcgtcggctctcctccggtgatcgcaactccgtcgagaagtccgcgtcttttcttcaggtatgccgcgagatcggcatctgtcatacaggcgtccggcttctcggtcacaagaagcgaattgtgacagaacggacatctgaaattgcatccggcaagaaagaccgtacaggcggtcctgccggggaaatcaagaagcgtcagcttctgaaatccgtgtatttccatgtttttgcgcttcctttcttcagaaaagctcttttcgctcgggcaggacgataaaaataccgtcggcggaattgtgccgcggcggtcggcgcaagagctgcttcataagctgcggtgcaacgatatgcaccgcccgcgggagaatatctcccgcgggaagcgcgctgttttttaccagtgtatgaagcactgattgaaatccggtaccgacgcgagatcgagatgggagaactcacggggctcggtgaagccgtattcacgcataagcgcgaacattgtacggttcgactctgcgcttgcacgctcgagcgcctccttttcctccggatttgcactatccatctttctcttgagaataaagtaattgtagttgtaaagctgtatgcgcgaacggcggacgttgtcgtagtgggtgcggtttccgcttccccatgcggcagcctcagcctcgtcgaagattctggcagccttatcgtagaacgcaaacgcgccctcggaatgatccttgtatccgtccatgtagataatgttggaggagtcgtcaaagtagatcgtcatgaagatgtcgtggaggcactcatgctcgaaatcgatgtactgcatcatatgctttgcggcagcgccgtagtaatcggtgcagaaatccgccatatgaacgcggaactcactctcggtcatgtagggattccagaggagctttgcaagaagatatccgcgaagctcgccgaactcaccgttcaggcaggagctgttaccctgttcgaaaacgccggaaatgccgttctccttgaagaaacgtgcgttctttctgattgcgttgaaattcgggaaggaggtggacatattggtgaagttggttgtgtagtcccaaatgtagagatgatttgtgatctcatgccacttcttcaggttggtcgggaaattgtcgtatccgttctccgcgggatcgtttacagcttcctcgagaggcttgctgacgctgcactcgatgttgcagagacgaacgatcatatccttgtgaggcttggtaactgcggggggctgtctcgtgtagcggtacgcaagcgtatcgatatgaacgccctcgaattccttgttcacatcctcctggaggcggttgcagaagcggataagcgtacctgcgtggctcttctcctcttcaaataccttgcggcacttttcgcaggagcactcgccgttgtttccgtctacctgagatacggagatgatcttgagaagcgggttctcgataagtctctttctcacattcttgaggacggtctgatacattgcctcgtcgctgaggcagggcatatcccatacgtttccggtctcgccgagatcggggaaggtatgacagaagctgcctatatagttgattccgccgccgactctctcggtgagctcgtgccccattccgccgttgtttttcagctttgcggagatcatctcgccgccctgtgcgaaccaatatacgttgcggtactcaaatcccggaagctcggtgcagtcaatctcgggaacggtaagcatattcaccttcggaacacgctcgcaggtgtcggtgtagaagcggcatccgcagcacttctcgaggaacgaataaacgccgtaaagcgcgccgcgcacctcggaaccgaggataaacaggcgtttgccctcggtcttgatggtaaagccctcctcgccgagttccttcttgcccttgccgccgcggttcgtaaatccgatcacgatctcatgatcggtcttcttctcgtcatccgtctttaccggtatttcggcatcggtgatctttttgagataaaccgcaagctcttctgcagcggttttctccgaagcggaatgattcttacgtatgattattacatactcggaatttccgttgtctgtgattctaagcataagctcctccgttttttatcggtatcggcagagtatccgatacagtctgaatctactataccacattgttttgcaaattacaatagttttttgaaaaataagcgcgtaaaaaaatcacacgattttgtgtgcactttttctaaggacacatgatattgtggttttaggcatttggaaaatacctgaaaaaggaacgtgcggtaaagtgttccgaccgcgcagagcgcgtaaaatacgatacagcaagccttgaaactcttgatttttcggcgctccgggaatataataaaggtgaaaagcgcgatagcgcaccgtcggaaaacgaaaggaatgtcacgcctgcgggaccggtacaaaaaatgagcatgaaagaaaaaatgcacacgggtgagctttatctccccggcgacgaagagatcgcagcagcacagctcaagtgtctcgaccggctttacgactacaacatgacgcgtccgaccgaagcggaaaaacgcacgaaaatgcttgaagagatgttcggggacatcggcgaaggatgctgcatagagccgccgtttcacgcaaattggggaggcgcgcactgccacttcgggaaaaacatctacgcaaacttcaatctgacgcttgtggacgacacgcacatctacgtcggggattacacgatgttcggaccgaacgtggtcgtcgcgtcggcgggacatccgattctcccgtcgctgcgcgagaaagcgtatcagtacaacttccccgtcaggatcggaaagaactgctggatcggcgcgggagtcgtgatcgtccccggcgtcacgatcggcgcgggtaccgtgatcggcgcaggcagcgtcgtgacgaaggacattcccgcgaacgtcgtggcggtcggcaatccgtgccgtgtactgcgcgagataagcgatcacgacagggagttctacttcaaggacaggcgtatcgactggtccgaggtctgatttcccgctgcaccttcacattcggcgatcccgccttatccgtatacaaaaaacagcgcacggctgcgatctgcgtccgaatacatcgggctcatccgaagacgtgcgctctttattttttgagaaatattccgctgtattttgaaaattccagctgctcgccgattccgtttatccggcatcgccgctgcgcctgcaatgccggcgggatcactcagccgctgacgcggcgatcacttcaagagcgcggaggagaagatcctcgggaatattcagcgcgggaagaagtctgaccctgtttttcgccgaaagcacgagaactccgtgctcgcggcagtacgttatcacatccgccgcgcttttcacggtctcgattccgagcatgagtcccataccggatatgctcacgatacccggctttcccgcaaggtacgagcgtattatctccgaacggcggactactcccgcaaggagatcgtcgtcaatgcgcgaaagcacgtttaccgcgcccgccgcgcagatcggatttccgccgaaggtggagccgtgcgagcccggggtgtagatatccgccgcgcgctcgccgaacatcgtcgctccgagcggaagcccgcccgcaagtcccttggcggtcgtcacgatatcgggtgtcactccgtagttcatatacgcatagagcttaccgctccgtccgttgccgcactgtacctcgtcggcgatcgtgaggatgccgtacttttcgcacagcccgaagatgccgtgcacgaaatccgcgtcgagcgcgttgactccgccctctccctgaacgcattcgaacatcacggcgcagcagccctgtttgcagagcgcttcgagtccgtcgaggtctccggcttcggcatacacgaatcccccggtaaacggtccgaattcggtatggaaggcgtcctgtccggtcgcggcaagtgtcgtcaccgtccttccgtggaagctgcttttcagcgttatcaccgtggaacggctctcgtcgccgtatttgcggaaagcaaaacgccttgccgccttgatcgcgcattcgttcgcctcggcgcccgaattcgagaagaacaccttcttcattcccgtgcgctcgcaaagcatcttcgcaaggaccgcacacggctccgtatagtaaaggttcgacgtatgcccgcaggtgtcaagctgcttcttcaccgcctcgacccattcgccgtcgcacatgccgaaggtgttcacggcgattcccgttccgaggtcgatgtatttcctgccgtcgtcgccgacgagcaccgagccttgaccgcccgtcacggtcagcggaaagcgcgaatatgtcgccgcgacatattcgctgtcggtttcgcgtatatccatttcccgtaccgcctttctcccatgatgcgcgggattattttatcattgtaccgattccttcgtcggtaagcgtttctataagtatcgagtgggggatgcgtccgtcgatgatgaacaccttgtgaactccgcaccgtatcgcctcgacgcagcattccaccttcgggatcattccgccggacaccgttttgtccgtgataagcttgcctatgccgtcaacgtcgatcaccgggatcagcgaatcgggatcgtcgcagtttcgcattattcccgccgtatcagtcatgcagatcaggctttccgcctcaagcgcaccggcaagccgcgcggcggctgtatccgcgttgatgttgtacacgtttccctcacggtcgcatccgacggtcgagataacgggaatatatcccttttcgagcatatcggtgatcggcttcacgttcaccgcagtgatctccccgacatacccgagcgcggggctgagcggcgccgcctcgatcatatgaccgtccgcgcccgaaagcccgatcgcattcgcgccgatgttctcaagcttgttgacaaggcttttgttgatctttccggcgagcaccatctgcacgatctcggcggtctccgcgtcggtcacgcgaagcccgttcacgaattccgtctttttcccgactctcgccagcatatcggtgatctcgggaccgccgccgtgtacaagcacgaccttcactccgatgagtgaaagcagggcgagatcgcccatgacggcgcttttcagctcctcgttgagcatggcgtttccgccgtactttataacgacgatcttcccgtagtatttctgtatgtacggcagcgcctgcacgagaacacccgcacgctgcgcattggtaagcttcatttcatccatatccgtgttgcctttcttccgccgttcacggtatttttaatcaggtgcggtagtctccgtttatcttaacataatcgtatgtgaggtcgcatccccacgcggtggcttccgcatcccccgatccgagatcgacgaggatgccgatctccttttcaagaagtatctccttcgccttttcctccgagaaatcgaccccggaaccgccgcggcagacctcgatctttcccttgggggactcaaacgaaacgccgatcttcgacacatcgacatcggctccgctgtagccgattgcgcagagcacgcgcccccaattggcatccgcaccgaacatcgccgccttgagcagcgacgagcagatcacggatttggctaccgtctttgccgtcttcacgtcagccgcgccgctgaccctgcattcgaggagcttcgacgctccttcgccgtccgctgcgatcatgcggcagagtgccctcgtcgtctcggcgagcgcggcgcagaaggcatcgtaatcctcccctgcttcggtgatctcgtcatttcccgcttctccgtttgcaagaactgtgaccatatcgttcgtcgaggtgtcgccgtctatgcttatcatattgaaggaatcgggaacgtcggcgtcgagcgccgacttcagcatctccggtgtgatcgcgcagtccgtcgtgacgaacacaagcatcgtcgccatgttcgggtggatcatgccggagccctttgcgattcctcctatatggcagctcttgcctcccgccgtgaagctgaacgcgatctccttgaccttcgtatcggtggtcatgatcgcctcggcggcatcgcagcttccgtcactcttcagagcggcggtgagtgcgtccattccgcccgcgatcggcgcaaggtcgagcttctgtccgatcactcccgtcgatgcgacgacgacatccgacgcgcagattcccgtgtgcttttcgacgagcgcgcacattccctcggctatctcgatgccgtttgaattgcaggtgttcgcattcccggaattcacgatgaccgcctgcgcgtatccgtccgccagattggctttggtcacggtgagcggcgcacccttcacgagattcagcgtatacaccgcggcggcggatgccttcttttcgctgacgatcagcgcaagatcgctcttctttctgttcttccttattccgcagtgaattccgcccgccttgaatcccttcgcggcgcagactccgccgcttatcttctttatatcatacattgccgttatctcctttcgtatttccgacgcggtcaaagggaaagcccctttgacgcttcgagcccgagcgcaagattcatacattcgatcgccgcgcccgacgcgcccttgccgaggttatcgtatctcgcgcacagcaggatacgttcatcatttccgaaaaccgatatctccatggcgtcgcttccttcaaacgctcccgccgaaagaaatccgccctcgtccgatgcgtccgcgtatttcacgatgcctccggagtagagcgatcggtatacttcctttatattttcgatgcttccgttcagctccgatgcaaagaccgggaccgtgacctccatgccgctgtaaaaatccgcaacgaccgggataaacgcgggagcgttttcaagcaagcagaccttcatcatctcagggaggtgcttgtgcttctgcgtaagcgcgtactgcctcggaaacgaaagaagtccgctgcgctccgcgctttcgtattccgcaatcatcttctttccgccgccgctgtatccggtcagcgaaaacgccgacaggtgcgcatcctttttgatgatccccgtctgcgtaagcggcgcgacaagtgcgcagaagccgcttgcgtgacatcccggaacggcgatacgcttcgaggcgcgcacctcggcttcgcgctccggcgaaagctccggaaagccgtagcaccatccaggagcgattcggtgcgcggtcgatgtgtcgagaatgaccgtatccgaatctccggcaagtccggcgctctcgcgcgccgcgtcatcggggaggcagaaaaacgcagcatccgcggactttatcgcctcacgtctcgcctcggggtcatgtcggacctcctccggcagggttatgatcgtgacatcgctgcggagattcagcctgtcgtatatcctcagcccggtcgtaccgctttttccgtcgatgaatacctttatcattctgttctgctcctttcgggaggatcgcttatgcatcggttttgcataataatacggtttttgcccgttattgatgaatattatacaccgatttgaattataatgcaatacctttcgaaaataaatttgcacaaatatgcgttgctaacccgtccgcgaggcggtaatttgcatatatgctgcaatttgtgaataaaaagtctataattattcacattcattcttcccgcggggattgacaacggctgtgtaatgtgctatactttccgatgtaaaataaaaagaagagtaggacaccgcgcgtgaagtgccgccggacggggagttgccggtcggacgaaaagggcttgcccttgcggttcggtgtccgcatcccgcttcgcatatactcggacattaccctccgggcctgtgctgacgggcatcttcggagggagttttttatgaagaaaacaaaaagcctccgggtgatcgcctgtgccgccgtctgcgcggcactctcaatcgtactcggaaaattcgccgcgataccgatcggcaacacgatccgcataagcttcgagaacctgccgattatcttctgttcggtcgcgttcggtcccgccgtcggcggggcgtgcggcgccgtcgccgatctgctcggctgtctcctgcgcggctacgacatcaatccgctgatcacgcttgccgccgccgcgatgggcatcgtgccgggaacgctgacgaaatatgtgttccgttcgcgcacggcgcttcccgttgcgacctcggcgctggcatcgcacgcagtgtgctccgtggtgctgaaaacgcttgctctgcacatcgcgtatgcggctccgctcggagcgctcttcgcccagcggggactgacctatgccgcgatcgctccgatcgaagcgtatctgtgcatacttataatgaagaacggtgccgtaaagaaggagcttgccgcaaacgaccgtgagaaagatatgcatcacggcaaaattcgggatcgaaaagcgatcggagagagaaaatgacttacgacgaggctgttgagtacatacattcggtatcatggaaaggcagcgttccggggctgagccgtataaccgagctttgcaaaaggctcggcgatccgcagaaaaagctgcgtttcattcacatcgccggaaccaacggcaaaggctccgtatcggcgatgctttattccgtgctgaacgccgcgggggtacgcgccgggcttttcacctcgccgtatctcgtgaaattcaacgaaaggatgtccgcgctcggacacgatatctccgacagcgagcttgcatcggtcgttgaggcggtacgccccgccgcagactcaatggaggatcgggcgacggaattcgagctcataaccgcgtgcgcattcgaatattttgtaaggaagggctgcgacacggtcgttctcgaatgcgggatgggcggcaggcttgattcgacaaacgtgatcggtgctcccgtgatctccgcgatcacgaacatcgcgctcgaccacaccggatatctcggcgataccgaagagaagatcgccgccgaaaaggcggggataatcaaaggctcacccgtcgtatgcggaactgtcggcagcggcgccgaggacgtgatacgaaaaaaatgcgccgacgcgggatcgccgctcgtcttctcgcgcgacgcggacatttccgacgtccgactcgggagagacggcatctcgtttacctttgaaggagaggacttctatgttccgctctgcgggatgtaccagaccgagaacatccgcaccgtattgtgcgcgctccgtctgctcaggcaggcgggatactgcatcggaaacggcgcgctgcgccgcggacttgcctccgtccgctggaagggcagattcgaaaccctgagcacgtctccgctcgtcatattcgacggcgcgcacaatcccgacggcgcgcgcttcaccgaaaaaaccttctccgcgctttatcccggagagcgcgcggtaatcgtcaccggtgtaatggctgataaggattaccgcgacattgccgattccttctcacgcatctgcgaccgcgcgttcacgatctcgccgaataatccgcgcgcgctcggtgcggcggcgtatgccgatgctctttccgaggcgggaatatacgcatctccgtgcaaaaacgcagaagaagcgctctccggtgccgtcgaagaagccgcgcgcacgtcatctcccgtgctctgtgcgggatcgctctacatgtacgccgagattgtctcggcgctcgccgcactcgggctcggttcggagaagtccgaacagccggaagcaaaataatgcaggatttgtcggtttgtcaatgatatgttacattgtgcttcaaaaaattattgagagcagctttaggtgaaatccagttaagcgggcgcatgggaaagttattgtatttgcgaaggtgaacggcaagttgttttttgaagtcgttgaacgagtagaacgtatgtgtcgcgtaaaaatactcattatccttgcggtgtgagcgctcaactttgccgttgtgac

SEQ ID NO: 3588 - DNA, 22909 bp, Unknown
  16S sequences of unknown bacteria
taacaaatccgaagaatccctcgatgaaaaaaatccgctgacaacatttcagcggatttttttcatacatttttattttttcgtcttggtttttcttcccctttgggggaatcttcctgccgggaatcattgtctgccgcctcttccatcttttctttcggcaccggcagatttcttttctttaaccgatcccgcaccaactggcggaataacgaataaatcacggaacaaatcggcacgctcagcaaaattcccatcacaccccaaaggctgccgccgatggtcaccgccaccagcacccacaagccgggaagccctacggattttccaaccacacgtgggtatattagatttccttctaactgctggagcactacaatataaattaaaaaccaaactgcctgcattgggtcggccatcaaaattaaaaacgcgccgattcccgccccgataaatgccccaaacatggggattagggccgtcacaccaataacgaccgaaatcatcattgcatacggcatggagaaaatcgacatgccaataaagcacaaaaggccgagaattaccgcttccgtacactggcctgaaacaaatttggaaaaaatgcggttggacaactgcccgactgataagagtttttccacccaataagaaggcaaaaaagctaacattgcatttttcagctgcatccccaactgttctttctgcagcaacagataaatggagaataccgtagccagtaccaggttcatcacaccgcctacaatggacgaagtaatccccactgttgtattaaacacagccgagccgccgtttttaatggaatctgtcacaatattgacgactttgttccaatcaatattgatgttccggaaaacatccacgggtatctgcaacgaagccagccaactctgtgcccatgcaaagaactgttccagctgacccggaagctgtgccgcgatcatcctgccagtgcgggcaatttccggcacaatcataaataacagaataaaaataagccctatcagcagcccaatggtcaaaatcacacagaccactcttcggctgcggttccaccatgcataattttttcggttcagcggcgcaaacagcttttcctctaccatacgcaacagaacattcataataaaagccatcgccccacccatgataaacggtttaaggagtactagacctttttgcagcacaccaaacacaatgtccaggtgcatggcgcctaccaacagcagaacagcaaacgtaataatccaaaggatttttttcacattgcttttgtttaattccattttgtcctccttcgagcgtttcaggataaaactgcacagggaaagacactgcgtgcctttccctgcctttgatgactatatctttgtgatatccacgacttcgatatcatccactttttctcccaggctcagacagtctgccaacacccgagccgtatcaatcgccgtaatgcagggaatagaacgctccactaccttacggcgaatttttacgctgtcccggtgaggatcgcgccctttctgagaaatagaaatcacataatccaccttgccgctttcaatcaaatcctcaatattgggatgcggttcgtgcattttgcgcaccgcgttggttgaaatcatattcttgtttaaacgcagcgcagtgcctccggtggcatacaacgtaaagcccatagacgcaaatttgtctgcaatcggcacaatatcgtgcttgtccgcgtcgcgtaccgtcaacagaacgccgccttcccgcttcattttgtatccagctgcgaccaaccctttataaatagcttccggcagcgttttcgccacgcccagcacttcgccggtagatttcatttccgggcccagctgggtatccacatcccgcagtttctggaagctgaataccggcaccttaacacagacataatcgctttccggataaagcccagttccatagcccatatcccgcagtttttcacccagcatgcagtgagtcgccaaatctaccattggcacaccggtcaccttgctgatataaggcaccgttcgggaagaacggggatttacctcgatgatatagacctcatcattataaatcacatactgaatattcatcagcccaacgatcttcaactcttttgccagacgggcggtatagtctacaatcgtgtccttaatccgtttggaaagattctgggacggatacaccgagatagaatcaccggaatgaatgccggcccgctcaatatgttccataatcccggggatcagataatcttcaccgtcgcagatggcatccacctctgcctcgatacccatcatgtatttgtcgatcagcactggattctccaattcgtgagaagtgatgatcgtcatatattcctgtacgtctttttccccataggcaatgatcatattctggccgcctaatacataagaaggacgcaatagtaccggatagccaatcctggccgctgcttccagcgcctcttcggtagtaaataccgtttctcccaccggccgcggaataccgcagcgctccagcagcgcatcgaaccgctctcgatcctccgcctcgtcaatggcgtcggccgaagtacccagaatccggacatccatatccttgaggaatttggtcagcttaatggccgtctggccgccgaactgaaccacaacgccccagggcttttcggtctcaatcaaagcccgaacatattccggattcagagggtcgaaatacaaccggtcaccagtgtcaaagtcggtggaaacggtttccgggttgttgttggcaatcaccgcttccatgcccttttccttcaaagcccaagcgcagtgaacacaacagtagtcgaattcaataccctgtccgatccggatagggcctgatccgaatacgatcactttctttttgccgctgtcccggctggcgatgtattccgccgcctcgttgtccccgccgaaattggcgtaaaaatacggggtttccgccgtaaattccgccgcgcaggtatcaaccattgaataacccgccagcatcggtttttgaatttcttttccagtcaggcggcggatggtcttatccaaaaatcccatcttcttcgccacggcataggtttcttccgtgtcgtccccgccggccagacgcagttccatatccgccagcttttgaaatttcgccaaaaaccacttgtcgatcttggtgatatcaaaaattacatcccaagaaacctgacgtttcagcgcctcatataccacgaaaattcggtggtcgtccgcatgatgcagcaaattcacaatctcttcgtcggattttgcttccaactcgggcagagtcagtgtttccaaccccagttcgatggagatggcggctttcatcatggccagctcaaagctctgaccaatcgccataacctcgccggtcgctttcatctgagtacccagcgctttgtctgcgtatacaaatttatcaaacggccagcgcgggaacttgactacgcagtaatccagtgccggctcgaagcaggcgcaggtttttccagtcaccgcgttgggaatctcgtccaaacagtaaccgatggcgatttttgccgctactttggcgatggggtaaccggtggccttggatgccaacgccgaagaacgggacacccggggatttacttcgatcaccgcatactcaaagctgttcggatacaacgcaaactgtacgttgcagccgccttcgatcttcaattctgtgataatattcagtgccgcggaacgcagcatctggtattcccgatcagtcagcgtctgggatggggcgactactaccgagtcgccggtatggattcccaccggatccacattttccatattgcagacggtgattacattgcctttgctgtcccgcactacttcgtattcgatttctttccacccggcaatacacttttcaattaacacctgagtgattggggacaggcgcagaccattagatccgatctcctgtaactcggccttgctgtaagcaataccgccgccagtaccgcccagcgtaaaagctggacgaacaataaccggataaccgatttcttcggcaaatgccagcgcatcatcaatatgctccactactttagacggaatacagggttcgccgatggccagcatagtgtccttaaatgcctgccggtcctctgcctttttgattgtctccggattcgcacctaaaagcttgactccatgcttctccaaaaaaccctcttctgccaattccatggccaggttgagtccagtttgtccgcctaaagtaggcaaaatggaatccggcttttcctggagaatgatttttttcacaatttccggcaccagcggttcaatataaattttatccgccatagccttgtccgtcataatggtggccgggttggagttgatcagaacaacctccagcccctcttcctttaaggcgcggcaagcctgggtacccgcatagtcaaactctgccgcctgtccgatcacgatggggccggaaccgatcaccaagacttttttgatatcgctgcgttttggcatcttatttggcctcctttttcatcatggcaataaactcgtcaaacagataagacgtatcctgcggacctgcgctggcctctgggtggaactgaacggtaaaacaagacttatttttgtaccgcacgccttctaccgtgttatcgttggcatttacatggctgacttctcccaccgccggatctactgtatctccctgtacggcatagccatgattctgtgaggtgatacaggttttgtcatgggccagatcccgtaccggctgattaacaccccgatgcccatatttgagctttaccgtcttagctcccgtggccaaagcggtcagctgatgccccagacagataccgaacatcggaatacctgcgtcaaatagttttttaatctgtgcgataacctccacattttcctgtggatctccaggtccgttggaaagcatgaccccgtccggattcatggccagaattgtttccgccgaagtctcagaagggacgatcgttacgtcgcaaccacggctttttagcgaacgaacaatatttcttttgtaaccaaaatccatcagaacgacctgataaaggccttgctcgcttttttctttctgaattgttttgcagctgaccgacttgaccgcatccacaatggtaaaagaacggatatccgccagcagcttttcccggtcaactgtctcgtactcggtcgtcaccgccccattcatcacgccatactcccgcaattttttggtcagatgccgggtatcaataccgctgatggcaattacattttgctgttttaaatactggtcgatattcattgccactcgaaaattggacggctgatcgcaccattcccgtacaacatagccacgcacatgggaggcggcagattccatgtcatccagattgatgccgtagtttccgatcaaaggataagtttgggtaacgatctgaccgtaataggacggatccgtcaacacctcctgataaccagtcataccggtagtaaatacgatttctccaatggcggttccctgtgcaccgaaggatattccctctaaaacagtaccgtcagccagaaccagccacgctttttttccctgttccattgcaatctccattccgccgctgcgcgccggcgtgctccgatggtttcccctgttctgcgcagcaaaagacagggggatctgcggtttttcataaacgaaaatggacggtttctcctgccctgcccgatggctgtgcaaggcagaaattgaaagaatattatttatcaaatttgcggctgccgggtttgaccagcggaatacccgctttgcacaaagggcactcatccgcttcgtaggtagcaatttccagctgcattgcggaataaaccggacagaaaatctcattcacccgacggtctacaatgcaggcaataccgacaacctcgccgcccagttcttcgattaccttggcggtttccatagaggacttaccggtggttactacgtcctccgtaatcagtactttttcgcctttctgaatttcaaagccccggcgcagggtcatcacattgttttcccgctcggtaaagatggcgcgcttgcccagctgacggcccagctcatacgctacgataatgccacccatcgccggaccgcacacaacgtcgatatccaaatctttcactttttcggctacaaccgacagtacctcggcagctttgtccgggtactgaagcaacttagcgttttgcgcatagcggtcggaatgtcggccggaagacagcaggaagtggccttccagcaaagcgccggtttctttcaaaatttcaatagacataagcgttactctcctttttctttcatgcagatccattgtttcttaccaatctatacccgggctgcgccgatgatttcgtcaaccgatcggcagccctgatctttcaaaaattgttccaacccattgataatatccaagcagatatccggttttacaaaattggcggttcccacctgtacagcagtagcgccggccatcaaaaaggctgccgcatcctgccagctggaaatgccgcccaatcccactaccgggatttgaaccgcgccgcaaacctggtaaaccatccgcagggcaatgggcagaatcgccgggccggaaagtcccgcgaacacattgttaaacacgggttttcttttgtagatatcaatggccatggcctggaacgtgttgaccagtgacagagaatccgcccccgcttcttcgcaccgcaaagccatttccataatattttccgcgttgggagaaagcttgaccatcaaaggctttttgcagaccgcccgcacctgcttgaccgcttcgtaagcgatgtcgcatttaatccccagcgccatacccccatgtttgacgttgggacaggaaatgttcagctcaatcatatccacgtcggtctcgtttaatttttccacaccctccagataggactcgatggtgctgccgcctaagttggcaatcaccgccgtatctttctggcgcaaaaagggaagatcctcccggataaacgcgtccaccccaggattctgcaggccaatgctgttaatcagtccgctgggtgtctcgtacacccgttctccctcgttgccaaaccgttcttccagcgtcaagcccttggagctgataccacctaggcgggaaatatcaaaaaattgatcgtattcctggccgaatccaaaggtacctgaggctgcaatcaccggatttttcaaggttacgccatttaaaaccgtcttaagcatagatttcctccccctcaaacaccggaccgtccttgcaaatgcatttcgccccgtgggcggtgtgatgggtgcagcccaggcaggcacccacgccgcaggccatgtgccgctccatggatacataacaagggacctttttggcaatgcagctcttggccagtttttccatcatgatctccggcccgcaggtgacgaccatatcaaagtccgcagggtcaaacagatcggtaacaaagcccttgtgtccctctttaccgctgtcagtcgccacacggatctcctggacatacgacctgaaagaatccagcgcgtagctttgatcccggaatccgcagcagagggtcacttcacagccggacaggctcttaaccgccagcaaaagcggcgcaatgccgattccgccggacaccactgcaacctttcccttgattttttcaaccgggaacccatttcccaccgggccggaaagttccaccgactctcctgcctttttctcgcttaaaaggcgggttccctcgccccggacttcatataaaaaggtaactctttccccgtcggcgtcatgcaccgaaatggggcgggataaaagcgggaacttgtcccagccgcggaccatgaaaaactggcccgcatcggctggataaggccaccagacgatcattttaaaaataccgtttcccagcggtttattttccacaacaacggctgattcgcagtgcttcacaggcattttggatctcctctctcatacgcagcacttcatttctggcttcctttgcaaaatccgtatccggtgcgccggctttgcgatacgcaagcagcaccgcgcgggaggaattgaccacgccgccgttgccccgcaccagatatttggcaatatcctcggccttgcctccctgagcgccgtagccgggaatcaggaagaaggtcgtatccagcagagaacggatgctttccgcttcttcgccggtggtgccgccgatcaccgcgcccaccgagctgaatccgcattctcccaggaactccttaccgacctgctgcaccgaggtgccaactacatcatataagggcatctctttttcggtctgcagatactgaaaatcccgggagcctggattggaggtcctcaccagaatgaacaggcccttttctttctctttcacatagggcagataaggggtaacgctatccattcccatatacggagccagtgtcacaaagtccgcctcaaagtccccttcaaagtgacccttcgcatacatttcggcggttttggcaatgtcgccccgtttaatatccgcgatggaaatgagctttttgtctctgagataagccagcgttttgcggtaagcttccattccttctaggcccagcgactcataataagcgatctgcaccttgtagcatccggctacatcctcagtggcatcgatgatcgctttgttaaataaaaacaccgcttccccggcgctgcccacctctttctgcaggtattccggcacgtaagaaatatcggtatccagtccaacacaaaccacgcctttttttgcaaccgattcatacagcttgtccacaatcatgttctgttcctccatcgttgtattctaagcggacgcccacttaacttttattcctgccaggtggttttgcccgccttgatggtgcgcaccacttttccctgtaagcgcacgccgtcaaagggagagtttttgcctttcgaggcaaattgtgctgcgtcaacaacccattcccgattttcgtctaccagcgcaaaatccgcgtcatagccgggcagaagccgacccttttgaacgcccagtattttcgcgggacctgccgacatcagccgggacagcaaagtcagcggcaggcggcgttctttcacaagtatagtgtaacatacgccgaatgcagtttccagtcctaccatgcccggcgcgccatttttcttatcttccgccgtgtgtggggcatgatcggtggcaatcgcgtccacatatccgttctcaatggcccagatcagaaaatcccggtcctctttggtacggatcggcgggttgacccgatagtcactgtcggtgaaccacaaatgatggggcgctacctcacaggtcaccggcgccttggcaatcttggcgcggatcacctcgcccattgcttcctcggtggaaacatggcacatatgaagccgtgcacccagatattttgccagatgaatatgctgtgcggtggcgatgttctccgccagccggtaatcgtaaggggaaatctccatatcctccgcgtgggaaagaattgtcagccctttttctttggcgattttcatggcctgggccattacatgattggacatgagccctttgccgtcctctgagaggagtttcaccgtgccgtccagttcctttaaatggtccacggtccgtccgtcaaaattttttgtcaccgatacgcactggtgtacgtccaccaggcccatcgcttccgcctttctgcgtatataacggactgtttccatatcgctgcacaccggattggtattggccatcaggttcaccgcggtatagccgcctttggccgccgcccggcatccggtttcgatatcttctttctgggtaaagcccgggtcgcggaaatggcagtgcagatccacaaaagcgggcatcagcgtcaagccggcagcgtcgatcacctcgccggcgcaatccaggccctgtcccacagcggcgatttttccattccgcaccagtatatcggcatccaattcagatgcttcatccaccaattttgcatttttgattaaaagttccatggattctcctattctgattcatcgttttacgatacaaaaacataccgctttatacttcaatggtggcatcacagtattcgcagaccttcccgccgtctttcacacggatcggcagtgtcaaatctagattggacacacacttggggtttttacagtgcaccgtcccgttgggccgggggtttacacaggtcttttcaaacattttcgcaccgcacacggaaggatatccctcctcaccgcccaaaaggcttaaaatcagcgccatgcgtacatacattccatactgggcctgcacaaaataacaggctctgggatcttcgtccaccgcgccggtaatctcgttgacaatcggcatgggatgcaggacaatcatatcttctctggcgttttccatcttctgcacgtccagaatatagctgtcttttagccgtagatactcctcttgcgaggcaaagcgttcccgctgaatgcgggtcatataaaggatatctacctgccggatcgcatcgtccaaatctgggttcagcgtataagagcagccctgcgccgcctcaatctcccggataacataatccggcactctcaattcttccggtgaaatcagcacaaaatgaatattttcataccggcacatcgcgtggatcagagaatggaccgtacgcccatattttaaatcgccgcacaatccgatggtcaaatcatggaagcggccttttttggtgcggatggtataaaggtcggtcagtgtctgggtgggatgctggtgcccgccgtcccccgcgttgatgaccgggatgaaagaatgcagcgccgccacatgagccgctccctctgccggatgccggatcaccgcaatatccgcataacatccaatcatccggatggtatcggcaatgctttctccctttgcggcagagctggatgccggatccgcaaatcccagcaccttgccgcccagccgttccattgcggcttcaaaacttaggcgggttcgggtggaaggttcaaaaaacatggtagccagaattttcccaacacagctgcgcgcatatttttccggcttggcgatgatatcgtcggtaagctggaacagtttttccagctgttccactgtaaaatcggtggggtaaatcaaattttttcctatcaacatgcaaacgctccctttctccggctttttattttaactttgtgaccaatcgcagtacgccactatcatttcgtcctttaaagtgtctttccataaaaaaagctttcctatttcaaaataggaaagccaatctacctaaaggaaaacccatctcatagctgccgaacgaaaaagcgaaaagaagaaacaccgctgccatagaccgctctttcttcatgccattcgctcgcgtcatcatctaaggacctccttgtttcgccgtgaatccaaaattttttcaattatatcattctcaaaccaattcgtcaatgctcttttttacaaaatttttacgtctttgcctttccgtttttccatgccgttctcaagaattaccttttgcttctgagtgaaaacctgcttctaaacgtatttttgaaaaaaggaaagcgcagggaataccctgcgctttccttttttatttgatctcttccatgccgcccatatacattctgagtgcttccggaatcttgacagagccatcagcacacagattgttttccaaaaaggcgatgagcattctcggcggagccaccaccgtgttattgagcgtatgtgcaaaataattgcctttttcccctttaatccgaatacccaaacggcgcgcctgcgcatcgcccagattggagcagcttcccacttcaaagtattttttctggcggggactccaagcctctacgtcaatgcttttgactttcagatcggccaagtcgccggagcagcactccaacgtgcgcaccggaatatccagcgtgcggaaaaattctacggtatagccatacagcttttcgaaccattccatgctttcttccggctcacagatgacgatcatctcctgcttttcgaactgatgcacccggtacagtcctctttcttcaataccgtgggcgccaacctctttgcggaagcaagcggaatagctggtcagtgtctgcgggagctgttcttttttcagagtggtatcaatgaatttaccgatcatggaatgttcgctggtgccgatcagatacagatcctcaccctcgatcttatacatcatgttttccatttccgcaaaactcattacgccggtaaccacgttgctacggatcatgaaaggcggtacacaatagataaagcctttgcctatcataaaatctctggcgtaggacaaaatcgccgaatgcagccgggcgatatttcccatcagatagtaaaagccgttgccgcttgtttttctggcgctatccagatccaacccgctgagccgctccataatatccacatgatatggaacttcaaaatctggaaccacaggttcgccaaaacgttccacctcaacattttcgctgtcgtccctgccgatcggcaccgaatcgtcaatgatgtttgggataaccagcattcttttgcggatctcactctgcagatgggtttctcttgcctgcagctcctccagtttcggaccaatgctggcaaccatccgttttgcttcttccgcttcctcttttttgccccgtgccatcaacgcgccaatctgcttgctggacacattgcgctgattgcgcagcgtatccgcttcggttgccgccgtccgcagctgtgcgtccaattcgattacctcgtccaccaaaaccagtttttcatcctggaatttctttttgatgttttctttgaccaattccggattggttcggatcaagcgaatgtcgatcatgttataaatcctccttcaaaacaaaaaaggaatcttccctcccttttcatgggacgaaaaattccgcgttgccacccaaattgccaaacaaaaacgtccggcctcttgctggtacgatacagggtaccggcccccggctcctcaccggccgctcggaaagtggaccggacagcctcgctgccggacttacaccaaccgccgactctcttacaaactgcgctgacctttattttcctcaaatgcgtctgatttgaaatttgtttggattatagcatattttcccctggaatgcaagaaaaaccctccatatttcataaaaaggggaaaacatcaaaaagatcgtataaaatatgtttttaatatgaaaaaaatgtaaatattggcactctatacttgacagtgctaatattctgcattatactaaattcgtaccaaaggaaaggtcctgaagaggccttatcccataggcattcaaaggtaataagaaatggaggaatgacttatgatgcctagtatttttggtgaaaacatgtttgacgattggttcgactttccgtttgagcacagcctgttgaacggccgcagcgcactgtatggcaagcacgaaaaaaatctaatgaaaactgatatccgggacaccggatccggctatgagctagatattgatctgcccggtttcaaaaaagaggagatcaaagcaaaggtagaaaacggctatctgaccattagcgccgaaaaggggttggataaagacgaaaaggacgaaaaaggcgcctatattcgccgggaacgttatgttggccagtgcagcagaagcttttacatcggagaaggcgtagagcaaaaagatattcgtgcaaaatttgaggatggcatcttaaaactttccgttcccaaaaaagaacagccgaagctggacacaaacaaatatatttccattgaaggttaagaaaaggcccgattcatcgggccttttctttttttatttcagattgtaagagatgataaaaagcggtatactgtttttgtaaaggagttgtgtctatgcaaaacgctgttccgatgcaggtcatcgcccatatccgcagcgattttcctagcaaattcggtattccccgccaaagcgggttggtcgatgcgctgaaagccgaaattatctttgagccgccataccgcaatccagacgcttttcgcggactggagggatactcccacatctggttgatctggcagttttcccaagcgatacgggatcattggtcgccaaccgtccgtccgccccggttagggggcaacacccggatgggggtatttgccactcggtctccttttcgccccaaccatatcgggctatcttgtgtccggttggaaaaagtagaactgcacggcacgcaagggccgatactacatgttgccggcgccgatttaatggacggtactcctatttacgatattaagccgtacctcccatataccgatgcctatcctgacgctaaaggaggtttttcctttcagcaaaaaaatggcgcattggaagtttctttccccccacagctgctggaccagattcccgccacccagcaaaaagcgcttcttgccgtgttggcacaggatccccgccccgcgtatcagcatcagccaaaccggatatatggcatgccgtatgctgattttgaagtgcgttttaccgtagacgacaaccgtttgaccgtgtgtggccttacccatcggtgttcataaaaatattctcccgccccaaaaggatctttcattctcctcgctacacaaaacttcagcgcaacgccagcgaatctcagtaaaattagaggaaatgcgctcgttttggaacatagcattttttgctatctttaaagaaatcggttttgtctttatcgtccgtttttggcaaaccacaatatcaaaattctgaaatttttagcaccattttttctattatagtattggcattttgtctcgtatttgtgatacctttgacaggttgcaggaagacatctgagaagagtaaagtcgcaaagtctaatgctaccgtcaaatggtttgattgtctgaatgtggatgaaatggtttgggacggtattaaagaatataatttggacgaattttccggagttacttttcgttggcattccgaacaattggaggctgtgacagataagggaattgttccgttgtataacggaatgccaatttggagcgtttatttctatgatttaactggcgaatcctatccggatatcacttttttgccggcattagccaatatatttgaaacaagtatcgatttacttattggcatggatacaatacgcgctgaagaaacgcgatttagtatccataaaaaagctgttgcatatcagcaatgtggagattatgatttagccgaaaaaacatacagagatgcattgctaatatatccgaataaacctggtatgatttttggactggcaagcacactggcattaaaaggaaataccgatgaagctattgaactgatggaaagaggattacctttgtcaatcaatgagaaacaaaaagcaactatacgaacaacattatgcttcttatatctaaaagtagggatggaagataaagcaaaacagcagcatagaccgccttcagatcggccataagggctttcagatccttgtaggatacatacttgctggaattgcgtagctggcggatgatgcagttctgggtctcggtctggaggaaggtggcgtggattgctgcgtcaaagcccgttaaatgtcggtgcaggcgataaaaatgtcctctgcgccccagtttttcaggtcgttgagcacggtcgcccagaacttggtgttctcgttttcaccggcccacatacccaggacatctttccagccatccaggtcgataccaatagcaatgcacaccgctttcttcacgatctgcccttcgctacggacatggtagtggatggcatccagaaaaatcacggtgcagatggattccagaggccgctgctgccagtctttgacgatgggcaaaatcttgtcggtgatctggctgaccgtgctgtctgagacggaaatgccgtagaggtcctggatatgggcctcgatatcgccagtggtcatgctcttggcgtacatggaaaggattttttcctcaatgtcctggatgatactggtctggttctttttcagcacctgaggctcaaagtcccccttccggtctcgagggaccgatacctccacatctccaaagctggtgcgcagcctcttgctgctgtggccgttgcggctgttatctgtgtccttgttcttgtggtcgtatttaccgtagcccagctcgtcatccaactccgcttccaggccattctccatgagctcggcaatggtcttctttgaacagattctggatgtcgtccatgctgccgatgttagccatctgcaacagctcacggatcttttctcgacgagcatttccttctggggtgcgattctttctggtcatatgtaaaacctcctgtacggtgcctctattctacaccacacaggaggtttatacaaagtttcggatggcctctaactattatctttttccctttcatctttttcctccttattcaaaatggggtattcccatatgttctgatacgtcgatgcagtgatctaatttgtatgaaaaagacgaataccctgaacaaatataaccgtttaaaattcattccaccaaatagaatcatctgaaatatattctggctgaatcgctaaaacataaaaatatgaataacgatttaaaccattatcttgtttataatcgggaaactcaatacaaaaacgataaaacggcataattaatgtatctgattcttggaaaggccaataagttatgatcacatcttttatcatttcttcttttatagaaaccggtttttcaaatttatgtaaagaagtgatggaaaaatatttcccattcataagcatagtttaagcttgttcagatgaaatgataggatattgtccaatatattctaaacattctggactacgcttgctaatagatacaagttgattctctgaatctggataaaacgttgatttattgaattggaaattgattaattgttccagattactaaccctttttcgaaaaactcaaaaagagttcctctaactccatcttgtctataccaaatataataattttcttctggcgtggtttgtcttattatggcagcatacatttctttcaaataaggaaatgtttttttgcttttttaatcaatattccatctggaaaatataaagttagtcggaatcaaaacgggggatcgaattgaatgtccaaacatccatcatcataaatgcatattttgttcgaatcatattttaatacagttttcaattcatcattatatatgatttttactttttctgtagaaaagccgagagcttcagcatagctttgcgccttagtggctctttcatttttctcaaagcatccactttagtatttcttattgaaaaaactggtaaagccgtccacttttgtttactaaaactatagttttcataattaagatctttataatcgtatgcacaaataacttcattatttgaatcataaacaacaaatttttcaaaagacaaaattggtaaatagattgcagtgtctcccggaaagcttaacaagacaaatataaccatgactattttaaaaaaagaccattttttagcaaacatcatattactccatgaatttatcaatttggaaattgcgtcaagctacttagatctatttttgtattaggttccaatcgaaatatttctgatgcgtccttgagaagaaaatcaatatctgtcatataatatttaaacatttcatcttcatatgcttgctacggaactttaaataaaggaataaataatataaacggattgcatttcccttttagatattgcacagttaaatgacatttttaagggaaaaggtataaaaaaccttgtcataccagtttagcgcctgtaaagcctttgcttgcaaggcttaccgaacctctaaagcgtaaaaatggtataaaaaaacaaggcagtcctaaactgcctttgtgggcgtgataatgcgccctgtacctatgcatatcgtcttatttgtggtgctaaaatggtgcctaactctacaaaaccggcttatacagagatataaaacgataaacagaaatatgcgaaaaagccttgatttaaggtgcttttaagcattttcgttaaacacttacaaaagcttataagacgatttttatctatacaatcaataaaaaatcccctgaacctaaattcaagggattttggagctgctaaccagatttgaactggtgacctcgtccttaccaaggacgcgctctaccgactgagccatagcagcatatggcgacctggatggggttcgaacccacgacctctagcgtgacaggctagcgttctaaccaactgaactaccaggccatataattcacaaaggagcatcccgtctgcaacgttgtttattataacaggagttcccccaaatgtcaacacttatctaaaaaagttcttttgtcccattttaccggccttgttcgctgcatatctattgactcatttatattgatatcttataatgcctttatcgaaagggctgccttcccttttcaacaaacgccctttccttaatatcattctcaagtgttattatctttgtggaattgcaaccaaaaggaggttgtgtggaaacgcaggaattaaaagatattttgctgtcccaagctcaagatcacggtgcaaacctttgcggggttgccgatttaactactgactcgcaatggattcgggaaaattacggcgatctttgtgcgtcttttccccgtgcagtttccatcgctattttctttccgagagaaatcattcaggagcaagccgtggggccaactcgctcttatagctacttttatgccgcaatcaaccgccagctggattccattggatttcgtctttctaattttctgcagcaaaagggattccgctcctatcctatacccacctctgattatcgacaaactcatcttgttcctggattacaggagcaggtcgctgtcaaagggaccgaaggatttgaaaaaatgcaaaccgaattgatgggcatgttcagccaccgttttgccgccagccacgctgggcttgggtggattggaaaaagctgccatctgatcaatcctcaggtgggtccacgtcttcgcttgaccaccattcttaccgacgcacttcttccgccggatcagccaatttccaaccgctgcggcggttgtacccgctgccgggatgcctgccctacccatgcaatcgtaggtattcctttccggccggaaacgccgcctgctgaacgcttccataaagaaatctgttacaattttttggaagatctttccgttgtatttggacagcacacctatgcaaaatgtttggccgcctgcccttggggcagcaaataaaaatactcgtttctaagaattagacgtccggaaaaaagttttccggacgttttgcaatttaaaattaaaattcttgcaatcatttgttccttcgaatcgaacaattaccgcttaccgtatcaacgatcagcaaatttccaccgtctctataaatcccttttccattatccagtgtcatcgaaaaatcagaataaaacgcaccggaaaccttgtcaaaggacaaggaaaacccattgttttctggtatgaaaagggtcacgcctccagataccgatgaagctttaaaagacgtcggacaaatggaactatttacctttcacgcaccagaagttgccgtacatgttattttttccgcctctaatttttctatgcgaatatttgcagaaacggcatctgcctgaacctcgcgcagatccggaagccaaactccgcggaatcataacctgcagttttttgtcgggctgtctgccaaacagactccccttttcctggaaacggatcaccaaaacgctgtcactcactccatatcgcagggaatttttttcattcaaaggagtatcggagatctcggtaaaatatacatcctctccctcatagggaatcaatgttatttccccgcttgtccaactaatatccagctgttttatcccctctgtcgaaacatggtagtttcccaatccattccccaatgttgcacgagaatctgctttccaagaaaaatcctcccaagcattcagggaaacaccacaaaatggaattcccgtcagcccacaaattaaaattcctgtcaacaaaagaaaaatgactccccaacagacaatgcgaatctatacagaaattctcaaacttacactcctttccctgttgataaacgctacttctattttttcaaatcaaaacaggcctttaaaagctgttctgcagcagtggcaatcaaaaaaatcacccaagtgatatgccatgcatgtgtagaaaaactaaggataaaataaacagccaatgtcagtgtccacaaagcgctggaaagggatttcatcaaattttttctttctccttgatccgcttgccacactttaaaatcttctactatcgtgtcttcttttttcagatattgcggttttgttttcgccgtatagataagcaggcctacacccagggcgaccatcccaatcatcaagcaaattccaatgttctctaaatgaagagcttcaaacagtaagacagggatgaccgaaagaataatgataattactccaactgctgtcaatattgcagaacggttgtggttacgatagtccgcttcataaaatggttcatctaagctgcgaattagatcattgatatccccgattcctgccactgcaatattatatgcagcctcttccggcattccctcagccagcagatctcggtacttttcgattagattctgaaacatttcttccttcaactcataaacctttttcgtttgtggtgcatccgcaaacaaatcttctaaataatctcgaattttattctccatctttctcctcctcaatcaataggtcaatcagcacctttgctgcgttccattcatctaccagccggaagaaagtttctgtcccccaatctgtaatagtataatatcgtcgtctagcgccggtattttcatctccccaataggaggagatacatccggcctgctccagccgacgaaatgcggtatataatgttgcttcttttaattcatacattcccttgctcttgtgttgaataaccttattaatctcatatccgtagctgtcttttttgatcaactgggccaaaataatgacatctgtatgccctcgaattaaatccgatgcgatcgacatttctctcctcctttcttttcaaacatataatatatcaacatacctcatctgtcaatgtatattgtcggatgattcttctttaaaaaataaaatccgtacgggattttttgaaatatcaatctctcaaagtccgtaaaaccatagcttatttataacaaaacgctgcatttctcagtcatataccattctaacagccaatataaggccgaattttcaaaaaatatatagttctcacttttctctgcctgcaaagccaaaaatcattgcaaggtttttcttttttcaacaaaaaaagctccgtgcaattttgcacggagcttttaagtacatgataaggaaaagaaagattaagcgttagcttccaagaactcagttctctgcttgttccactcttccatgtatttgtccagaccgccgtctttcagcttctgaacaaagttttcccactcagccgcggtattgtcgccataaccgccgaggtcaaaggtagtctgattttcagttaccagagcggagataacggcccactcagcggaaacaggagcatagtcgaaggtgaagccccagtaaggccactcttcgtcttttacctgagtttcgctcagatgtttgttggcagcgttgattctctcgtcatcagtcttaggccacgggaagtctttatgacggataccccaagcccaaccgtcgaagttgtagtcggcagcttccggaccattggaaatggtgttggtcgcttcgtcgtagatataatgtctgccctcgaaaccgccagccagcagcatgtaggtctcgtagtcatttttgatgaagtccagagcaacagccgctctctcaggaatcttagagaaggtcgggattgccataccgtcacctatgaaagagtcacgcagtgcgcggtagccttccggatagatgtcgaacagttccgctttaatgcctttttcacgagttgcttcgatccaggtgataccgttgtagtagttattgtaagaaacagcagactgtttattctggaacagagtagagatagagttggtgttggagatcgcatcagaaggccatacgccagctttcgcgtattctgccattcccagagcatactctttgtacagatcagaggtgtacaggaagaaaggattctcaaacttcggatcagacagctggttgtagtatacatagtcagaagcctggttgttgatcaggttcttcccatacagcaatgcgatctgccgcaggttggcggactgagaagcatagaacgcatacataccgttggaaacttcgttggtaccgatagccaacagcaagcctttcagatcatcataggtgttgatcttatcagcagtatagccatatttctctgcaacttccatgttaacaataggacctctgtccgggaagattgcagcggtagaacggggaaccatgtaaattttgccaccaatataagtctctttccaagcagattccggcagagtcgccatggtctgaggcatgt

SEQ ID NO: 3589 - DNA, 3533 bp, Unknown
  16S sequences of unknown bacteria
gcggcggtggtattttctttattgtggcctataatgtattatctgcaatttttcgtggactgggtgacagcaaatccccgctgctgtttgtgctgatagcctgtatcatcaatatcatcggggatctggtgctggtagccgggtttcatttagatgcggcaggtgcagcagccgcaaccgttctggcacaggcatgcagcgtcgtctttgcaatcggtattctggtaaaaaagcatctgccgtttacgattgctcggaacgattttaaatggaatgcgcagtgtggaaaatttctgaggatcggtctgccgcttgcttttcaggaagtgctgacgcagctttcttttcttgcactttgcgcatttgtcaaccggcttggtctggaagcgtcttccggttacggtgtagcctgcaagatcgttaattttgcgatgcttgtaccgagcgccctgatgcagtctctggcatcctttgtatcccagaatgtgggcgcaggaaaagaaaaacgtgcaagacagacgatgttcaccgggattggtgtaggacttgtcgtcggctgctttgtattttgctttgtcatgttcaggggcgatctgttggcaggtatctttacgacggatgcggcggttatccaaaggggctatgagtatctgaagggctttgctccggagacaattatgacagctttcctgttcagcatgatcggctactttaacggaaataaccggaccgtatgggtaatgacgcagggaatgattcagacgcttctgatccgtcttccgtttgcctatgtcatgagcatccagccagatgcaagcctgaccatgatcggtctggcagcgccggtgtcgacgacggtgggcgttgtgatgtgtgccgtttattactggcatatgaatcgcaaaaaagcctgagaataccagaatggagtttttatattatgagacatatacagataatacacaatgtacaacagagcctcttggccatgcaggatctgtcttatcgggattttcaggtgaagctgatgccgacggtcgacaaagagactgtgatcggagtacgcacaccgcagcttcgttcctttgcaaaagcttttggaaaaacagcaggggcaggagaatttctggcgcagctgccgcacacctactacgaagagaacaacctgcacggcatgctgctggggcagatacgcgattatccggaagcgatcactgaactcaaccgttttcttccatttgtcgacaactgggcgacctgcgatctgctcgcgctgccggtactcggaaaacatctggatcgactgatcccggagattgaccggtggctgacctcggatcacacctatacagtccgctttgcgatcggccttctgatgcgttattacctggaagatgcatttcgaccggaatattcagaccgggtattgcgcgtctgctcggaagaatactatattaatatgatgcgtgcctggtactttgcgaccgcgcttgcaaagcagtatgacgcgattctcccttgccttacggagcaccggctggatgtgtggacgcacaataagacgattcagaaggcgattgagagctaccggatcacaccggagcagaaagcatttttacgaacgctacgtgtgaaaaagaatgcataattgtagattttttcaattgacaagtcaatataataaaacaaagaatcggtcatataataataatttctgagtatcattgcatggccgatttacacttttagctacttgcctgattcgcttaaatgcgcgtcgaccactcctggcagttccagacttttgtcacgacatcctgatagaattccggttcgtggcagatcagaaggatgctgcccttgtattcctgcagggcgtgcttcagttcagccttggcatcaacgtccagatggtttgtcggctcgtcgagcaggagaatatttgtttcggtattcatgatcttgcacagacgtacctttgcctgctcaccaccggagagtacccgcacctggctctcgatatgctgtgttgtcagcccgcattttgcaagtgcggcacgtacctcatactgtgtccatgacggaaaaagcttccatatttcttcaatacaggtcgtcgtatttttctgatccgattcctgctcaaaataaccgatttcctgataatcgccccggtgcaccttcccggaaaacggaggtgtcaggcccaggatacttttcaggagcgtcgtctttccgattccgtttgcaccgacaagtgcaatcttttcaccgcgttccatccggatgttcagcgggcgggagagtggttcatcgtatccgatcaccaaatcctctgtctcaaagatcagttttccggatgtacgcgcagtgcggaaggtaaattccggttttggtttttcacgtccgagctcgatcacgtccatcttgtcgagctttttctgccgcgccatcgccatgttccgggtcgcgacgcgtgccttattgcgggcaacgaagtccttcagctgggagatttcctgctgctgacggttgtaagccgcttcgagctgagactttttcatctcatagacctcgcggaaatggtcataatcgcccggataacggtcgagcgatttgttttccatatgataaatcagattcacgacgctgttcagaaacggaatatcatgagagatcaggataaaagcattttcataatcattcagataacgcttcagccattcgatatgttcctcatccagatagtttgtcggctcgtcaagcagaagaatatccggcttttcaagcaaaagctttgccatgagcaccttggtacgctgtccgcctgagagctctgtcacatcccggtccaggccgatatccgtaaggccgagcgcacgtccgacttcctcgacctttgtatcgatcagatagaagtcatgatgctcgagcagctcctgaatcgtcgcggtttcttccaggagacgtgtcatttcttcctcatcggcactggccatctgttcaaacatttcattcatggacgcttccaggtcaaataaaaaagcgaatgcggtcttgagcacttcgcggatcgtcatgcctggctcaagtacggtatgctggtcgagatagccgacgcggacgttttttgcccactctacagttccctcatcaggcatcagtttcccggtaataatgttcataaatgtggactttccttccccgttcgcgccgatcagtccgatatgctcaccctttaacagacggaaggaaacattttcaaaaattgcccggtcaccaaaaccgtggcttaggttttttacatttaaaatcatgcggtttaactcctcttatatgtcagattcttatcctatacaaaacgaatgccccggatcctttgacagaggcggggtattgcgcttttggtattatagcatgatattatctggctggctagagcgtgtttgaaaaatgctttttatcagcggataaagtttgtgctgacgcgcggctccttctccggaagaccgaacgtctctttgccgagctgg

SEQ ID NO: 3590 - DNA, 2202 bp, Unknown
  16S sequences of unknown bacteria
tccgccgcgacgtcgccgccgcccgcgccaccgtcctgaccggcctcacccgcctcgcaagcagctaccccgcccgcgtcaaggtcattgtgacagggtgagacaggtgcgtaaggagtgcggtacaaacttgcagcaaggccctctcagtcatggctgacgccatgacagctctcccagagggagagccaagggcttggcgcagcgcaggggggcgcgggaaattttttggggggtatgccttttgggggtatgccttttggtggtataccttttggggggtatacgatatagaatatagcattctaaatagtatatagcatgatgcgcaatcacaaccgcgttttttctttgaaatggtcccgcgtcagcttgcccacgacggtgctcaggcccaggagggcgacgaggttggggacggccataaggccgttgagggtatcagagatgctccagacgaggtccagctgcatgctggcacccaggacgatgacgagaataaacacgatctggtacgcccggacggcgcggctgccgaagaggtactcccagcagcgcacgccataaagcgaccagctgaggatcgtcgacgtggcaaagagcatcaggcccacggcgatgatgacgctgccggcgcgctcgccgaacagggtcgcaaaggcggagatcgtcgtccccaccccggccagggcgctgacgccgtaattcccgtcggcgacgccggaggtcaggacggccaggctcgtcagggtgcagatcacgatggtatccatgaacacttcaaagatgccgtagagaccctgtcggaccgggtcgcgctccgacgacgccgcgtgggcgatgggggcggagccgaggcccgcttcgttggagaatacgccgcggccgacgccgtttttgacagccagcaggaacgcgccgccggccgtcccgcctaaaatcgcctgagggcggaaggcgctttggaagatcagggcaatcgtctcgcccaggcggcctgcgttggcgatgaccaccgccagggcgctgaggatatagagcgccgccatgaaggggacgagcttttccgtcaccgcgccgatgcgcttgaggccgcccagcaggaccagggccgtgaagcctgcgatcacgaagcccacggtgacggcgatggccgtctggtgatcggccgctgccgggaaaaaggcggcggcgacggtattgacggagcctgcgatggaattgatctgggcgatattgccgatgccgaaggacgccatcacgccgaacaggcagaacaggacgcccagccacttgaagcggcggcccaggccgttttccatataatacatcggtccgccgacccactcgcccttggcgttgcgccggcggtagcggacgctgaggaggacctcggcgtatttcgtcgccatgcccagcagggccgagacccacatccagaacacggccccggggccgcctaggatgatcgcgccggtgacgccgacgatgttgcccgtcccaaccgtcgcggccagggcggtggagacggcctggaagggggtcagctcccctgccccggcctcctggcggtgaaggacgcggccgagggtgtttttcatggcgtagccgaagtggcggaactggagaaagcccgcccgggcgctgaggtacaggcccgtcccgacgagcagcagcagcatcggcaggccccagaccagggcgttgagctggtcattgacggacgcgacggtctcaataaagcttaggtacattcggtttctccgcgcgcattttgcgcgctctcctttccggattcggccccggcgcgattgcaggcgcggcgcagcgaattgcagctgcgcggcatccaagtgcattggaatggcagtcaattgcattggattgacgcgcaaacgcatccgtttgcatcggattgcaaaaatgcgggggcaaaaatcgcatggttatgcggtttttcgggggtgccgtgtttacacagtatagtatagagaagagaaagttaggttagtacagtttagggaagtagttccgctggcgcggggctggatgaggaggatgggggaagaattttttttggggttgaattggaagagctgccaggcaggattgcaagcgccctccgggggctccattctttcttcgccgaagaagaaagaatatggcccccggagggcgccagccccattgcatggaaaaaaa

SEQ ID NO: 3591 - DNA, 32759 bp, Unknown
  16S sequences of unknown bacteria
tgcgaggacatgtgcctcgcaaacacaccttataggcgaaaaccggcggaaacacacgtgtttccgccggttttcaagagcaggggtgggactggcggggacagatggaacaaggcgaacgtcagtgagccgccgtgatcaggcgtccccgtccagcagcttgtcgactttatcgacaagctgagcacacccgggctccggattgcatccggtgtccgggtgtgctatactggagaagagcgaaagcctcgcggcccatcgggcgtttatggcgaaggaaaagcgaaaggactggtaaatgcatgatagcgctggcgtgcgatcacgcggctctggaaatgaagcgggaaatcatcggcctgctggatgacatgggtctggcctataaggatttcggcacctatgaggcggtcagctgccactatcccttgtacggcgagcgggccgcccgggcggtggcctccggcgaatgcgaccggggcatcctgatttgcggcaccggcatcggcatgtccctggtggccaacaaggtcgctgggatccgctgcgtggtgtgcagcgagccgtattcggcgcagctgtcccggatgcacaacgacaccaacatgctggcgctgggcgcccgtgtggtgggggccgaactggccaagatgatcgcccggatatggctggaaaccgccttcgagggcggacggcatcagaaccgggtggacatgattaccgccattgaacagggcggaacggcacaggacgcctgagagggaaagccgccaatcgcgaaccccgccccggaccttgcataaaggtccggggcgttttcatgcggccggttgcttccggcgcatcccctcccgtcccgagtgaaaatttacagtccattcatacctgcggcggggaaacaggcttgtcctttgcgcggcggcgtggtatactaacagaaaatgtggaaatccaccggaatgaaaagagggccggacgcggcctggaaaacggagaggtagagaccgatgcccaacaacaatctgaccaaggcggacatacaaaaagaaaattttaaaatggcgctgggggtgttcctgcggaccatcttgtccgcggtgctctgctttttcgtatacatgtccctgtcggtgctgttcaacggctttttcacccacgacatcgggtatcagatttatgaaaccacctccgacggcagcgtggcgctgatcgaggagcattactacgcggacgattcctccgccccgtcctccacgccgcaggcggcggggccgggtacgccggccaatcccggccaggaggaaaaaaccgaatccaccaccgagaccacgctgggcccggggcagcgcaagcagaccatccgttccaccatgcccgtgggcgcggaaatcgcgctgaacgtcctgtcctccatcctgatgctgctgctgttggcggctttcccgtattccatcgtctggtctaagggcgatcgggacaagaacagcgtcaacttcggccatatgcaggaggataagctgcggggcctgaaggtggggctgatggcggcgattccttcggccatcgggtatatcgtgctggtgctcagcaaactgggcgtgtgcttcccgaaatatattttcctgtaccggttcgccaacgtgccgtttatgccgattatcaattccatggtctccactgagatccaaaacaccgcacaggtgccctggccggcgattttggctatgctgatggtggtggcattcgtcccacttgtctgccatttcgcctatttcctcggctacaagcagatttccctgtcggaaaagttcatctatatcaaccccaacaaaaagaaaaagcgccgccgctggtaaggcccggacgcaaaaccgccccgcattcaaagatgcggggcggtttttacatgttcagcagataaattcccaaattcagatacccggcaaacagcacccacagaaaatacggcaccagcagccagtaggaggatttgcggatatagcggaagcccgccatagtcagggacagcagcgccagcaggagcagcagccagaagaaggcgaacagccgccactgaagccggaagaagaacagcggccacaggatgttgaccagcagctggagaaaatacatccgcagactggccccccgatccaggtctccgctgctccataccagataggcggcgattcccatgagcaggtacagcgccgaccacacgatggggaacaccgccgccggcggcgtcaaaggcggcttttgcagtgcctcgaagcttttgaagccgctggcgccccccagcagcccgccgagggccccgagcaaaagtgtgaagccgataaaaaacagcgccgctttccaatcgaatctttgtctgcgcgagataaccaccgtggacatgccgtatcccagcctttcaccgccggttccatccggcggacgcatactctaccctaagagtatgcgccccaatgaccggatataatacggaatctacaagttttcgtttttcagcgcgtcgatgatgttttccttgcggaccttggacatggcatacagcatggtgacgaacaccaccaggaacaccgacagcaccgcgatgcccacgcttagccatggcagctcatacgccgcgactatcccctgattcaaggattggcggatgagcagggagatgagcagggagatcggcaggccgaagagcagagccttcagaccgtagaagacacactcgaaattcatcattttgttgaagccccgggtcgtcatacccacggatttgagcatggcaaactcccgccggcgcaaattgacgttggtggagatggtgttgaacacattggccaccgtaatgagggaaatcaacacgatgaagccataggataagacgttggccaccagcagggtgttgcggctttcctgggcgttggcggcgtagttgtgatacgaatacccggagccgttttgcttaatcagcgtgcggatgtcgctgtctgctttgtcgagatccgcggctttgaccgcaaaggcgccggtgggatgccgggagtgagcgctgctgccgaagcattgatccagcacggcgttggacacgatgagcttggcggccccgtacagagagttttcctgggggaacaagcccaggggcgctttgtcagtgaaggtccccagcgtaatggaagcggtctggttttccgcccggttgccgtcgtaaaccgagtgggtgttcagcttcagggtcaagggcgcaccgcggcggaaatactggccgctgatgtatttgttcttctgattctgctcgacaaagctgtcgatgacaatggcgcggggatggctgggatcggtgtagtcggacagggacaaaccgagatctgccgcgtagcgggcgaaagtggcgtcgtcgagagcgatgagccgcagggaggtttccatgtttttctgcccctccttccagcccatggcgcggatctgagcctgggcctccggctcgtcggcgggcatatcctcgatcccctgacccgcttcctccatgagctgataggcttcgcttccgaggatggacgcgtcggcaaagaaaaagccggtttggctgcgctggtacgcggcctgctccacgctgcccagctcccggagagatttgaggaacgcggcgctcttcgccgcgtcaggctcggcgcgggaatcgctgacggctatgtcatagttggccatggcatagaaggaacccacgctttccttgagcatatcggtgtaggtggacaccgatatgaacagcaccacgctgatgatcagggagaagacggtggcgcggtaccggcggcggttgcgtttgaaatttttcagagcgagatcgccctccatgccgaagagcctgcgggtcagccgggaggtttttacctgccgggcattcagcttgatatccgcggtctgccggatggcgtccatggccgagagccgggccgcccgacgggcggggatgtaggcggaaatgagcacggtggcgagccccaccgccgcggctatcaccatggcggggacggacacggacagctggaactccacaacccctcccataattcccgaatccgcgatgagccccccgatgagcttcagggtcacgccgatgccgcccacgccggacagcagcccgagcgggatgccgacgccgctgatggccagagcctcgaaaaacacagagttgcggatttgccgggaggtggccccggcggaggacagcatgccgaactgtttgctccgctcgctgaccgagatggcgaaggcgttgtaaatcagggagatggaccctaccatgatcagcgcgataaggatgctcgccatgctgtagagcacggcgttaaaattgtcgttgccgctgatacccatataccgcagcagggaggcatggtaccggacggcgtactccttttcaaacccgctcatgaaatcgaacacgtttttcgggcggttcagcgtcaagctgatggtcaccagggcgtccgcgtccagagaggcgggagtcagccgggtgaacacgctgtatcccccggcgctgtattcctctgtggacgggcgggcgcagatgccaacgacggtgtaggtcttggtctgccggacgcggaaatcctcgggctcctcagtgtcgtaggagagattgccaaccagaacctccccgtcctgcgccacccggtcgccgatttccagcgtgagctgctgcccgatggcgtacttgacgccgccattttcggcgatgtgcgcgcttatcatcagctccccgtcattttcaggcaaccgcccctcggtgggctggatcccccgcagggcggcgacgtttgcgtctatggcctgcacgtaaaggtatggcttggaggggttgacgctctccggcagccggacggagccgatgtcccgcagcaggccggactccttcaccgcgtcgtccccggcgacggcctgggccttggcatacgggatattcaggacgcttgcctgccagtcgccctcggaggccgcggtggagcgcagcatgaaatcctgcatgctggaaatgaaggcggtgatggccgtgaccatggccaccgagagaataacgccgatgatggtcacaatggtgcgggatttgtttttgcgcagagtcttgagggtcacccggttgaggacattcatacgttcgtcacctcgtcccgggaaatgcgtccgtcctcgatgccgatgatccggtcggcctggagggcgattttttcatcgtgggtgatgacgatgagggtttggttgtatttcttattgtacagccgcagcaggttgatgatatcggcgctgttcttgctgtccagattgcctgtgggctcgtcggccagcaccagggccgggctgttggccaaggcgcggccgatggagacccgttgctgctgtccgccggacagctggttgggcagatggcccagacgcttttccagccccaaggtggcgatgaggttctgcaggtgcttgggatccaccttgcggccgtccagcagcaggggcagggtgatgttctcctccacgttcagcacggggatgagattgaaaaactggtaaatcaaaccgatctgccgccggcggaaaatggccaggttggtctggttcagcttgtagacgtcggtgccgtcgatatacaccttaccggcggtggggatatccacgccgcccagaatgtgcagcagcgtggatttgccggaaccggagggcccgatgatggccacaaactcccccttctgcaccgagaacgatacattgtccagtgctttgaccgctgtgtcgcccttgccgtataccttggacaaatgctccacacgaagaatttccatgattgcctcccactgggatatccggcgccgccggacgctcccggattattgcggggctgtccccgtcatgctttcagtatacggcggcggggtgacgggccggtgacggcttcggtgacagttttgtcacacgacggttttgtaaaaacgcagggtgaaccggctgcccccttcggcggggctctccgcgaagattttgccgttctgccgggctaaaatgcttttggccatggccaggccgatgcccacccccgcgctctcggccgcatccgcctcgcccgccttgccgcggtaaaaccgggtgaagatatggggcagatcctccggcgcgatgccgggcccggtgtcggtcacggtgatttcggtgtagatggggttggccgtccagcgcaccgtcacccgcccgccccggggcgtgtgttccatgcagtttttcatcacgttcagcagcgcttcggcgctccagcggcgatctccggtgaaggtcacggcgggatccccctgcatgtccagcgtctgctccttgagctccatggggatgagcaggggggcgctggcctcccgcgccagctcggccgcccgcaccggctcggccttcatttggatgacccccgcgtccagccgggacattttcagcagagaggacaccagccactggatccgctccagctggatgcggatgtggcgggtgaattcctcccgcttgtcggcgggcagatcctccccgctgagcaggtcggtcatcatcagcatggaggtcagcggcgtcttcagctggtgggagatgtccgccagggaatcggccagctgcagcttttccgcctgcagctggtcgttgtattcccccagcatgacggtgactttgtaaatctcgcttttcaggatgctcagctcgccctcgccgttgtcccgcacgtccagggcgtgctcccccgccgtgatgcggcgcaggtagtcggccaggcgttccatctgccggtgccgccagagggtgtgccccaggcagatgccgcagaataagagacagacgagaagcacgagacatcccgtcccaactcctgccaggaaccccgcgatggtggcccccagcgtcacgagccccagcagcaagcagaggtttttcacatccggattgcgaaaatagcgcatcgccttccgccctcctcagcgccgcccgccgacccggtagcccaggccgcgggcagtttcgatgaccacggggttctgcggatcgtcctcgatcttctcccgcagccgcttgatatagacggtcagcgtgttgtcgttgacgaaatcccccgacacgtcccagatgctttccagcagctggttgcgggacagcacctgccccgcgtggttggccagcgtcatcagcagccggtattccagcgcggagagaaacacgtcctgcccgttcttgtacacctttcccagcgcggcgttaatctgcaccggcccaaattccatcagggtactcccgccctgtcctgcccggcgcagcacactgcggatccgggaggtcagctcccggatccggaagggcttggtgatgtagtcgtccgcccccatgtccaggcccatgaccacactcacctcgtcgtcccgggcggtgagaaagatgaccggcatgtcgccttgccgcttgatcgcgcggcagacatcgtaaccgctgccgtccggcagagagagatccagcaccgccagatcgaaccgctccgttttcagtgcctccagcgcgtcggccaccccggcgcagagcgtcacgccgaacccctcctgtcccagggaatattccaagccgacggcaatgctcctgtcgtcctccaccaccagcagtttttgcttatccacggccgatcgccgcctttccaatcgttctgttcccattgtaaccgattttgcgccgctttgcatgacgaatccgtcattttccggattttaggcaatgtgaataactttcacttgccatgccgccattccggcgggtacaatagaggaagaatttaccaaggggggcgggtatggcggaacaggatgaacggagggaaatcctgctgtgggcggccgcggcggggctgcttacggcggtgggcctgtgcgcggtcatcagcgccccggactttgccccggcggaacgggtggtgtattcgcggccgccgtatacggcgtcggcgccgctgtcgtccgctgtggcggaaaaaatcaacctcaataccgccagccgggcggagctgctgcaaatcagcggcatcggggacgtgacggcggacaaaatcctcgcctatcgggacagtcacggcggctttcattccctggaggagctgctgcaggtcgacggcattggggagaaaaagctggaggaatggcgaccctatctgacggtggaataaagacaagagacggctagacggccgtctctttttgtgttggagcgccgccctcaccgccgagaataaaagagccggccgccgtcttgaacatgggaggaaattctgttataataagctgacatgcggcaatttgccgccggccccgcgccggtctctgcgaaaggaagggtcacaaatatgaaagtcacactgctggcgcacaccccccagccggagcatatcctggctgcggcggcccgcctgtgctactcgcctgctaccatcgacgacgtgatggagagcctcaccgaggaaaaaaccgcttcctttgtggagatgctggccgaaatcggccacgaaagccccatcgaacacgcgtccttcaccttcggcatcgagggcgtgtcccggtcgctgctcgcgcagctcacccgccaccgtatcgcctctttcagcgtgcagagccagcggtatgtcgcggaaaccatgttcgaatacgtggtgcctccccagatcgcggatattcccgaggcggcggacgagttccgccgggccatggaggaggatcagcgtcactacgaaagcctgaccgcccgcctgaaggagaagcatctcgcggacaagctcgccgccggcatgggggagaaggaggcgaaccgcgccgccgaaaagcaggccatcgaggacgcccgcttcgtgctgcccaacgcctgcaccaccaagattctcatgaccatgaacgcccgcagcttgatgaactttttccatcaccgctgctgcaaccgggcccagtgggaaatccgcgaattggctgagcggatgctcgtcctctgcctggaggtcgccccccatctgtttaagaacgccggcccctcctgcatcgccggcccctgccccgagggcaagatgtcctgcggccgggccaaagaggtgcgggcccattatcagcagctgaaggagcggacgtgatgggacggctggtggtcatcgacggcctggacggcagcgggaaatccacccagctggcccgcctgaacgagtatctgtccgccgccggggtaagctataagcaaatctcgtttcccgactatgcccagccctcctcggcgcttgtgaaaatgtacctggccggggagctgggcggttccgccgacgcggtgaacgcctacgccgcctcctccttttacgcggtggatcggtatgccagctataagcggttctggcaggccgattacgaggcgggcgccctcatcgttgccgcccggtacgtcacctccaacgccatccatcagatggccaagcttcccccggaggaatgggacggctatctcgcctggctggaggattacgaataccgtttgctcgggctgccccggccggacgacgtcgtgtttctcgacatgccgctggacgtggcccagacgctgctgtccgcccggtatgagggagacgaaaagaaaaaggacatccacgagagggacagcctgtacttgcgccgctgccggcagacggcgctgtatgccgctgaacggggcggctggcatgtgatcccctgtggccaggaggggaagcctcttcccccggaagacatcacccgcgcgctgattgccgcgctcgcgctggaataatacaaaggacgtaacgtatgccaagcttagtcacgactctcgaatttcacgaaccctgtctgacggacgcctcctggatggtgcccatcctgcgcgcggcggacaacaaggcttgtgaatattccttcaccaccattttcatgtggcggaaatactacgaaaaccaagtggcccattgcggggagcatctgtttctcaaatccggccacgggccggccagcacgtatatgatgccggtgggcggcgatctgcgggaaggcgtgtccatcctgctggagcattgccgcgcggaaggctacccgctccggctgttcggtgccgaggcgccggataccgagcggctttccgactggttccccggccggtttgcctgcgctccctcgccgggagacgccgattatatctataaccaggctgacctggccctgctggccggaaagaaataccacggcaagcgcaaccatgtggccggtttcagcaagcagtacgcctggacctatgaaaccatcgacgacgccaacgcgggggaagccgccgacatggccaccgaatggtgcaagggcaagggcaactgcgccgacaaggggcttaagtcggagaactgcgccatccgggaggccctgcgccaccgggacgagctgtctctgaagggcggcctcatccgggtggacggcaaggtgatcgccttttccctgggctcgcctatatccggcaccgtgttcgacgtgcatgtggaaaaggccctgccggaatacaaaggggcctatgccgtcatcaacaaggaatttacagcccgggagctggcggcataccctttggtgaaccgggaaaacgatttgaatatcgaaggcctgcgcaaggctaagctgtcttattatccggcgctggtgctggaaaaatacctgtgtacagaaattcgctgaagcaccggatcggcctgtcggatccctgcggaaaggagggcctctttcatggcggaattgtcgcggccggatcaaatcccggccttgaaagccatctgggccgcctccttcccggaggattctcccgaactcattgatcgggccttcggccggctgtaccgccccgcggactgtatggtggaatgccgggccggccggccggtctccatggccttcctgctccccgccgtatggcacaatgggacgagcacctatcctgtgcagtatatctacgccgccgccaccctgccggcttaccggggtcagggtcttttcggcgctctgcttcgccaggcccatgaggaagcgtcccgccggggacaagcagcctcctttctccgccccggcgagccgtcgctgacggcgtattaccgccggttcggctatgaaaactggtttaccgccgccgtgctgcggctgtcccgggaagagctggccgcgttgggcggctgttcggcgggtatcgcgcgcttctccgcctgccccgactacggggcccggcgggatgcgctgctggcggcgcatccctgctggattcgctgggaggaaaggctggccgggcaggcggtggataccgcttccggcgtgctgatcggccccgacggctgcgcgctgtgcgaaagggcgggggataccctgctggtgcgggaactgctctgcccgccggagcggctggccgattacggccgggcgcttctggaatgctttcccagctcccggtatgaaatcgtccgcccggcggacgaaacccggccgggggaggctttcgccatgtggcggccgctgtccgacgcggcccggcggccggctggcccgccttatctcgggctgacgctggaataaggccggcttctcttataaataggcgggcgcgacgtcgcttgctcgaaaggatgatggatatggtggccgtgtttctggccgacggatttgaagaaatcgaagcgctggccgtggtggacgtgctccgccgggctgagctgacggttgtcaccgtggggatcggtggccggacggtctgcggcgcccatgggatccccgtgggggccgatatggacgaggccgcctgggaaaaacaggacatggacgccctgcaggccgtggtgctgccgggcggcatgccgggcaccctccatctggagcagtcgccggtggtggcctgcgcgctggaaacggcccggcggcagaacgcctatatctgcgccatctgcgccgccccctctatcctgggccataagggcctgctccgcgggcggaaggctgtctgcttccccggctatgaacaggagctggagggcgcacaggtgctcactgagccggtggtgaccgatggaaccgtcatcaccgctcggggcgctggcgtggccgtggatttcggcctggaaatcgcggcgcgcctggtctctcccgaacgggccgagcagataaggaaatccatgcaatgccggtaggggacatccgcccgattaaagctgggctgagagagcagtataaacgcctgcggcgcaatatgccgcgggaaatacaggatgcgtacgacgagatcatcgcgaggcgcgtggccgcactctggcagtataagcgctgccggatgctgctgacctatgtgtccaccgccatcgaggtggatacccgccggattattgagcgcgcgctggccgacggcaagcaggtggcggtgccccgctgcgtgcccggcaccagggatatggagttttatctcatccgcggtctggacgagctggagccggggaccttcggggtgctggagccccggcccgatccggcgcggctggtaaaagatttctcttccggcttgtgcttgatacccgccctgtgctatgattggcatgggtatcgcctcggctatggaaaagggtactacgaccgcttcctggccaatttcggcggccatatggttggcatctgctacagcgaatgcgtgcgccgcaagctgccgcacgggcggtttgaccgcccggccgagctgctggtgaccgaacgataccttcggcgcaccggcgaccggcgcggatagccgggccgtcatcggcgcagagccgtttatccctaccgaaaattgaaggagtgtgaggcgcgtgtccgaacacgataacacccagccggagcgttccgtggacaagctgctggaggatctggaggccgaaaaggcggcgcgtagccgggaagaggaacggctgggcgaggttctgaaggtggacgaacatacggcggccaaaatctcggaggagcgaaagaacaaggtttctggcttcaagctggacatcgatctggacgaggagtttcagaaaacggaggagcccgctccgccgtccgtcaatgacacggaggagcctgccccgtccggggagccggccgaagagacggccgaatccctggacgaagacgagccggcggctgaacccgaggggccgaaagaggaagccgacgggaaggagccggaagaggagccggaggaagccggccggggcaaaaagaaaaagaagacgaagaaaagcacctggggctgtgtacgcggcatcatttacgcggtgctggtgttggggatttccggtgtgctggcgtatttcaccatcaccggcgccatcgatttggcgggcctgggcaaatcctccgggaaggtggacgtggttatcccccgcggcgcctccacccagcaggtggccgacgcgctcaaggaggggggcgtcatcgatcagcccctcgtgttccggctgtattccaagctgaccaaggccgacggtacctatcagcccggcaccttcaccctcgcgcccaacatgggctatggggaaatgatccgtatcctacagaactccaagccccgggaatcggtgtcggtgaccattaaggaaggctttaccatcaaccaaatcgccgaggaactggaaaaggccggcgtgtgcgacgccgacgatttcttcgaggcggtggtgtacggcaaatacgaggacgcctacgatttcgtggcggccatccccggcatcgagcaagggtcgcagtatgagggccggatttacaagctggaaggctatatgttcccggatacctacgagttctttactggaagctcgggggacacggtggtgcgtaaatttctcgataactttgccgcccgcctggataccaagctccgctccgccatcagcgcccagggcaagaccatcgacgaaatcatcgtcatggcctccatcatccagggcgaggcctccaaggaggacgatatgctcaaggtttcccgggtgctgtataaccggctgaacaacccgtcggaatacccccggctcgagtgtgattccacccagaagtatatcaacgatttcatttcccaaatcgaggggctggaaatcacaaacaaggcctatgacacctataagcgcaccggtctgccggcgggcgccatcaacaatcccggcctgatggccatccgggcggccattaatccctcccaggacgaggaggtggccggctgctatttcttcgccaccgatttcaacaccggcatcacctattacagcaagacccttaaggaacacgaaagaatctgcagaaaatacgggatcggcatgtatggctgataaaagggctgccgcgtgattgcggcggccctttttcctggaatcggagaaaggagcctcagcgatgaacgaccggttggaaattctggcccccgccggggatagggaacggctggaggcggcgctgctctttggggcggacgcggtgtatctggcgggcaaggcctacggcatgcgatccgcccccgccaattttgacgaggaaggcctgcggcaggccgtgtctctggcgcacaaaaccggcaggaaggtctacgtcaccgtcaacgtcctgcctcgcaacggggagatggaggcgctgcccgcttatcttgaattcctgcagggctgcggcgccgacgggatcatcgcggcggatttgggggtcatgcgtctggccctgcggcacgcgccccgctgcgccttgcacgtgtccacccagaccggggtggtcaatttcgaaaccgcccggatgctgcacgatctgggcgccgcccgggtggtgctggctcgggagctgtccctggacgagatcgcggaaatccgcgcgaaaaccccgccggagctggagctggaggccttcgtccacggggcgatgtgcatggcctattccggccgctgcctgctgtcggcctatctgaccggccgggacgcaaaccggggcggctgcgcccagccctgccgctggaaataccggattgtcgagccctcccgtcccgaccgacccctgacggcggaggaggacgaaaccggcacctacctgttcaacgccgacgatttgtgcatgatcgaccacctgccggcgctgtcgcgcgcaggcgtgcgctccttgaaaatcgaaggccgcgccaaggccgcctattatgtggcggtgatcaccaacgcctaccgggcggcggcggacggctgggccgcctccggctatgcggcggattaccggccggcgccctggatttccgccgaggtcaataaggtcagccaccgcccctacggcaccggcttttattttggcccccctgggcagaacacggcgtctggtggttacatccgggagttcgaggtggcggcggtggccgaggagtgggccggcggcctccagcgcttcagtcagcgcaaccgcttcaccgtcggcgacgagtgcagcgtgctggagcccggccgcccgcccttttcgctgaccgttcgggagatgttcgggccggacggagagcccttgaccgccgcgccccatcccaccatgccggtgtggatcccgctgtcccgcccgctcgtcccgggcagcctgctgcgccgccccgtttgcggcggcgcctgattaaaacccgtccccgccgggcaagctagatatacgcactctagcgacggaaaggacgggctccccatgaaaaaacgcgcgcttgttctctttacccttctgctgttcatcctgagcggggtggtgctccaggtctaccgcctctccgacatctacctgtcccaggcggcggatcagcaggggagcgtcaccgtgaaggtggcgaacagccgggggacgatttatgacgcccggctgcgcccgctcaccaatgcgggggaggaataccgcctgagtgtcacgccgtcgccggaagctatcgcggccctttccggtatgctggacgaggagcagctcgccgccgtgtccgagcggctgcaaagcgggaagcccgccgttgtcaccctgccggaaatcccggccaatctggagggaagcctgctgttcaaggtgccggtgcggtacggcggccgcctgctggccccccatctgctgggctatatggacggcgacggcctccacggcctgaccggcgtggagctggccttcgacgcatacctgaacagctgcggcggccaggcgtccgtcacctattcggtggatgccatgggcaagccgctgcaggggattgcgccccaggtggtcaacaccctggccgacgcaaaggccggcgtggtgctcaccatcgatcaggatatccagaaaatcgcggaggaagcggcgaaaaagtacatgaccaagggcgcggtggtggttatggaacccgccaccggccggatcgccgccatggtcagcctgccggactttcagcctggtacagtggcggacagcctggacgccgccgattccccccttctcaaccgggcgctgtgcaattacaacctgggctcggtgtttaaaatcacctccgccgccgctgcgctggaaaaggggatccccatctccaccgccttcacctgcaacggctctgtcaccatcggcaatgtgaccttccactgccacaaccgcctgggccacggcacgctgaatatgcaggacggctttgcccagtcctgcaacccctattttattcagctgatgcagcaagcgggcggctccgccctgttgggtatggcctctaacctgggcttcgaccggtcgctgattctggccgacggcctgaaaaccgcccgcgccaccctgcccacggcggaggagctgctctccccggcggcggtgggcaatctggccttcggtcagggcagcctgctgggcacgccggtgcacgtggcccagatggtggccgccgtggttaacggggggaaaatcatccgtcccaccatcctgaaaggctactgcgacaaggagggccggctgtccgaggaaacgatcgaacccgagcagaccgttttctccaaacagaccgcccaaaccctcaaggacctgatgatttacgccgtcaaggaaggcaccggcgcctccgcccagcccaccgtcagcgccggcgccgccggcggcaagaccggcacggcggaaaccggatggaaaagcgagaacaaggcggtggtgcagagctggttcggcggcttttacccggcggaaaatcccaaatacgtcatcgccgtcatcgcggaggattccgacaacaccaaggggaaatcctctcccgtgttcaagaaaatctgcgaggatatctatatgctggagcaggcgcgcaaggtcctggccggcgagacctcctccgacagctgattccgtcccgccctttccaggggcgggcttttgctatacgcccgccgtatggcaaccatcaaaaatctatagtttccttatacccttttcctgtggtatgatagatccgaactccaacagacaggcggcgacagggtatgataaccgatttgacgcagggcagtatcagcaaacggctgtggctgttctccatcccgatgctcatcagcgtcatgttccagcagatatacaacatcgcggacagcatgatcgcggggaaattcgtgggcgaggacgccctggcggcggtgggcgcttcctatccggtgaccatgctgttcatggcggtggccatgggctgcaacatcggctgctcggtggtgatctctcagtatttcggcgcgaagcggctttccgagatgaaaaccgctgtctccaccaccttcctggccagcggtggtctcagcgccgtgctgaccgtcggcggcctgctgttgtccggccccatcctgcgcgccatccataccccgtccaacatcttcgccgacgccgccctgtacctgaatatctacataggcggcctcgttttcctgtttttgtacaacatctgcaccggcgtgttcaactccctgggcgattcccgcaccccgctggttttcctcatcggctcctctctgggcaacattgggctggatctcctcttcgtcaccgtcttcgacatgggggtggccggcgtggcctgggccaccttcatcgcccagggcgcggcctgcctgctgtcgctggcgaccctacgccggcggctgaaccgcctcgaaacgccggagaaaagcccccgcttctccctggagatgctgggccggatcagccgcatcgcggtgcccagcatcctgcagcagagcttcatctcggtgggcaatatgttcatccagggcctggtcaacggctacggctcctccgtcatcgctggctactccgccgccgtcaagctcaacaccttcgccatcacctccttcaccaccctgtcgaacggcctgtccagcttttcggcccagaacctgggcgccgggaaaatcgaccgggttagacggggcttctggtcgggttgcctgctggcggtgtgcgtggtggcgcccttcacgctggtatacggcctgttcaccgacgccgcggtgcgcctgttcctggacaccaccagccggtacgcgctggaaatcggctgcgacttcctgcggctggtggctccgttttatctggtgatttccgtcaagctgatggccgacggcatcctgcggggcgctggcgccatgaaaagcttcatggtggccactttcaccgatttgatgctccgggtgatattggcctttttgctgtcggcccggctcggcaccgacggtatttggctgtcctggcccatcggctggacggcggcggccgtgctgtcctgcgcgttctattttgccggtcgctggaaaacccgttttttaaggtgagtgatgaataaatctttgcacccggatttattcatcgcttacctggcggagccgggcgaattttaaggattccttaaggtttcgttccgcccattttccctccgccgcgttagaatagcaacagagagagaaaaggagagctgcatcatggcacagaaggttctggtttgtgacgacgaccgcgaaatcgcggcagccgtggatatttacctgacagccgagggctacgaggttctgcaggcctacgacggcttccaggcgctggaattgctggagaagcacccggatgtccagctgatcctcatggatatcatgatgccccgtctggacggcgtgcacgccaccatgaaaatccgggaaagccggaacatccccatcatcatgctgtccgccaaaagcgaggataatgataaaatcctcggcctcaacatcggcgcggatgactacatgaccaagcccttcaaccccatggagctcatcgcccgggtgaaatcccagctgcgccggtataccaatttcggcgtcagcgaggagggcggcgcttcctccgtcaccgtcaacggcggcctggaaatggacgacggcgccaaacgggtgacggtggacggccaggaggtggccctgaccccggtggaatacaaaatcgtcaaattcctcatggaaaaccgcggcctggtgttttccagcgcgcagatttatgaaaatgtgtggaacgaaccctcttatggcgcggataacatcgtcgccgtccatatccgccatatccgggaaaaaatcgagatcaatcccaaggagccccggtatatcaaggtcatctggggccacggctataagatggaaaaactctgaccgaaggaggcggcgcccgtgaaactgcgtgagagcctgttcagcaagctgctggcgtccatattgtttatcctgacgctggcggcttcggtttgcggcggtgcctatgtgtcctatgtctcctacaacggggatgtctggtcgagccgggagattttgacccgcacccgccccttccaggataaaatgaaccaggacgcctccgccgtgcaggaatactacagtctcctgcaggcgtcgaaatcggcggaaacgcccctgtcctatgaaagcgcccaccagatggcccagtatgagcagcagttgggcctcagcggcggcggtaactttgtctttcagctgctcgacggggaaggaaacgtcctgctttccaaccttcaggacggggaaacggacgtcagcgccctcgccggcgccaacggcgcttaccgcctgcccctgtcctacagcctctctgtgtcgagcgagcccagcttgctggtatacggcctgcgggagggcctgcccgcggcggacgagtatgccgacctgatggcgcggcgcatcaatatgcaggacagcgtgatgccggtgctcatcgccactattgtatgcggccttctctgcgcgctgctgttctgcttcctcgtcgccgcggctggccataggccggggggcgaaaccgccgcgctcaaccccttcgaccacatctggctggaggtgccggtagcggctctgcttctgctgtctttcctctgggtgatggccctttacagtaaggacttggtgctgttctgcatttccgccgtgctggcaggcggcatgctgctggccacggtgctctccatcgtgcgccgcatcaaggcgggtaaggtctaccagaccaccttcctgcacctgctggtcaaatttttcgtcaccgtcatgcagcatgtccacgtggtggtccgggtggcgggcgctttcgtgctgtacgccgccgcccagctggtgctggttttggccatgtcccaggggaccggcctcgcctggtttatctggatcatgggcaacttgtcccttatcgtcctcatcgtcatcgtcgccattcagtacgataaggttaagcagggcaccgagaaaatggcggaaggcaacctcggcgtggtcatcaacgagaaagaggtgcccttcttcggccagatggcccataatctcaattccagcggcagcgccatcaaaatcgccgtggaacacgccacccagagcgaacggatgaaatccgagctcatcaccaacgtctcccacgacatcaagacccccctgacctccatcatcaactatgtggatttgttgaaaaccaccggcatcaccgatcccaaggccttggaatacgtggacgtgctggaacgcaaatccaagcgcttggcccagctgatggccgatttggtggaggcctccaaggtgacctccggggccgtgggcgtccatatggaatccctcaacctgggcgagctggtcaagcaggccggcggcgagttcgaggagcgcttcgccgagcggggcatccagctgatgtgccgcctgcccgatcagccggtgctggtctacgccgacggccgccatatgtggcgggtgctcgataacctgttcggcaacgccgtcaaatacgccttggacaatacccgcatctacgtggatctcgccgacctgggcaacgaggtggtgctgtccatgaagaacatttcccgggatcccctgaatatccatcccgacgagctgatggaacggtttacgcgcggcgattcggcccgcgtcggggagggaagcggcctcggcctgtccatcgcccgcagcctgatggaactgcaaaacggcactctggatcttcagatagacggcgatctcttcaaagtggtgctggctttgaagaagatgtaattgttacagatcaagcattccccggcccgcgccgtttcgcgggccggggcttttttcgtccataccaccaagccaagtccgtccgcgttcacccgcctctcccagccccatatggcgcacgccaccgtgtccccttttcccggcgcccctcgctcttcccgtggcgatttccgtctttttttgctggaaatcgccgcgatagattgacagaaaaataacagcacggtataataaaacggaaagccccgattatgaaaacagggatggtgttcgatatggatttgatggtatgcgtgggcagctcctgccatttgcagaattcgcgggatttgatcaaccgcctcaaggagctgatcgccgaaaaccggctggagggccgggtggagctgaagggctccttctgcatgggtcactgcgccgacgagggcgtgtgcgtcaaatttgccgatgagatttacagcctgaccatggagaatgtggacgacttcttcgtccggcaggtggtcgggaagctggaggggtgaacccggcgtttcaaggcaataccgcacaattctaagcgccggatggcgtcaggaaattttttgtcagataaagcaaaaaacgcaggcaatcctttcggattgacgaggctttttgcaaaatatggcgaaaaatttccaagtcatacggtgcttaaaacgagcgttgcgaattgtgcggtgttgcctcaacagtttgagcgaaaggaagggttatgctcatgaggtatatccgcgtcaaggaagccaattgtaaaaactgctataagtgcctcaagcactgcgccgtgaagtccatcagctacataaacgaccgggtggaggtcatcgaggacggctgcatcctctgcggccggtgcatcaacgtctgcccgcagaaggccaaaaccgtggtcaacgaccccgccgccgtgctcggcatgctggccgaccccggcgtacgcaccgtggccagcctggccccgtcctacataggcgtctacggccgggaaaaccggggccgctttatcgccgcgctgaaagccctgggcttcgacgaggtgcaggaaacggctctgggggcccacgaggtcagcctgcggtataaggagctgctcgacgcgggggagatgcccgccgtcctgggcacctgctgccccgccgtcaacgacctgattgtcaaatattatccctctctcacccccctcatggccccggtggtctcgccggccctggcccatgggcggctgattaagcaggagcagggggcggacacccgggtggtgttcgtcggcccctgcctggccaaaatcaaggagatcgctgagcatcccgaatcggccgacgctgtgctgtccttccggatgctggataagctgctggcggatcgggggatcgaccccgccggcctgccggaggacgaagcccccctgcccgcccccttttcccggatttatcccatccccgaaggggtggtgcgggacgtgcgcggcgccgccggaaccgaatccagcgcctacaacggctaccggttcatgagcgtgtgcggtctggaaaacgtcatggagtttttgaaggagctggaggccgggcacatcggccgcgtctttgccgagctcaatgcctgtgacggcggctgtgtcaacggcccccttatcgcggaggataagcgggcggcttaccgcggcctgctcgaggtggaaagctacgccgaggcctccgcccctgtcgaatcccggccgattgcgctggggcaggccttcgaggccgagccgctcgagccccccatgcccgacgaggccaccatccgcaagatcctgacggaaatcggcaagcccaccccggacaaggagctcaactgcggctcctgcggctatcccacctgccgggacaaggccatcgcggtgtatcagaaaaaggccgagctgtacatgtgcctgccctatatcaacgatttgtcccagtccctgagcaacgtcaccctcagcgtgtcccccaacctcatcctggcggtggacagggacctgcgcatcgtcgagctcaacctcaccgcccagaagctgttcggggtcacgcggcagatggccctgaaagccgatttgtacgagtttatggaccccgccgatttcgaggaggtgttccagacccaccggaatatcctcgacaaaaaggtcaagctcgatcccctgaacatcatcacctctcaaaccctgatttatgtccccgaccaggagctggtcatgggcttcatcaaggacatcaccgaggaggagcaggccaaggagaagaatttccgcgcccggctggaatcggcggagatggcccagaaggtcattgaaaagcagatgatcgcggcccaggaaatcgccagcctgctcggggagaccacggcggaaaccaaggtcacgctgaacctgctcaaggatctcatgctcgacgaagcggggtcggctgaccggaaaggatgaaggaaggcttgagcaatcgcctgtatttcgacgtcacctccaaaagcctcaataagaaaaacgaagagctctgcggcgacaaagtggaagtggtgcgcaccggggacgacgtgatcgtcgtgctctccgacggcctgggcagcggcgtgaaggccaacatcctggccaccctgacctccaaaatcatcgccaccatgatgaagtcgggcgccaccctggaggatacggtggacaccatcgttcataccctgccggtgtgcaaggtgcggcatatggcctattccaccttctccattctcaagctgaccgccgacggcaaggcctacctgactgagttcgactgccccggctgcgtctgggtgcacgagggcgtggtgctgccggtggactacaccacccgcgaggtgggggggaagaccatccgggaggcttctttcgatttgtcggtgggggatatgttccttatgttcagcgacggggtcatttacgccggcctgggcgaactgatgaatctgggctgggactgggagaacgtctgcgacttcgtgcaggacaactgcgggaaggagaacaccagcgcccgcatgaccgccgccctgctgggggcctgcgaggatctgtatatgaagcggccgggggacgacaccaccgtcgccaccgtcaaggccgtgccccagcagatcgtcagcatgttcgccggcccgccccgcttcccgcaggatgacgagcgggcggtggtggatttcatgtcgcccgagggcctcaagctggtctgcggcggcagcagcgccaatttggtggcccgggtgctgggccgggaggtcaccaccgacctgaactatgagggggatctgccgcccatcgcccatatcaagggcctggatttggtcaccgagggggtcctcaccctccggcaggccaacgccctcatcacccgcttcctggccgatcccgccgatgccgatacccttaaggagctggataagcccaacggggcggcccagattgcccacatcctgctggaacgctgcacccacctgtacctgttcatcggcaaggcgatcaaccccgcccaccagaatccccagctgccggtggatttgagcatcaagatccgcctgttggaggatctggccgaaaccctgcggggggcaggcaaagtggtgcagataaaatattactgaacgcgtagaaatggagaaaacgcacatgccggacatgatggatatcgtacagattaagcacgaggtgctcaaaaccaccgcgaaacacgcctttgcgggcgacctctacgaaagctttgacgccattccctttgagatcatccaggggatccgcccgaacttccgctgctgcgtctaccgggagcgggagatcgtccgccagcgggtgcgcatggccatgggcaagctgccccatgacgtgctgtataccgacgccgacgcttcccaggtggtgcacgtcatcccctgcgcctgcgagggctgccccatcaccaaaatcaccgtcacccagaactgccagagctgcctggccaagaaatgcgccaaggcctgccccttcggcgccattaccaacacgccccggggcgccgtcatcgaccaggacaagtgccgcaaatgcggcaagtgcgtggccgcctgcccctacaacgccatcgtggaaatcgagcggccctgtaaaaagagctgccctgtcaaagccatcagcatggacgagaacgacatcgccaccatcgaccccaaaaagtgtatcaactgcggggcctgcgtggtgggctgccccttcggcgccatctcggacgtgtccatgatgaccagcgtcatcgacgcgctgcgcagcgacggccaggaggtggtggccatggtggcccccgccattgagggccagttcggcaaggccaccctgccccaaatcaaggaggccatccggcagctgggcttcaaggatgtgtatgaggtcgccctgggcgccgatatggtggccctcagcgaggcggaagagctgctcgagcgcaaggcggagggccagcccatgacctcctcctgctgtcccgcgttcgtcagcttggtgcgcaagcattttcccgccctgctgcccttcgtgtccaccaccgtgtcccccatggtggccgccgaacggtatatccgcagcaagcggcccgaggccgtgaccgtattcatcggcccctgcatcgccaagaagaacgaggtcatgtcccagtatatccaggagctggagtacgtcttgacctttgaggaactgtacgccatgctctgcgccaagggtatcgaggccgaggcgatcgctgtgcccgataccggcgacgacgccacccgctacggcaagggcttcgccctggccggcggcgtgaccgccgccgttcagcgggtgatcgaggagaagggggtcgacgtctccctctcggtggccaaatgcagcggcgcggacgagtgccgcaaggccctgatgctgctcaaggccggcaagctgccggatgactttgtggagggcatggcctgcgccggcggctgcctggccggccccgccaccctgtacgagctgcagaaatcgaagaaggtctttgaggcccgcatggatgccgcgccggacaacatccgcgacaatgtggccgaaaaaggctgcgccgccgatgtgcaccggcatgtttgagaggtgccgaatgaatagcgaggaaaagcggcagcttctccgccgggtgcgcggtttcgtgttggatatggacggtaccatttacctggggaacgagctgttcccctttacgaaggcgtttctggaagcggcggggcgcaccggccgcgagaccttctttttcaccaacaattcctccaaaaacgccgcctgctacatcgagaagctgcggggcatgggcatcgagaccgacgccgggcggatgttcacctccaaccaggtggcggtgcgccatctggcggcccggttcccgggcggccgcgccttcatcctgggcaccccctatctgcaggaggatttccgggccgcgggcttcacggtggagagcgacgcccccgacgtggtggtgctgggcttcgacaccaccctgcaatatgataggctgcgccgggcctgcgatttcatccgggcgggcgtgccctatgtgggggtcaatcccgatttgaactgcccggtggagggcggcggctttatgcccgactgcggatccatcgcccgcctgatcgaggcgtccaccggcgtcttcccagaattttacggcaagccctcccggcacaccctggacttcctgacggagaaaaccggcttcgccccggcggagctggccgtggtgggggataggctgtataccgacatcgccctggcccagggcacggaggcgacctccatcctggtgctgaccggcgaggccacccgggaggaggcggagcgtggtcccgtcacccccaccctcatcgtccgatccctggaggagatcaccgagctgctgctttcagaataacccactcccgcccggcaagcgttcccaaaaggaacgcccgccgggcgtttttgcctgcccaagcatctttccgagacgctttgccctatcgggcttggcgttggtatggcgggttttcttatgattgtctcatgagtcagacggccggcaaatcgacacagcatgacctccctactgccgccatatccgcataaaaagacggcggccttgaaatggttcattccaaaaccgccgcttagctttctcttgggtgtacagcaacactgccgccatccagcgttttttatatgccgtttcgttggtggctggagagtaaccgcgactttacaaaagatttaaaacgtaaaaccgatctttctttgcgcgggccagggacagtcacgccactgcccgttgccttgctcctctttcccggccagaaggtctgtggcggcgtctgcaatgtaccccaggtaacttccggcggagctgtcaccgcacagcaatttccacattaggccgccaaaaagataagactgggcaaattcgcgccagctatgcagctcctcaacaaccttttgggatagatcccaaaggatgccgacagcctcgctttcggtaatccaacccaaatagcacccccaacgggtcagcattgccgctcggccaatatcccatccagccataaatccgggggcatattgatttttatagcgttgtacaaatctccatgcccggctggtagactcgcgatcatcctcatccatagtttcatccatcaattcttccggcgaagccgcctcactataaagctgataccgcaggatatagccctcctgcgccagatagcggatcatatccagcagatcgctgcgaccatctatcccccaagaacgacgtacaagggacacgattttctgttccatcacaggaatatgttcctccacatccatacgatacagatcgtggtcgttaagggtcgataaaataccagacagcaggatgccgaatcgttcccattttacgtcctctttttggtacgggatcggctccggctcaggcatggcctcaagccgatccattgtttcttccagggtagtatagagattttcttccagttccagatcaaacgagagttcttcctcatcgtccgcatcttccatctccagcgtttccagagccgccgcgatcacgcccatatcttctccgaacagttgtcccatcaagtcctcagcagtagatgaagttgcctcagccactttatcatttaccattttttttaataattcctcattgacagccatctgcgccatgctgtcagccccgaatatctggccgaggatttccacttgacgttgagtgttcgcgttgatctgttcttctacttcagcggcaggtatagatgcgcttttttcagagctgggaacctcgattttgctgattagttcctcacttttttccacggtctttttcatagaatcggtcgcatgctcactggcttgctgcgcccgtttcctaatctcgttgatatcaaacattttcagtcctccttgtctggggggagcggatgccatgccggaggctttttatgacgtgtaaatagccttttgatccgcctcagtatggcttctgtgaaatgaaaccatagattaccaactataaacacgcccaccagaatcagcaggaacgctccgatttctccaaaaggcatttttacctcactttgttgcaaatcgggtcataaagaagtcggtaaaagcggccaactcatcatcttgtgacacataaacatacagcttttcatcttccagccagtcgtaggcattgatgccgatgtacccttttttgtccgggtaaatgataaatgcgtcggtagggtacttattacgataggctttcaaaatttcagaccggcgataataggtcggatcgccgcagccggaaagatcgggtactgtgggaacgaccacaatcgtctggctggcttcgttccagccgacaattaaatttccgatcttcgttttacttccatgaacaaatccatagttgaaacggctcacatcctcggtatatccgaaaatcagcctataattatccccatcttctacgacctggttaaatagagcacgcattttctttgcgtttgcgttgctcttttccatgtcaatttcaggccccttaaataacttgctaaaaaatcccatgctcgttttcctcctgaatatttaaatgttttatatggctctggatagggcagtgcccacaacctcatacatgaagtaatactgcaaaataaggcataccatttcgggcactttgtcacaaagtggcgataaagcaaagtctattgctccgacaggacatgttccatctccgacaggctcaagccgcgaatcaatatgtagtctcccctcgtttccacaatgtagggctgtaaccgttgcaaggccctgcgatattctaaaaagccgaggttttcctcttttgttaagctaacaaaagtcaaagcccatagagagatggtctcgccctcgatttcgtatagcgtttctggtgctaccggcaggatagtatccacggtttccgaaaaagtaaagctgaccataagcccgccgttctccagttcaaatacgtgaggatttgcttcataggcttgcgaccacctatcacctggctctgtatcgtcggaattatcccctcccatttcaaacaacaagtgctgatgaacaacggcatttcctttttcgatatatggaatggactcggctccgccaaaagccaaagccggagcaaagaaaaagatttcgttttctgcaaggcccccttgtttagcagatgcttcttgaaagagctctactcgcaaaaattgttctgcaaagttttcggcgggaatgatacgctcaaaaaaatcggaaaagctggtggaaaagctgcccgatttgcggtagtgaatatcaagcagacacatatcgtcggctgtctcagatagcttgcgataaataaaaagcgttccaaatccagtcattaaaatgggcaggcatccctcttgctcacccagccaaagtgtgagcgtatcaacgtaatcagttggatctattattttcagtaatccgccgccataatttccgaagccatattcctgccaaaagttcagaagttctgctggcagtttcccgtgaaattgctccagcatttcagcggtgggttttcgcaagtcattacccggtggatatttgcttacgaatcggtcaaatgctttcatcgtatgttctcctttacgttttgttttgatctctatcgttgaaagataagagcaaataactaaatttgtttttattttaatgaaagtgaaatccgtctgaatataaggccgaaacataatattcggacggatttcctcattcctactattcaagatgcggagccgttttcaatttctccaaggcatccacaatggcatttagctgaaagtcaaccgtttcatcggcagcttcgggaacaaacagggggagcgtattagggattgccctgcgtacaaccatcgccgtcagacttaaattcgtaaatagatggattcttgctgtgttggcctttatcccaaagttttctaaaatttctccaaaaagacgaaattgcttttgacgaaacacttgatagctttcttttgacagacgcttaaaaataagctgttgttcttcaatcgttaaaacagcaattccatttttctctccatagcagcaggcgtggagaaattgtttcacagcgtcacgccagcttaaagccggatcggccatcagcttttgcacatactcaataattttaggttgttgcaagtatagcgtttcaacaatcaaatcttcttttgttgagaaaaaagaatagaagaaagtacgtgatatgccaactcttttgtatatttgctccacggttgtatgctgtatgccttgttttgccatcagttcaagcccaactgtaacaagttccgcccggatccgttccctatcctcctcagagtaagctacctttggcactccatcacctccgcgtacaataaaaacaaattcgataggttgaacttattttagcatgtcccatacaataatacaagagtgaaatgagcgccataagtctactattttttaacgacggtacttccgagggccgcacgtttctgcaagcaattcgggtgtggccacactccgaaatttttgctgggcagggcctgcaagaatgcttgttgggaaacctcagcaaatccggctctttgggacaaaatgccccaaagagattgactgcgccgctgccgctgtcgtgcggagcctaatccacacccgatttcttttcctatagaaaaagtaggcattctcttgccaccctccgcctcctgtgctacaataggccatgacaagcaaaaggactttctaaaaaggagagtaccctcatggccatgaaaatttcaaccaagggccgctacgcgctgcgcctgatgctcgatctcgccctgcacgataccggggagtatatccctctcaaagaggtcgccgcccggcaggagatttccgataaatatcttgaacaaatcatcacccagctcagccgcgccggctttgtcaaaagcgtccgcggcgcccaaggcggctaccgcctggccgagcctcccgcccagtacactgtggggcggatcctccggctgatggaaggctccctggcgccggtggaatgcgtggatggggaaggggactgctcccgggctgaccgctgcgtgaccatcgaggtctggcgcgccctgaaggaggccatcgacaacgtggtggattctatcaccttggccgatctcgtggaaaagtacagcgaacggggcgcggtcgattactgcatttgaaaaaatcgtcccgccctcttgacaagaggcgggaattgtggtttaatcatactaatcctataggaaatatttagttacctccggagccgccgtgcgaaaccgtgcgcttttatgcgaaagccgtatggcctttgcagcggaaaacgtgtattctgtgcggaaatgtgcgcttttgtgcgaatgaaaggtggatatttatgagcaaaaatgattggaaattcgaaacgctgcagctgcacgccgggcaggagcagcccgatccggccaccgacgcccgcgccgtgccgatttacatgacctcctcctatgtgtt

SEQ ID NO: 3592 - DNA, 32759 bp, Unknown
  16S sequences of unknown bacteria
gactaaatgtggaaggagaaattcgttataccacagggcagttacaagctccgacctctaaggccttagccgaaggtcggagtagttgactcataatagtctccttcgggctgagaatcagtcctgcctgtttaacaaagaggttttaatatgttttacaactgtttttccttgtttggttttgtttccattgttcagtatctgtcatcctccggtttgtattccggcctacaaaacagcgaaccttttcagtcaacaacagcatacctaaaatacccgaacaaatcaagaagtttcaccgactacccgcacctttaaatacagaagcggtctgtctgaaattgaatttcctgcaaaccgctttatttcatctacttatttatgctctgcatcgcagtatacgcatctgtatattcttttttccggatccgccagcctgaagctgtgtactatttcctgctctacgctggttatacatctcggatttttgcagaatatgacgttatccagcttttcgggaagtgacaggtgcttcttgctgacaagctcgttgttcctgactatattgactgttatgttagggtctatatatccgattatgtcaaggttcacatctatcatctcatctattttaattatatcctttgtgccgtattttttgctgggtacattctgcagtaccgctacgctgcatgacagccggtccagattaagcagtctgtatatctccatgctttttcccgccgctatatggtcaagcactattccgtttcttactccgtctacgttcattagttttctcctttcctgatacccagaagctctagtataagggccatccttatatatttgccgcacagcacctgtctgaaatatgccgctctcggatcgtcgtcaacctctgttgaaatctcgtttactctcggcagcgggtgaagtatcgacaggctgtcctttgccgcctcaagctttttcatatccagtatatatgtatcctttaatctgatatagtcctcttcattgaagaagcgttctctctgcactcttgtcatatacagtatgtcaagggttcctatcacgctttccatatcctctgtctgcacatattctattccctttttatccagcatatccgtgatatatccgggaacttttagttcttcgggcgcaatcagcacaaagcgtatattttcatatctagacatcgcttctatgagagagtgaactgttcttccgaatttcaggtcgccgcatatgcctaccgtcatatctgaaagtctgcctttttctctccatatggtaagaatgtccgtaagggtctgggtcggatgaaaatgtccgccgtcccctgcatttatcagtggcacctcgcagcgctgcgcagccgcaaccggagcgccttccttagggtgcctcattgcaattatatccgcatagcaacttactgttctgacagtgtcctttacgctttcgccctttgctgccgaagatgaggccgcctccgaaaatcccagcacgcttcctccaagctcaagcattgcggcttcaaaagaaagtcttgttctggtgcttggttcaaagaacagcgtcgcaagctttttgccgtgacatatatccatatattccttgggattttcaattatatcctctgccgtttttatcatttcatttatttcatcaactgaaaggtctgttatgttaatcagatttctcacgctcattttacctccaatccttagggtctgctctgaaagcctctaccatttttctctgctctgccgttatatatccttttaactctgccgtctgcataagcgcatcaaggtcgcacaggctgatgtttttaacccccgtctctgacattctgcgctcagcctcttcaaactgatatgtgaatatgctgactatacccagcacctccgcaccttcctgtctcagggcctccactgtatcaagcaccgaaccgcctgtggatatgagatcctctataactactgttttctgtcccggcaggagtctgccctctatgcggttgcctctgccgtggtctttggctgcgcctctgacatatcccatgggaagtcccagaatatgcgcagctattgctgcatgggcaatccctgccgtacttgtccccataagtatttcggcctccggatattctgctttcacagtgtctgccatggcctgctctatgatatttctcgcctgcggcgccgtaagtgtcagcctgttgtcgcagtacaccgggcttttaattccgctggcccatacaaacggctcgtcaggccttaaaaatacagcttctgtttccagcagcagctctgctattttctctctactcattatcctcacctccgaattctctcatcgctctgatatatgcttcctcggggtctttagcccctgtaattgaacgtcccattactatgaaatccgagccaagctctgccgcctgctccggcgttgtcacccgcttctggtcgcctttgccctcacctgcaaatcttacacccggagtaaccgttacgaactcctcgccacataaggcttttacctccggcacttcaagaggtgagcataccactcccgcaagacctgcctctctggcgtttgacgcgtactttgccacaacctgctccatcgggtaatctatgagaagctgcttctgcatagtctgctcatctgtactggtaagctgggtaaccgctataacaaggggctttctgtcacagtccgcaaaggcggaaaccgccgcctgcatcatttcaacggtgcctgccgcatgcacattgactatatcaacgtccagcgcggcaagtgatttcatagccttgcccactgtgtttggtatgtcgtgaagttttaaatcaagaaacaccttatggcctctttcctttatcttctttacaatctgcgggccttcaccgtaaaaaagctccattccgatcttcacaaagggttttgtttcactgaatctgtcaagaaactcaagtgccttatcaccgctgccaaagtccagcgctataattacttctcttttcatactattccttttacctccctgagattatctatgccaagctgctccataagctgaggcagcctgtctgttatttccggatatatccacgggtttctgagtcctgccgcgcctatctgcactgcgtctgctcctgccataatcatctctatcacatcctctgccgaagctatgccgcccattcccattattggtatatccactgcttttcttacctgatttaccattctgagcgctacaggaaatatcgcaggtcccgaaaggcctccggttatattggcaagtaccggttttcttgtttttatgtctattctcattgcctgcaatgtatttatgaggcttatgccgtctgctcccgcagcctcacaggctgatgctatttcagctatgtccgtcacattgggactcagcttgatatatacaggcttgcgggtcacagcctttaccgcttttgtaatcactgccgcctgactgctgctctgtccgaaagccataccgccgccgctcacattaggacagcttatattaacctctacgatatgagcctgagggcagctgtccataatctccgcgcaggcagcataatctctttctgaaaacccgcttatattcgctatgattactccgtcaaatatctctgcaagtcccggaagctgctctgtcgccacattagctgcgcccggattctgaagtcccacagagtttatcatgccgccggcagcctctgctattctggggctttcgtttcccgcttttgcttcaattgttgttcctttaaccgcaattccgccgaggatattaaggtcaaacagctccgcaaactctctgccgtagccgaatgtgccgcttgcgggtatcaccggatttttaagttctatctctcccagccttactcttgtgtctgccataaaatctcctcctttctgaatacaggtccgtctttgcatattctcttttcccctaatctttttttacatacacaccccatgcatgagccaaagccgcatcccattctttcttcaaagctgagctgtccgtctgacgccctgccgcatactgcctccagcataggcaaaggtccgcaggcgcagacatagcttccctcttctatcagttcggttataccgccgcccacttttataatcaggtcgactcccagcttttcaaatctttctctgaaaaaaatctcctcttcatttttaaatcccagtactattttcggcgctttgcctgcccttacaagactttcggcaagtgaatatatcggcgcggctcccataccgccccctgcaagcaccgcagcatccggcacaatctctgtgtcatagccgtttcccagcgggcacattgctctcaagctctgaccttctttcataccctttagtatctctgtgccctctccgaccaccttgtagacaagcgtaagtccgtctttgtcccacgaggctatggacaggggtcttcgcaggaatttctgttccagcacgatatttatgaactgtcccggtctttttatctcctgcgtgtttccggcaagcctcatctcataaatgtcctttgcaatctgctcatttttttcaatctgccaaagctcatctctcataaacaatatcacctccgcatatggtcgctgcaacctgaccctttactttcataccatcaaaaggacagcttctgcccatgcttttaaatttctccttgtctattacccattctgcattcttgtctattatcactatgtcggcagagccgccctctgcaagctgcccgccgtcaaggttaaatcttgacgcagggtttgtgctcataagctgtatcagcctttcaaaggttatcccgcctgtttcgcacagcagtgtgttcattaccgcaaaggctgtttcaagccctataattccgttgaggctgtcctcaaagccttttgatttttcctctgcgctgtgaggcgcgtggtctgtcgctatcatatctattgtgtcgtctttgaccgcttcaagaattgccgccttgtccctttcgcttcttatgggcgggttcattttaaatttgccgtcatctgtaacatcctcttcactaaaggctatgtagtgcggcgctgtttcgcatgtaacatttacacctcttgcctttgcttctctcacagcctccaaggtccttgccgatgacacatggcatatatgaagcgccgcgccggtttcctctgtaagctgtatgtctcttaccgcctctgtccattcgcttctggcgtcctttgccgggtaggcttcgttttcgcagtgggcggttatgaccctgtccagagctgccgccttaatcatagcctgcctcataagcgcttcgtcctgcacgcctttgccgtcgtcagaaaaagaggcaactctcccggctatttcatccatagccgaaagactgcctcttccgctctgctcttttgtaattgtaccatagggaataacttttatcaccgcatcctttctgattatctgctccattacttcaagagaagataaatcagacggcgcaggcactacgtttggcattgccagcactgctgtatatcctcccgccgctgccgcttctgtttctgtctttaccgtccccttatatgaaaaacccggctctctgagatgtacatgcacatctatgaaacccgggcaaacaaaaaagctatcacagcagataactttgtcaacagaaatattatcaatattatcagcaatggaaacaactctgcctccgtcaatcagaatatccgatgcggtaaatctgtctcctctatatacattgccaccttttaaaattatcttcatttctgctccttaaacttatttttgcttaaatcttcgatatcataccatacggttcgcacatttgtcaacactaatttctaaatgttttttgatgttttgctgtttttaataatttgtatatgtactatcaaaatcattggtgctataatatatacaaataatttcaaatcaggaggtaattattatgaaatggacatgttcagtatgcggttatgtttacgaagggcctgaaccaccggcacagtgccctcagtgtaaagtaggcgcagataagtttatacctgttgctgaaggtaagacagaatgggctgaccagcatgtagtaggtgttgctacaggcgttgatcctgaaataatcgagggattaagagcaaacttcacaggcgaatgttcagaggtaggtatgtatcttgctatggcaagagtggctcacagagagggataccctgaaatcggtctgtactgggaaaaggctgcctgggaagaagcagagcacgctgctaaatttgcagagcttctcggtgaggttgtaactgactcaaccaagaagaatcttgaaatgagagttgaagcagaagcaggcgcatgcgcaggcaagaaggcattagctaagcttgcaaaggaaaagaaccttgacgctattcacgacacagtgcacgaaatggcaaaggacgaagcaagacacggtgctgcatttgagggactgcttaacagatacttcaaatagttcagattggttgaaatttcaatatgcagaagatgagggaagtctgaaggggcttccttttttctttgtaaaatcatattacaagaaaatttgacttgtaactttcttgtaactttccgattttgacagtcataaaaatcatcaaactggtaactttttgacattgtaacttttttcattaacattataccatacaatcattgaaatttcaacgattatatgctataatgtgtttttttcgctttcttttctctggataccttctataaatattatatctgaattctgaagagatttcattttttgaaagatgtcaagttttgagcataaaaaaatccacacagccgccgccatatggagaaatatttcttttcgcttgaaattggtgtccctttgtgatatagtggtgtcaagaggaaagccgttgaaaacggctaacctgttcagttaaaaaataactgccgaggttgcaagcttagggcagttatttttttatggaaattgtgattctcagcctaccaagggtaattgtgattctcaccatatttaccaccttccttctagtccaaaatcccttttgagttttggggaaggttaaccgctttcgcttgtcctcttgacaagtttattatatcatttttcagaagccgataccactataaagtgtcttttgaatgaaaaatccgcacagcggttgccatgcggaattcaaaattgattattttactgttctccacgcctttgcagaccacgcagagtagtattttatgccatccacttctatataactacgaaccttgtaataatacttcttccccttctttacagaagtattgtaatacttcccagacttagaagtatagattggattctttccataaccagagtttttcttcaatgacctgaatatttcaacgccatcaaatttcacgccgctggtattcgtccaagtaatcgtaacggccttcttgccgttcttcattttcacctgtttagagcgtgctttgaagttgtcctttgttacctttgctaattctaattgtactttttcggcttcggaaagttccgctttcttaacgactgtaacctcaatcttatcgcctgtttttagtcctgtaagcgttgttacctctccctttgaaacgccattcactgtcacatcaacaagttcatagccatcctgcacattgatggttgctgttgtcccctcgcttccagtgcttacagtgtatccttcccctgttgagatcgtcggcttctgcactgttattggtggaataaatccaccgccgccaccgctgctgccttcaaccgtcagcgttcctccgacaaagcggaactcatagttttcggatgtaagaccataaggcataatctcataagtaccgactgcgctctccttcgtataggaacaggtgaactgaaggtttccgcctaaggaggccgcgttatcggctccggcaaagccctcgtatatcgcctcatactcagggatctcactttttactcggatccgcagatcctttgcggtaacggtaagcggcgccttgcggatctcaaatgaaaattccttatttcccgccagataattcttcgtggcctttgtatttacgatcacccgatagcttcccactgcggccggggcatttggaataacctcatttcccttcataaacgttaccgtaagtgctccgtcactatcggagcgcaccttcggctccagtgccgctgcatcgtaaacacgatccagtgcggagagattttcgatcgagagctccggcgcggcctgagttacgttaagggttcccgggatatatgcgattgtatagtttccgtttttcgccgtaagacccgagggaacgatctcatattctccgacatcccttccgactgcgtaatcgcaccggtaggtgatcttcccctccagaactttctctgtatcatcgaccagtccgctgatcttgctgctgtataccggcggcgcctcccggtaagccaccgtcttcggctctgccgtcacggtaaggtctgccggatcgatggtcacagaggcctgacccttatgggttatatagttatccttggaaacctcataatagacggtataagctcctgcattccggtagagcggattttcagtaagcgtacactcaccttctgtttctccgtataagacggttccgccttcggcagctgccgttaagtttacggaaatgccatgagcccttccgtcataaactcctgtgtaattttctgacgccacaccattaagcggggccttatggatcgttacgataaagcttcccgtttgcggctcatgatccgatgccgatgccacataatataccctgtgctctccggcatcggtaaaggccggtactgcaggggaagctgtggccggatcggccgcctgctctgctgtcaggccatagacaaagcctgccgcatttccgttaacggtcgttgccctgactgcgaccttcgccacctgaggactgccattgtaggtaagagactctgtctgcgttacagaaactccggtaagctctgcggctataatttgcgcatcctgacaggatattccggtaagtctgtcaccaccctccacgatgcagtaattatcttttgccgtaccggtaagttggatctcggaaacattcaccgtatttgttcctgctgccggagatgtccatgtgaaaactccgcttgctcccagctctgcttcatccgcagaaaggagattcccctttacggcttccagcgaaagcgtaccgcttgctgttgtcgttccgtcatacttcttggagtcgagcgtcttaaccgaaatcttaagctctgccttattgacggtaaactccttccattcacttttcgctccattgaaattccggctttcatcgatctcggcacgcacataccattttccggcattatttccggcagaccaagctacactgtcacttccgctagtgtcctgtgtgtaagcaaaccgcaccagcccggagtccgcttccgtataagctacgcctgcatccgcatttttcagctgaacttcgggggacggtgactcgccgtaatagatattttcacaggtcagtccggaaaatgtgtggtctgctttctcgatcgtcagctgattattatagatcgcatccggtgtttcctgtgccttaacattgcttccttccgtacaggtaattcccacataatattggccaacggctccgtcttccttcaggcacacgtcgtagtgtccttcgctgtttcgggaaacctcctttgtaagggccgcgtcttcataaagcttatagttaatctttccatagccggtaatcacggctgtggcaccggctgtactgtattctccccggatcaccggctctaaagcatcccctgcatcctgaccataggttatcttactgcgagtcataaaccacaaaggattaaatttcgccttctcgatcgtcatatcgcagaggaacagatctgtcgcacgattgatcccggttttttccgatttcgtagagacaaatacgccatatacaccggctgccgcctgtgcttcgaggaagcttcctgtatattcatctccctccttctttttataaagtacactaccgatctcgaattttccgttgttttccgaagtcggtgttacgcttactccatgtgtagcctgatttccggcataggtgaattttgtctcgccaatactgaaatcatttttatttaatacacgtttatttgtcgttgccgtcagcataagggcatcggatacatcaagattttcattttcggcaaccataatacaggaataggattgtcccggctccagattcgtgtaggaaattgtgaatttaccatcttctggggttaatgaatgaaacttttctctcgtagcttctgccttagccgccgcccttaattcttcgccactgaatgagctatacgttgtatcttctgtataatacagggtcgttccatcagactctgcctgaaagctgaccgagctgtctccggtagcaactgcgttacccgtaagagaaaccttatagcctgcgtaaagctcgaccaccggggcgccatttgcctccgtagcaagcctatcctccacaagctgattaacggctttcgtttcatctgccgctgtaccatttcttatgtcatccttatagcgccatacggaaaactcagcctgatttatcccggaaggcactgttttactcaggtagctgcttatcggttctgcaccattgaccgtatacccttttaaaagatattcatcataaaacggctctgtatctttatgctcgttataatatttaacatgaaccgtctgcgcccctgtctttgggaacgcatagatgtctgtcgtattctgcgaagctgatggcttggcagaattatagaccacgcagaccggcgcttccgggccggaaagctgaaccgcctttagaaagctcctgtattcctctgtggatactcgaaacagcttgcccgcttccgctccgctgttaagaacgatatttaacttatctgcctccttaagctttgccttcgtgaaatcgatctcattcgtacaggataagttttcgatttgcatcttggcaaaagggaatgactttgaggagttttcattctctacggtaaacttttttggttcacgagagatttgagtgttgtcatgtgcaaggaagatatcggattctgtccctttgatcgtaccaccctttatcgtgacttcattatgttgggtattgtaaataccatatttggctcctgttatggttcctccctcgacaaggagagaagcataggagtcggctaaggcagaatctccttttctgtatatatacaaagcacgtccaccggaagactcgatcgtgcctccccggatcgtaatctgtacgccgcctgtcgcactgatcgtgtcgcggctctcaacatcgcctgatgactgattctcattccggatcactgtgctgtctccttcaacgatcaggtttgctgcacgcaacctgatcaccggcgaattcgtactttccccgatgatctctcctcctgtaatatggatcgtacttgatgtcgcaccgtcaaagccggaacagctaaggctggattttaatgttccttttccggtgaccgtgacccttccttcaatctttccttctaatacaacggcattttcctcgatgaagcccgccgtatctatcgtaatatcctccctgatcggattagccgtactgccaatagtgatctgagggccggcagctcccgtattcataagcaggatatcatttaatataccggatacgctgccggaggctatatcatactggtatgtcttattttcctctgtcccttctcccgcagaggcatacgtaacggtaacatcatatttaccgtctgacagttgaatatccgcttttttaataacgccgctttcgatctggcttgccggagcatttttatccaggatccggatataatttccggcggcttttaattcgtaatctgcatattcagcctgtgtcttcgcattcggacagatcacatttaatttcatattcgcgagcaaggactgaatgttatcagaacactccatccagttcgtcaacgccgagcttgccttcattgccgaataataaggcgccagagtaaaattggaattaaccgaggtcaagccggtcgcatccaccgtaggataggagccattgaaataatatagggaaccctgttttccgctgtcacacgaagcagagatatcgacattcccggataaggtcagttcggtattattcgccatgctgatggcataagctgctctgttggagtcagtcgtatttgtatttttcgcatagatctcgccgccgtttatggatattttctcggctccgcggatcgcatatatcgaagatgtatcggctttacaattttctaagcggcctccgcttatgttgacttcctttacggaactaaggcttcctttccagacacccccggagatctccacatatcccttcttatttccaaaaacagtaccgtttatctcaccgcccgtcagatatatcttctcatttgcctgcaggtaaaatatctggttgtcgatgctgtttttttcaagagtgccgccattatgctcaaagattacttctgcttttttactatttgtgatcgccatttcagatactgtgatatctgcggtattgtgtatgataaagcagccggcactgttgattttaaacaacgctttcgctttataggagcccgtcagggtcagctcgcacggagtgtcaagctgaatgccattattttccggagaaacaatattatcaaaatggatggcaaccttttttgtttcgctctggtctaagattgtctttaccgcctccgtaagtgtagtgacttttgtatcggtaagtgctccgcccttaaccgaaaagccatcggaagcatgactgatcgtatagacggtatcctcggcagcatctgcatacattgcactcccggtctctttgactgccgcactgatctctgggagctttgtgctctccggcttttttacgtcagagggcgttgcgatcacagcttcagagactttcgccttttctgtattcgttttttctgttttctctgtcgtttctgcatcggacggagatgccgtcagccctttttcctctgcttgaatgctttcctcgacagcggaaaccatagctgcgcttgctgatatatttaccccgccgtaactgactgcaagtatcgctgccagcacggctaccgacagcctcttatgccaccttcttttacccataaaattctctcctttataagcatttcgactttattacctcattttataatacactatccggaaagctttttcaatacgcattgcacccgtctttaggatttagcactatcttttttcccgccggagaataagatattgaacctgttgtgcaatatcagcaaggtggctgttcattttaccgcttgtgagcaaattgtaataaagcactttatgacgttgtataatggtctcgtaaattaagacactttttggacagtttttcatgaatctgtgttaccaaaaagcttgagcacaacaactaacgttgtaacagtagtggctaataagatataataaatccagtagagaaaagaggtaattatcatgccacaaagttacacacctgaatttaagaaaaaaatagtacgtcttcatgaagaagaaggtcgtacctacaaaagcatcaccgctgagtatggggtatcgaaagccagcatttctaagtggtgtagcgagtttagtaaagaatgcctgtcaagcccggaagccaaaaaagattatgacaactccataaaaaaatcctccttgacttgcaacttttcttgttacattgtcaaaaaggactatagttgtggtcatataactgtcatttttaatttgattcaccattgaaatttcaacgattataaccattcaacctcttttacagtgcacgaaatggcaaaggacgaagcaagacacggtgctgcatttgagggactgcttaacagatacttcaaatagggaattcaacagctaacgatttgggaagtctgtaaaagggcttccttttttagtggagtcaaagacaatacttttcacatcgccaatatattgaatttttacttgaacaattattatcttttcctatgcaatgaaaatggtttcaaacctgatttcaaaattataaacggaaaatccgtttttatttttcatatatggttagtaaatcagcgcatatcaaatttatcaacgggttttccgtttttatttttacaacaatagatttaaagctagtacttgcatacacaaatgattttcacctatattgacaaactacttctgtagaagtatagtatataatataactctgtagaagtataggagatgttttatgagcaatctaaccatatatcacggttcttccgagattattaaaacccccgaataccgcaaaggcactgtatataatgattacggacaggggttttactgcactgagcatatagagctggcaaaggaatgggcctgcacagaaaatacagacggctttgtaaacaaatatgaaattgatatatcatcacttaatattctgaacctgtcatcagaggaatatactattcttcactggctggcacttcttatgaacaaccgaaaggtccggctgtccaccccgattatgaaaaaaggggcacaatggctgtatgagaactttctgcccgacatcaccggctatgatgtgattatcggctacagggctgatgactcatatttttcctttgcacgcgcctttgtcaataacgaaatttccctaaagcagctgtcatatgcaatgcgtcttggaaaccctggtgaacaatttgtattaaaaagcaggaaagcctttgactgtatcaacttcacttcatacgagcctgcagacagcaccatatactatactctgcgcaaagccagagatgaagaagccagaaacgcattttttgcagagcttgaaaatgatgatgcagacggtatttttatgagagatattatacgtgaggagattaaacccgatgatttacgcttacgatgaaatgtatttagacgatgctatgaaaaacctcggtgaagcagcagattatgctgccagctgctgcaatttaaatattgatgccttttttgagctgttcgtagcaacaggtgtcgcctctcagtttgaaaaaggcaatcccagatttgtatccggattttcggggacagaacttgtatatgagattattgacagagcaggacttgaaataactctgccgccgcctcagattgaatatgattattcatcatgttactggtgcggctggattgctgcatattatcagtggcgtacagataaaagcttcaaagacattatttctaaactctctgcgggagaaatagaaaacacctaccctgccctgcacgaagcttcagaagaaaaggcatttgatacgttaaacagaatgcttgaaagaaaaaccaccgcatccaaactgcagattttaagaaagaactgcggtctttctcaaagagctctttcagaaaaatcaggggtaaatttaagaacactgcagcagtatgaaatcagagcaaaggatataaataaggctgcgggagaaacccttcttgcccttgcaacggttattggctgcagcattacggatttaatggaaatttaacagccccgcatccatagccgacataatatctgcatcataatcagcgcaaatgatgcagatatttattttaaagctgtacacagcatcatcgcttcctgccgaacttctcacctgtaagcctgaacaccgttcccgacagcagcagcagagatataaggtttggaataaccataagcccgttaaaagtatctgaaatatcccatacaatacccatatcaataacagcaccaagtaccgacactaacgaatatacgatgaaaaacggtcttacggtcctgcttccgaacaggaactccataaaccgtgagccgtacagaccccagcctattactgtggaaaaagcaaaacagcacagagccgccgctgtaaatattgaggcccagtttccatagagtgaaacaaaccccgaaatcgtaagttccgccccggcaagtttgccatactgaatatattcattaccgcacaaagtcacaagagcagtaagtgtacatattattatcgtgcagaacacctcgaatatgccggacattccctgccctacagggtcatctgtatcagcgcaggcgtgagctatagagcctgtgccaagtccagcttcatttgtgaatatccctcttgaaacacccttgcgcatacataaaaacacgcttccgacagcgcctcccgttgcagcctgcggattaaaggcccccgatataatactttcgaacgcatcaggcacaccgtcaatattaaaaaccaccacgcccagagccataaaaatatagaaaagagccataaacggtatcagcttctccgtaacacgacctatcctctgcactccgcccagcagcacaactgcaacaagtatcgcaattaaaattcccagagcaagattaagcaggctgtgaccgctttccgcactgtatgaaatcccgtcgattgccgtattcacagccgtcactatagtattcacctgagttgcattgcctgttcccgcaactgccagcacgccaaaggcacagtaaagatacgcaagccatatccacctgtgcgaaagcccgttgcgtatgttgtacataggaccgcccacaagttctccgcctgtgccccttgacctgtaaaacacagcaaggctcacctctgcaaatttagtgcacattccaagaaacgcagagcaccacatccagaaaacagctcccggcccgcctatggctatagccccggcaactcccgctatgcttcctgtacctattgtcccggcaagagccgtacatacagcctgaaacggagaaatagcccctttgcctgccttttgcctgtcaaagagtctgccgaaaatctgcgctatggcgtatggaaatttccttatttgtataaatcccgttcctatagtaagataaattcctgctcctacaatacatatcatagcaggcagtccccacacaatctcatttacaagtgtattaatttccgtaacaatcttcatagccgcctcctgcttcacaactatatatattattccttcctgatcgtattattcatatgatgtatgcatgcaaataattattttaacggctttacttctgtaatatatgtgatataatcgtgtagacttaatgcaagttaaatcataatcaacaaacgggagggaattatgaaattgagaagcattttcgcagcggtgcttgcacttgttttctgcctcagcagtcttactgtatatgcagatacttcaggctccggcgacggcacaaaaatcaccaatatgactgcaggcaagctgatgtttattactctgcaggagaataccagcctcagatggaatgtaaacggcaatgcagagaaaagcaacgtgctccatcttgatacggcaaacggctcaaactgcaacttcagatttgacaatataggcggcggctggtacggcatcaagcatatcagatcgggcggtaccgactatttcgcagatatagaggacaagagcaagagcgagggcaaggtgcttcatctctgggaatcaaatgacagcaaagttgcaggaaacgaccaccgtcagtttgctttctattatataggcgatgatgcccacggcaacaagcagtactacatacagaacaaaaacagcggtctgtgggtaggcgttgaggacactgacaaaaacggcaagccaagtgttcacgacaaaatcatccagaccagcaaatcaaaaagaaaagtatggataatcacttccagcgtagttcctctaacaggagcagagtccgaaaatatgacaaagagcagtaagaatgacatctgcgaaattttcaagtttggaacgatcaaggctgtaaacagagtccttgactccagcatacccggaactcatatacaccttcatcaggtaggcaccagcaacaaatgggctcttcaatggaatgaagaatacagagcctacaaaatactggcgatgacagaaggtgaaaaatacgtgcagcttgcctgggatattgagggcgaaagcggcaaagacaaggctatgctaaatgtatggactgatgatgattttgataagaactacaacaccagccagctgtggcgtttcttcaagcaaagtgacggaagctacaaaatacagaatgcccgcacaggtaaattcgtaggactctatgcaggagcggaatcactctggcaggacagcaacggtactaaatttgaaatagatgtttttgcaaacaaaaatgacaggatttcatatgcctactcacaggactggatggcagacctgcctgacaatgcgcttctttcatcagtaaatctgccgggaagccacgataccggcacagcatcagtcgttgaggactttgtggcgcagttctctatcacttcatgtcagaaatattactatgaggagcagttaaatataggtgtaagaagctttgatatacgctgtaatgcgcaaaaagacaaggcctcccttgaagatgtaagaattgtacatggtgacaaaaaatgggcctgcagtgacagaaacggcaacccgctcacacttaaaaacatactcgatgaaagtgtacgcttccttaacgagcatcctacagaatcaatagttatgatggtaaagcccgacgacggaagtactgaggggctggcaagagcagtaggcagctttatcaagaaagaggttgcaaaaggaaacagttgccgtgtatggaccggcaacgatataccgtcaatcaaagaagcccgcggcaaaatagttttcatacgcagatacgatattgatactaataaatacaatccggctgatgacaatcttgacgagcgctggtttggtatcaacctgtcaaactgggacgactattcatacggcgactataaatatgctattaaaatctacggcaaagacaaattcggtacatctgtatatgcacaggatgcatataacgagtattcaacaaccaagctgaaatatatagagggaacatttgcgcagaccacaggcgctgacaaatcccaccctataccttctgatgcgtggatattcaactacaccagctgtgctgtaggacgtcctctggagcttacaagcataatcaatcctatactgtttgaagacaaattcggcagcgatggcaagggctatatcgacaacagaagactcggtatggtaatgctcaatttccttgacagacctatgagcagactcatatacgaaacaaacttcaaaaacagcaatttcatggttgcaaaagcagatgcgccgacaactgtaagccttgttcgcggacagaagctttcacaggccaagctggcaggacacagcagagagggaaaatgggtattcgcagacggcaactatgttccgactgtcaaagacttcaaaaacggcaagactttcaagctgagatttataccgtcagacagccgcctgcagggctttgaaagagaagttacaataacagacttcaagtacgcaggcaagtctgacaataatattaaggacggtagcagcaaaacagatacagacaaaaccaaagctgacaagactgctaaagctgatgctccaaagacatcagatgatatacacagaactgtcgttatactttcattactggtagttatatttgcactgggacttggtgtttcagcattaactttcagaagaaaatactagacatcggtaatacacaatttatctaaatcggtaattgtaaactctccggagcctgccctgtatgcaggtttcggggattttgattttttgcggattttcaccctttacacctatgcaaaatagtgctagaattactaattagaaagtaaactttttcagatataaggatggcatttctgattaatcgaaaactgtacctaaatttaaactccgctcaatggaataaaaaccgcatcatctgcacacatatataaaagaggtgataagatgaaaacaggttttattggagcaggaaaagtcggctttactttaggcaaattttttgcagcaaacaatattcaggtgaccggttactacagccggcgcagagaatcagcaaaagaagcggcagcttttaccggaactacggtatacgacagcattggtgaattagttcaggattccgatgcggtttttttaacagttccagacagcgctatatcttcagtttttgaagaattaaaagagtttgatcttaccggcaggcttatctgtcactgcagcggcgcaatgacggcaagagaagctttccccggtattaaagatacaggtgcatacggttattctatccatccactgtttcccattcacagtaagtacgatacttacagggagcttgcgggtgcttttttttgccttgagggtgataaattctatatcgactactggtatgaaacactgaaatcactgggggtaaatgtaaagacaatagcttcagaggtcaaggttaaatatcatgcagcctgcaccatcagcagcaatcttgtctgcgctctggttcaggaaagccttaatctgatggagacctgcgggtttaccagaagcagcgcgcttgaagcgcttaccccgcttatcgagtgcaatgtacgaaacatattaaaggaaggacctgtcaatgcacttacgggtcccgttgagagaaacgatgtttcaacaatacagaagcatctgggctgcttccttacgcagacagaagaaaatctgtacagagatctctcccgcgagcttattaaggtcgcagaggaaaagaactcacatataaattattctgaactgaaaaatatgcttaacgaggagtaacacaatgaacggaaagaaaaacacagtggcaacactgttgaatatgaaaaaaagcggagaaaaggtctcaatgcttacatgctatgactatactaccgcacgcataatggaaaacgcaggtatcaacaccatacttgtaggcgacagtcttggaatgacaatgcagggctatgacaccacactgccggttacaatggacgaaaccgtaatatatacaagaagcgtagtaagaggctgcaccaatacatttgttattgcggatatgccgtttatgagctatcaggtgtcagctgcgcaggcagttgaaaacgcaggacgccttatcaaagaaaccggcgcaaacgcagttaaacttgagggcggcgctgcagtgacagaacagataagagctatagtaaatgccggtatacctgtatgcgcgcacataggtatgaccccccagtccgtaaacgtattcggaggcttcaaagttcaaggcaaaggcgaagcaaacgcaaagcgtgtacttgaggatgcctttgaagtgcagcaggcaggagcgtttatgtgcgtacttgagtgcgtaccgccaaaactcgcagcgctaattaccaaaaaggttgatatgattacaataggcataggcgcgggagcaggctgtgacggacaggttctggtaatgcaggatatgcttgcaatgaatactgatttcacacctaaattcgtaaagccttttgccgatatcggacagcagatgtcagaagctttcaaagcctatgacagcgaggtaaaggctaatacattccctgatgctgcccacagcttttcaaagagcgactgctcagatgagtatcttgcgcagcttgatgaaatgttcaaataaacagatggagtaaacagatatgattacagctacaaaaatttcagaagtccgcaatacagtgcgtgaatggaagcagcagggatttacggtgggacttgttcccacaatgggttatctccacgagggtcatgcaagccttgtagactatgcatcggctatgtgcgataaggttgtggtttcggattttgtaaacccgacacagttttccccgacagatgatctcgaagcctatcctcgtgattttgaacatgattgtgaaatcctgagaaaacacaactgcgatatggtattctatccgtctgtagatgaaatgtatcctgacggtaacggcaaaacagatacctgtgtagatatttttaatgatatgacctctcagctatgcggcagaagcaggcctggccatttcaggggagtctgcacagtagttgccaagctttttaatatagttactcctgacaaggcattcttcggtgaaaaagatgcacagcagcttgcagttattaagcgtatgacaagggatatgtcctacggtatagaaatagtaggctgccctactgttcgtgaatccgacgggcttgcaaaatcctcaaggaacgcataccttgagcctgagcagagaaaagctgcgcagattctttacagggcgcttcaggcaggcaaaaatgcaatagacaagggagaaaaagactcaaacaaaatcacagacattattcaggaggttatagactcagagcctatggctgtaactgattatgtatccgtagttgacggtatcactatgatgccaatagataaaatatcagacggcactcttattgccattgcagtatacattggcaaaacacgcctgattgataatttcacatatcacagcagataatatattttaaaattcaaagttttcatctcgattacagataaccgggatgaaagctttttctgttccttttgtatatgctatatatattatatttattttataagtattaattgctgtaaacatatatgatatactgattatagataaaaggtgttgccatataggcggttgtccattatgtgttataaaaacaaccgcatctttgacacttggcggttatttttgtttgctgctacggcctgcttcatagcccggcatcggataataataaatatattacataaactataaatggagcggtttcttccgctccgaatataatgtactttatctgacctatatttcctgtctctaaactttattgtcactgtcagcagttcttgaacactctgatagcctcctgaatgttcttaacccctataatcttcatctcgcccgcaggcttaattctctcagcgtttttaacaggcataataatctgtttaaagcccattctgacagcctctctgactatcttgtcagcgttttgtactgtacgcagctctcctgtcagccctatctcacctatgactatagtccttgcaggagccgccatgcctctgtaggtggaatatatggcaagcgctaccgcaaggtcaatgtatgtgccctcaggtttaaggcctcccactatgtttacatatatatcttcgttgagaagcgacagtcctgcctttttctccagaaccgctattatcatattaagtcttgcaaaatccacgcctatggcgcttctcctggcaaagcccacattggctgccgaggataaggcctgcacctctagaagcagcggtcttgagccctcgtatacggctgtaactatggctccctctataccgtcctccacgtcctcaaggaaagtctttgacagattctcaatctcgataagcccctgctgcgccatttcaaaagcgcctatttcactggtattgccaaatctgtttttgtagcagcgcagtattctgatttcctgatttctctcacccttgaagtcgagcacgcagtcaaccatatgctctactgtcttagggcctgcaagctctcctgatttggtaacatgagcaactatgaatatcggaatattatataccttgccaagcttcataagctcattaccgcaggttctgacctgtgacacactgccgggcgccgagtctatatcaggcgtaaacatagtctgtatggagtcgataatcacaaagcttggtttaagctcctgcgccgccagatccacatttgtcatattggtctctgcaagtatatacaggttctgaggaatatcgggacatatcctgtctgcacgcagcttgacctgttcctcggactcctctccggaaacataaagcacactgccctcgcttcgcgcaatattggccgcagcctgaagtatcagggttgatttgcctatgcccggctcacctgtaataagggtgagcgagcctttgacaagaccgcctccgagaactctgttaagttctcctatgcctgtatctattctctcatgggtttctgagcttatctctgcaagcttttcggatttgcgccttgtctggtccgtgctgcggcctctcctgtcgcctgccgcctctgtctgcactttctcctctacaaagctgttccacgcgccgcagatgcactgtcccatccatttgggactctcatatccacattcctgacatacaaatactgttttaggttttttggccatagcaccctccttgtgaacatttgttctgttattaatatatcagaacaagccctgcttgtctatagtctattaaaaaaatctccggaagtcctgtgcaagtctcccgaagacatctgttaccgttttgatttttctttttttcccgatattataaccgagattataatgctcagggcaagtattccgaatatgaagcctatcgatacagggattgatatttcaaaatggaatatcagagccagcagcttgactcctgtaaatatgagtatcaggccgacgccgtatttgacatattcaaatctcctgcgcatatgctcaaccacaaagaaaagctgtcttaagcccagtattgcaaatatgtttgatgagtagactataaacgggtcctttgatacagaaaatacagcaggcaccgaatccaccgcaaaaattatatcggaaaattctataaggcagagaattgcaaacagcggcgtgaaaagttttttgccgttttcggttatcataaatttctcgccgtgtaaatcccttgtcataggaagcactttgcttatcccctttattatcttactgtcgtgagggtccttttcctcttcttctttccacatcctgatgccgttgatgataagaattacgccaaagatatagagtatccattcaagagcgtttacaatggcaatgcccgcaaagataaatatgaagcggagaattatagcccctataattccatagtttaaaactctgtgctgcgcatgttccactatgccgtatgccataaatatggatataaatacaaacagattatccatgctgagactgaattcaataagatagcctgcaaagaactcaaggcatttatcactgccctcaagaaaatatattcctgctccgaatgcgcatgcaatcagcatccatatgaaaacccatttaagcgagtgtttcacctcacgcatctcgtacctcctttgcctaaaaaagaccttagacatctgccccgttaagacaaatgtcaaggtcccggtttcattactgacagcttctctgaataagagaattaaatttctattcttcttcttcagccttgtgctgtgctatgatcttttcggcaagctgtgcaggaacttcttcatatctttcgaaatgcattgtgaagcttcctctcgcctgtgtcattgatcttaatgtgatagcatagtcaaagagttctgcctgcggagcttccgccataagcttctgtccgccgcctgcctgaggttccatgccgagtatcttacctcttctcttgttcatatcccccattacatctcccatgtaatcatcaggaacgatgatgtcaagatgcattacaggttcaagcagacaaggcttagcttcaacgataccttttttgaatgcaagtgatgctgcaatcttgaatgccatttcgtttgagtctacatcgtggtatgaaccatcatataatacggctttgatgtttactaccttgcatcctgcaagaggtcccttttccatacattctctgagtcctttttcaactgcaggaacatagttcttaggaattgagccgccgaacagttcttcactgaattcgaattcttcctgtgaaggtgagaatctgatatgaacgtcaccgtactgtcctgctccgcctgactgtttcttgtgcttaccctgaacatctgagttacctttgattgtttctctgtaagctatcttctgaggaacttctttaacctctacgccgaatttatcctttaacttagctgtgattattccaagctgaatttctccctggcctccgaggagtgactgatgagtttcaacgtttctttcaaatacgaatgacggatcttcttccatcagcttgtggagacctgttccaaccttttcgtcctcgcccttgccagctgcttctactgccttgtaaagtgacggtgcagggaattctattggcgggaatgtaacctgtgctgatttgtcacagagtgtgtcgcctgtctgagtgtactgcagctttgcaaatgcaacgatgtcgcctgctgatactgacggtgcctctccctgagtgttacctcttaagaagaatactgaacccagcttctcagctttctctgctcttgtgttgtatgcttccatacctgttgagattttgcctgagataacctttgcaagtgaaatcttaccaaggaacgggtctgcaatagtcttgaaaaccagtgctgccatcttgccgttaggatcacatttaactgtttcgccctctgttgtttcgtattccttgcctgttgctgtaggaacgtatttaacgattgattcaagtacgtctgtaatcttgtctcctgttactgatgagcattcaaatacaggaacgatatctccgcttgcgatacctgttgaaaggccctttgcaaactgttcgtctgtaagttccatattttcaaggtagtattccataagctcttcgtcagtacctgctacttcttcttctaatgactctctgtcatctaaagtaactacagatgaaccgaacttagcctttaattcgtctaccagtgctgctgtatcaacgttttctttgtcgatcttatttaaaatgaagaatcttggcatatcagcttttttgcaggaatcccacgctttttcggtaccaacctgaatacctgactgtgcatcaactacgattgctgctgcttctacagctcttaatgctccgtttacttcaccgatgaagtcaaagaaacccggagtatcaaggaaattgattttaaccttgttgtattctacaggaacgatagatgtgccgattgaatagcctttttctttttccatcttatcgtagtcggatactgtgtttccgtcttcaaccttacctaatctgtttataacctttgtcgcaagtaatgctgcttcgaggaatgtagttttaccagcaccaccgtgacctaataatgcaacgtttcttatagtgtcgcttgtatagcctttcatgctaagacctcctaaatttattttcacatagtagtattagtatatcatctatatttttttattgcaatccttttctaccactgaggaactgtgtttttcaatattttcgcagtattcacactaaaaaggttaaaagccgcatatatatacggaaaagggccttgcctgagcaagccccccgagtggtataaaaatgatttagagattgtatttaaagtttttagtatcctccgaacattgaaagcattactgctgccgctacggcagagcctataacgcctgcaacgtttggtcccattgcatgcatcagcaggaagttgcccggatcgtagctgctgcctaccttctgggatactcttgctgccataggtactgcagatacgcctgccgaaccgataagcggattgattttgccgcctgtaagcacgttcataagctttgcaatgagaacgccgcccagtgtcccgcatgaaaatgcaacaacgccgagaacaacgattttgagtgtttctgctgtgatgaaagtgtcacctgtagctgaagcgcctactgcaaggccgagcataatagtaacgatattcatcatagcattctgagctgtgtctgaaagccttgccgtagcgccgctttctttgaacagattgccgagcatcagacatccgatgagcggagctgccgcaggaagcagtaatacgcagagaactgttacaactatagggaagaggattttttctctctgtgtcacaggtctgagctgctgcattctgataagtctttcttttggagtggtgaacagcttcataataggcggctgtattacaggtacaagcgccatatatgaatatgccgccaccgcaatagcgcccagaagattaggagcaagcttgcttgtcagataaatagctgtaggaccgtcagcaccgccgataatgccgattgatgctgcttcctgtgcattgaatcctaaaataattgcaagataaaatgctataaatataccaaactgagccgctgcacccataatcagtgatttaggatttgcaatcagcggtccgaagtcggtcattgcgccaacaccgagaaatatcaatgacggcagcaccggtttcaaggtataaaagactgtgagtatgccggcattggatagggagtctatcatttttgttccggcctcaatcgtatagtcgtgaataaacacatcagcaagcggcaggtttgataaaagcataccgaatgctataggtataagcagtaatggctcaaatccgtgtctgatagcaagatatagaaaaatgaatgacacaacgatcataattgcgttctgatagccaagatttgctatacccatgctatgcacgaaaccctgtaatgtttccagtaacattttttccatctcctttaactatatatttctcggtatcggtaaaattattcatcgtacttaaataccgctaaaatactaccacaggggtttgttttttacaagccgatttgtaattaatactgtatacatttcgcaaacttaatgtatacataaaacaagaaagtacaaaaacaaaaagagcggggtgagttccgctctatattaaacgagggattagcccagctctttttgtctgattcttttaccgtcagttttttctgtcagtttcagtattgtctgactggcttttctcgctgacagcagctcttgcttttctgctgtttttctcactcattttactgtttgtctggtttgaatttttcatatctaatccctcctcattcactattatggttcattgtttcaatagtatgtgaggaaatttaaggaatttaaaaaaataatgtttttttacaaagtttttgttgacaaacatctctgcttttgttacactcttaattgttcggtacacgaaacagcagttatgcaccattagctcagttggtagagcacctgactcttaatcagggtgtccacggttcgagcccgtgatggtgtaccaacacaaacccttgagatttcaacagtttcaagggttttattttttctgtttttaatcgcctgctataaaaaatactgcccagatattactccgaagcagtatttcttttaaatttaacataatttatatttttgccgcctgcactgaacctgtcttcatattcggtagtcgtatacttcgactcgtactccgagttgtgcagatcctctgtgtattccagtatttcatagcctgactctctgatttcctccattgaaaattcaaacagcgggtcattgtcggttttaaactctataacaccatcctctttgagaacatcaaaatatgttttgagtctgtccctgtgagtcagtcttcttctggcgtgcctgtcctttggccacgggtcgctgaaattaagataaatcttatcaatctcacccttttcaaataaatcatttgcatcgtctatatactttgcaaagaacataacgtttttgagctgctctgccttggctttctgaagtcctctcagaagcacgtttctctgaccctctatcgcaagatacatattctgcgggtttgctttcgcgtgagatattatgaactgtcccttgccgcagcctatttcgagcgccagctctccgccggatgtttcaaacagttctctccatctgcctttcatattatccgggttttcaaccagagattcttttgccgcatttattttttcttcaaggtttttaatgtttctctgtctcattaaagaattaccgcctctgcaattgttgccgcaagaaatgccgccagcagcagacctgccaccgcatctcttccctcaagtttcatttcattcattcttgttctgccctcatcgcctctgtagcatcttgcctccattgccatggcaagctccgaagctatcctgaaagcacttataaacaggggaacaagtataggtatcaggctcttggctctgcgtatcagattgccgctttcaaagtcggcccccctcgcctgctgagctttcattatcttgtcagtttcctcaagcagcgtagggataaatctgagcgctatagtcatcatcatcgcaagttcatgcgcaggcactcctatctttttcattggagaaagcagcttctcgataccgtcagtcaggcttataggcttggtggtaagagtaagcattgacgaaccgattatcagcagtaccagtctgatgcctaaaaataccgcggttctgacgccctgtcttgtaatatgaagaaatccaagactccatataacatcgcccttaaccataaacagatttaagacaaacgtaaatatgattattataaatacgggcttgagtcctctgagtatgaacctcagcggcacctttgacaccgctatcacagctccgagagccgccgccgatattataaagccgtaaaagttatcaactatgaacagcgccactatatatactattgtcgctattatttttattcgtgcatcaagactgtgcacccacgaattgccggggtagtactgtcccagtgttatatctctaagcatttatatttcctctgattgccttgtatatttcttcgaccgccttatctcttgtcaggatattgccgtcaagcttaaatcccctgtcatttaacatatctataagctccgtaacaggcggagctgcaagtcccatctgtttgagctctgctcttcttgcaaagacctcttcaggcgtgccctccattaccgcatgggctctgtccataactataaccttgtcgcacattgaagctatatcctccatattgtgagaaaccattatggtaatattgttctcgtgctcgtgtactcggattatcatatcaagcacatctctgtgagccttggggtcaagtcccgccgtcggctcatcgagtatcagaaccttaggcttcatcgctattactcctgctatagcgactcttcgcttctgtcctccggaaaggtcaaagggtgacttgtccttaatctgctcatagtcaagtcccacaagttctatggcttctcttactctgtcctcaagttcctcgtccgcaagccctatattcttaggtccgaaagcaacgtctttaaataccgtctcctcaaaaagctgatattccggatactgaaataccagccccacttttttgcgtatctcacgcattacagtcttgccgtcacagatgttttctccatctatatatatgctgcctgtctttggcttgataagtccgtttaaatgctgcaccagcgtggatttgcccgaaccggtatgacctattatccccgctatctgtccgtcctctatggaaaagctgacgtcctgcaccgcaaccgactcgtgaggcagaccctcgttatatatatgtgttaggttctctactttaactgacatatcgctcttactaactcctctgtatctataatcccctgaggtatatctatacctttgcctctgagggcatctgcaatgtctgccgccataggcactctgagtcctgccgcttcaatagcctctctgtctgaaaagacctcctgaggcgtaccgtccgctacgattttgccgctgttcataataactatgcggtctgcatccgcagcctcctccataaaatgagttatgaggattattgtaattccctcgctgtgaagcttcctgatgatattcataacctcactgcgccctttggggtcaagcatagctgtcggctcatcaaatatgatgcactccggcttcatcgctattactccggctatggctattctctgcttctgtccgcctgaaagcatatgaggcgcttttttgcggaaatcatacatatcgacagaaaacagcgcttcgtctactatgcatctgatttcctcagatttgataccgatgttttcgggaccgaaagcaacatcatcctctactatagatgaaaccagctgattgtcggggttctgaaacaccataccggcagtctgtcttatatcccacagcctgtccgcatcttttgtatcatatcctttgacatatactgcccccgatgtcggaagcagcagcgcattaaaggtcttggcaatagttgatttgccggagccgtttctgcctattattgctgtgaaactgcccttttcaatctctatggttatatctttaaccgcaggctcgggtttaacgtcctcatctgcaggatattgaaatattaaattttcagtgcgtattattttttcc

SEQ ID NO: 3593 - DNA, 7198 bp, Unknown
  16S sequences of unknown bacteria
ccgttcatcattcccgttccaacaacttacctatgagacccctccattggctttcccccattgagttcattgtccaatatgtttgacaaacctacatgaaaaaaattgcagggacgggaactttggcaaattggcggctgtgatgcgctatgctacaatgatcgggaagcattctgctttcggcaggaaggtcaaaaatggcgttcgcttttccgctctttttttacaaaaggggggtgagcatgatgaccgactacgaaatgttgtctatcgttatcatgatcatcactcttgttgcttctttgttaatcaacaaccgcgataaaaaaagcagagacgccacccagcgctaactggagggcgtctcaacatctcgtaagggaggggagaagccaaccactgcgtcatcccttcctgccgttattgtatcacggggaatacaggcgtgtcaaccggcctgccctgactaaaacgccctgcggatgtttctccgcagggcgtttgctttatgcgttcttttctttgtcaggccgcttccgcaggcgggaggccagatagactacgatccacgccggggccagcagcagaaacagctgccagtagttctgctttccgaaatacaggaaagagaagtacagcgacgctacgacggaaagaagcagcgcactgatgatgaaataattgtgcctgccctgctccagaacggagttcagcaccagcagcaccagcatggagaaaaggatggcgtagatgaagatgatccacaccagattgcccagcagccacagggagatgaacaggatcagtgccagcatccagacgccggtcacggacagaagaatgatgacctgattgctgtacgcgggctttttctgccggggatcctgatcccagccatcgtgggggctgagcagatagtcgaccgtcacgccgaagatctcgctcattttcttgagtacgtaagcgtccggcaccgcctcggctcgttcccatttggaaacggacttgtcggaatagttgatgagcgccgccagctccgactgggtcatacccgctttctgccgcaggttgataatgttgctggcggtggtgtacttcaaatcatccatttgccgcgcctcagttgtatacgcggaccggcagcaccagatagagatagccgtccccatccatggggctgatgacgcacgggctgacgggcgtattcatgctcagggtgcagcattcttcgtccacgttgcggatgacgtcgctgatgtagcggctgttgaaggcgatctcgatgtctacgccctccagatgggcctccatttcttcccgaacgtcgcccatttcgctgttggaggtgatggtcagggagccctgagaggccttcatgcggatcaggttgttcttgccttccttggccatcaggctggcgcgctcgatggcgtcctgcagttccttgcgcttcacggtgacgcgggtctgccaggaggtgggcagaatctgcttataattgatgtattcaccggccagcaggctggtaacgacggtggtatttccgatgacggccatcatgtgggtgttgtccagatggaaggtagccatttcgtcggtgtcttccatgatgtgggtcagttcggtcatgacacggccggggatgatggccttgatttcttccttatcatccggcagcacgaagtcgccgtgatagcgctgcaacgccagacggaaaccgtccagacccaccagatgcagctcggtgcggctgacctccatcaggcagccggtaagagcctgacggctctcctgcacggcaatggcgaaagtcactttggagatcatgtccttcagcttgccctgggggaagtgaagggcgaaggtgccggacagatccttcatctgggggaactcgtccgtggctacgccggtgatggtggaacggctctgaccgcagcggatggtcacggccattttttcgttcatggtaaaggtgacggtgccttcgggcagcttgcggacgatctccgtcagcagacggccgggaagaatgacctgaccgggctcggccactgtggcggacacctgggtcttgatgctcagggaaccgtcggagcactgcagcagcacgccgtcttcatcgcaggaaagcagcacgccttcgagaatctgcatggcggggcgggaactcagcgcccgggtggcgttttgcaggccgtagaacaaatcttgggcggaacattcaaacttcatttcggaacctccgatccaatccgatgtagtagtaagtaaattcagtagtagtagtaggggctgtggaaaccatggaaaagcggttcaaccctttttccgcaaagggaaaacccccatggaatccccgtggaaaagaaggaggatttccccaggttttccacgtatcgcccctcttaggcaggttgggaagagtcctcaaaacgcgattttgaccgtctgaaaagctcttctctcaaaaattctctctgagaggggttttttcctgccttttcgggggaaataatcggcaaaaaccctgtctgcttttgcggatttccgtcggttttccatgtttccacagcctgtggaaaatcgcctatggaaaatccttttctttttgcggcaaagggtttgggaatcgctcccacattttttccgaaaaattatcaacaggattttggttaaaaaaggcagcacagccccgtctccctgcgggggattttttcgcaggaaaaggggggcgaaaacgcctttttatttttcgtattccttcagcagcttcagcatggcgtccatggcttcgttttcgccttcgccctcggttcggagcacgacagactcgttcatgggcagcatctgacttaaaagccccagcatacttttcatgttgacgatggaattggcgaactccatcacaaaggtgcagtcgaaccgggacgccagcgtggcgacctgcccggcgatctcccggttaatggggcgcatgtttttcaggttcagcatttcttttctcatgggatgttcctcatttccagccgcccgatggcggcgtttcatttttgggacgcttctttggattctgcggcgtattccatcagccggcgcatccgatgattaacgccgcttttgctgaggggcgggttcagggtctgacccaactgttccaatgtcaggtcgggggcgttgagccgggcaacggcgatctcctgcagggctttgggcaggctcttgagcccgtcctgcttcgccagccgctcgatggcccgaagctgttcgtcactggcgttcatctgcttttgcaaattggcgctgtcgcagttcatggcacggttcaccgagctgagcacctgccgctgcacccggagattctccatctccatcaccgcctgatgcgcgcccactgccgtcagaaatgtgacgatctggtcggactgcttcaaatagaggaaatccttgcccttccgggaggactggtgaatgggcagccccaccttctgcaggcatttggccacgcagtcccggaaattttcatcccggtagcccagctccagatgatacccctgctcgggattggtcatggtgccgccgcccagcatggctccccgcaggaaggcccgcacacagcaggagcggttcagattgaccttgggcgaggtggagcgcagggtggcctcgccgttttcccctatggtcatcatacccagcgcggacagaaaggccggagtctgggtaggacccagcgtcagtacgcatttccgggtgccgccgaaatgggccgtggacacgtagtgaatttgaggcgaaagctccaagcccttttgcagcagggtatagacccggcgggctaccgccatactttcgccggtaaactggacgctcagtttgccccggcccagcaggttcaggctgcccagcgtcatatacagcgctgaaagctcactcatgcggcagcagggcttttcagggttcaggagacaaagctcctttttgcaatccgacgaaaaggacatgaaaacgcaactccctcggggccaatgtagcgggttccgcccggcagaagcgcttcgcagggaggtccgcagttttgaaagccccgttcgaggggcggcagtccattcgatcagaaaccttctgtcttaccttttattgtaaggaatccggcgggcaacgtcaagaaaaaatgtatatttcaccctgttttgttacatacttccccctgtaaacagcgcccgccctgacgcgggccaaaataccggccggaggcgatgaaattgaaactgcccgaaaccccaattcaaccttcccagcagaaaacgcccttttggcaaaagaccagcaaagccctccgttcgctggcggcgggagggccggaaaagcccttcgacggccgggagttctgtttgcagctggcggcggccctactgaccttcgccctgatgctggcgttcgcccacgcggacgcgcaggtggcctggggcagcaagggcgaggacgtgcggaaggtgcagcagaagctgatccagtacgggtacatgaccggcagcgccgacggcgtcttcggcaaggccacctatgacgcggtggtgtggtttcagcgcaagaacggcctgaacgtggacggtgtggtgggggccagcaccgcggcggcactggggatttctctggggtcggcggtttccgtctcggcctatcaggaaagcgacagttatctgctggcccggctggttcacggcgaggcccggggagaaccctacgtgggcaaggtagccgtggcggcggtggtgctgaaccgggtcaaaagcccatccttccccaataccatcgccggggtggtgtatcaggccggggccttcgacgcggtgtatgacgggcagatcaacctgaccccggattccgacagcatccgggcggcgaaggatgcgctcaacggctgggaccctaccggcggatgcctgtattattacaatccgtccaccgccaccaatgggtggatctggacgcgcacggtgcagctttccatcggaaagcataatttcgccatttaagcaaaggaagggaaccatgaaaaacattcgcaaatacggcctgtgggtcgggctggcggcagtctgcgccgccgcgctgatctttgtggccgtccagtaccgcagtgaacgggatcaggcccaagccgtggtggaggagggctatcagcagcgtttgtacgaggcgcaggagcatttgcaggccattggcctgaagctgaccaaagccggggtcgcgtcggaacaaagcacgttggcggagttgttttccggggtgagccgtcaggcggaaagcgtgctggcgggcctgtctgccttgcccctgtcccatcaggctatgagcgacacgctgaaattctgcaatcagttggcggagtacgcctcccagctatgcctgcaaatggcgcagggcgaagccctgaccggggatcagctgaccctgctggaaaatctacgggggcagtgtgtccagctgacgagccagatcgcgctggcccaggacgctatggtgcaggaaagtctgcgcatggccgtaaatgggagcgtgttctacgaggatgcctccgcagaagagcgtcccttggagggcgtggctgagccggacaacggcatggaataccccaccatgatctacgacggcgctttttccgatgcgcggcgcttcggcgagccaaaagcgctgggcacggaggtcattgacggagcaaaggccattgagttggcgaaaagctatgtgggggagcagcgggtgaaaagcgccgtttccggggcggagactgccggggcgctggccagctacggcgtggtgctgaccctgaacgatggcacggtcttgaactgcgaggtcacgaaaaagggcgggcgcttgctgtggatggtgccggagcacgcctctttcccccaaagcctgacggcggaagaatgcatccgccgggggcaggcgtttctttcggcgcatggctacggcgaaatggaacagaatcactatcaaatttatgacgggctggcggtcatcaactttgtggccctgcaggacggcgtgctgctctatcccgatctggtcaaggtacaggtgcgcatggacaccggcgagatcgtgggcatggaggccaacaattatctgatgaatcacaccgtccgcacggcgctttcgccgtctttgacggaagcacaggcccgtcagcgggcaggaaagcggctgaaggtgcatcacgtgcgtctgtgcgtcattccctaccgggacgaggaacggctctgctacgagctggccggccagcgggacgagcaggagttccgggtctatctggacggaaacaccggcgaggagctggaaattctgctcatggtgccggctggcgggggaatgctgagtgcgtgacggaagcgttccgggggaagtttgacctttcccccggaacgcttttcagcttctctcaaaaacttttttctaaaaataataaaaaacgaagaaaaatcgcaaaataatttgaatttattagaaaacagaacaaaactgaatgatcttccacaactatttgaccttctttgacttttatgaaaattcttatttctttgactttctttgaccttatgttatactatcatcgttccaagggggaacaggagagagacccgctccccccgggaacagaaatttttaacgattttcacccgatttgttaggaggatgacttatgtataagatgatcccttaccgccgtgcccatttgagccctatgatgccttccctgttcaacgaccccatgatgcgggagttcttcaatgattcgtccaacctgcccaccatgaacgtggacgttcatgaggaagaaaacgaatatgtgctggaagccgatctgcccggcattgacaagaaggacatcaacctggaagtgaaggacggcgtcctcaccatcagcgctgacgtgaacaatgaaaagaaggaagaaaagaagaactacgtctacagcgagcgccgctgcggccacgtagagcgcagcttcaatctggacggcattgatgaaaacggcatcaaggccgactacgacaagggcgttctgaccatcaatctgcccaagctccacgaagagcccaagcccgaaggcaaaaagatcgccatcggacagcagggctaaagccctgcaccccacaccgcgccctgtgggcgcgggggtactgga

SEQ ID NO: 3594 - DNA, 9573 bp, Unknown
  16S sequences of unknown bacteria
tatcctccgttttataaattatttcattcttgcttcaagttctgctttgtgatcctcatatccgggtttgccgaggagagcgtacatattcttcttgtatgcttcaacgccgggctggtcgaacgggtttacaccgagcatatatcccgataccgcgcaagccatttcaaagaagtaaacaagatatccgaatgtatatgcgcttctattttcgacttcgataacaacattgggaacgccgccgtcattgtgagcgaacagtgtgccggtcattgccattctgtttacgtcatgaagctctttgccggagaggaagttgagtccgtcgatgtttgccgggtcgtcgggaataacaaccttgtcgtttgcgtttttgaaatccagtacggtctcaaacattgttctgagtccttcttgaatgtactgtccgagagaatggaggtctgtcgagaagataaccgatgaaggataaagcgacttgttgtccttgccttcgctctcgccgtaaagctgcttccaccattcgctgaacatctgaacggcaggctcgtatgcggcaagtatctctatctttttgcccttattgtaaaggatatttctgatagatgcgtaacggagacaatcattgtgctcaacgtcgtcgttgttgtacttttctcttgaatcagccgcgccgcgcatcatatcgtcgatggaaatgcctgcgacagcgatggggagaagaccgactgccgtaagaacagagtaacgaccgccgatatcatccggaacaacgaaggtttcgtagcccttttcggttgagaattctttgagcttgccgcgagcacggtctgttgtaacaaagattctctctcttgcgccttcttcgccgtacttcttttcgagaagctcacggaaaatacggaaggttacggcaggctcggtggttgtgccggactttgagataacgttgatgcatacgtcgcgtccttcgcagagcttcagaatatccgaaagagcggacgggctgatggtgtttcctgcgaaataaacgtcgggagtatccttcttgaggttattataaagaggcgatgttgcgaattcgatagctgcacgggcgccgaggtaagaaccgccgataccgatgactacgaaaacatcgcacatttttttgattttttcagcggctgctttgatgcgagcgaattcttccttgtcgtaatcaacgggaagatctacccaaccgagaaaatcagagcctgcgccgtttttattctttacgagagaataagcggctttggtaaggtgtgagattttttcgatttcggtaggagcaacaaagccgccaaggtatttttcgttaagtttgacagacatttaaattgacctccaaagcgtatgaagcatctgcacgaatttatgctgtccgcacagagccgacttcattatttaaaataaactaaactgtttggctgtttaatttatctatataatactacattttctgttgtttttcaatagataatttaagaatattccgagaaatatttcaaaaaatcgcaatgcaggtcattattttgagaatccgtgtttatttcagtgtgaaaatgccgagcattctgtacagcagagcgaaaaaaccgattctgtcgacgtcttccgaggctgtgatgtcgctctcgtttatgacttttccgtcaacaaggtagcgcacaactccgactttgtccccttttttcacgggagctggtatgttttcgctgatgagaaactccgtctggacgcttttgttcttgccttttcccatgagctttgaaaacggaggatattcgcatttgcagctgtccgttactccgcctattatgcttgcttctcccgcttccccaccctcgttttcgtagagagaataattcgcgaatccgtagtcgagcagctgttttgcgctttcgtttcgtatgtccctcgtgtccgctcccatgatgaccgctatcaggtgaagtccgtccctctcagccgtcgcgctcatgcagaatcccgcctttgatgttgagccggttttcagccctgtcgcaccgctataaaatcttatgagcctgtttgtgtttgtcagaccgaattccccgttccgtatggtgtccatccatatcttcgagtattttgttatggttttatgctttagaagctcgcgtgacataagtgcgatatcgtatgcgcttgtcagatgctttgtcgtgtcgtcgtcaagaccggttacgttttcaaaataggtgttgttcattccgagttccgcagctttttcgttcattcggttgacaaacgcttcttcgcttccggctaccttttcagcgagagctactgcggcgtcgtttgctgaggctatgataacgcatttcagcatttcctcggctttcatcgtctctcccggctcgagaaatacctgtgaaccgcccattgaagccgcatattcgcttacctgaatgtcgtcgtcaagcgagatgtttcctttgtctacctcttccatgaacaacagcagcgtcatgatttttgttacagatgcgggcggcaaggcttgttcggcgtttttggcgtaaagcacttctcccgtagcctgatccataagcagtgcggaatccgccttgacgtcaaacggtgtgttgtcgggaacctctgccaaaacaggtatcgttaatgataacacaagaatgacagcaagcaccgacgagattattcttgacataaaaaataccccgataaacaagaattatgttattctatatttattggagtatttgttttttatgcgtcaatacaaatatcgcttgacctcggcgcagatatttccgagtatttccgcggcttcgggatcagacacgtgagcttcggcatagcgcaccttctcgaaatccgccgtgattcggtcaatgtcggctttctcaacggctctctcgacttttttctcaacctgacgcggagtatcggactgcttcagcgcaatgttcatcttcttgtacatttttaagagaacagaatacgcgtaacacagctggctgtcgtagtcccgcagtctgccaagctcacggatgaaggttttgtagtcctcagttgcgtcagccatagcgtcatagtcacgtatcgcggcgttttgtatccgctttttttcatcctgataattgttcagctcatccacttcgttcgggtcaaaggagtttttgaatatctccctgccaatcagatacacggaaattacctcgcgtatccagtcccttatgcggacaaacagctttacgagaaatcctttctttaagccgatgtagagaaccaatccgacggcaacgatgaatatgaacacggcgattatgtttatgttttcgtttgataccacatctcgcttgaactgcgccattgcctcgtcggaatcaacgtaatcgtactcttcaagctcgccgacagtgtttgtgtggaataatctgaacagcagtacataaagaacgcttttcagtattatccacattcccgacagcaggatgtacacgacatacgccacggcaaggaacgcaagaaacagcacaaacacgagaaaaacattataaagtctcgaggacggagtcatgacggacacaaccgagccgcggtactgcttttgaagattgctctggttgaacacgagaagaacgcacagagtgaatattactatcggaactgctattaagaacctcggataaaagtctgcgtatatcgcgaggaagaatgattcaacataaaatagcgccgctccgctgagaagaacataaatatgcgacagtctttgagcgggatagaaccacataaccacaccgattacagacgagagcagatagatgagcgcgaaaaatacagtgtaaatcacatcgtagcggaacgtcacgccataataaaacattgcccgcgtcagtgaatcaaaggcgagtgtcacgggaacgccgagaacaaggattataaaaatcggaacagcggcgtatatcggtttgaatcccgcgacaattccctcttttacggatgaaaaaccgtcgagcgattttctcttgttttgcagcttcgcattgactgattggagaaaaaatcccacgaacgagaatactacagcaagaagaggtacaaatacatatgacagaggaaacgccgtgccgaggagcagaatcgacatcggaactgtgagcatggctgcaccgatgagcgacacaagtccgagcacatggtcaatgaattttatcatttgcttcctccatcgtcgatatatgttttaaaatgcacttctatgtcgtccgggattatcatggcattgctgcttgcggaggttatgtagaacatacacgaaattcctgcgcttctgagtgaataggcgaagtttatcatgcgctcgcttagatatgatgagataaagatgatgttaccgccgcctgtgtagatatgcgggttctctactattctgtccatgagcgcttcaataggctcggatatcataagctctattttcgcgagtattctcagtgcggagagcatatcgttttttcctcttaatgaaggagagataaagaagctgctgttttcctcggctatgtctccgtcatacacattttcgggaggtgtgtttgagataagtctgacaggcacgttttccgacgacaccttatcaagtattgaagcggcgacagtcagacaaagctcaacgggagtacgcatgcttggagcgccgggaatgcttttctccatgtctcgggactgcatattcagcaagatgttgaatgcgtgacggtcggtgaactcctctatattgaccatcagcttttctctcgccgcggtttgcagccagtttattcggttcatagggtctccgcttgcgtattctctgattcccgcttttatgagagggtcggatagcaggcttgtctcaactatgaagtctccacttgtaaatctggatttggtgaactcgctgtccagatctattgctttcgggagtaccgtcactaccgcgtgagagtctttatcgggagagataacctttgcgttgggattggagccgaaaatgtcgtccgcgagcatggagacagaaccgagacggtatgttccgcggattttgcagactactttccagcggcgttttattacttctcgtccgtggagaacaaaaacactgtgtatcactcgcgggaatgtttcctttatgccgccgtttttttcgtccctctcgtttatgcggaacacaagaccgtcaggcagctccgtgtccaccttcaaaaacgggagagggaggaattttttgtttgatatttcctcgtacacatatacctcatccccctcaaatacctcgtcggaagacagcgtaaccttgtattcgagcttgtcaaaggcatatttgcggtagattctcgcctgcaaaacaaacacgagaaccgccgctataactatagtcagataaatcatagtcagtcgacaggggctttcaccgtgttaatgaggtcttctataaccttctcaccagtgtcggtcagcctgatggtatttgaagttttcacaagtattctgtgtgagagtacgggaacagccacgctttttacgtcgtccggcagaacaaaatcccgtcccatgattcccgcgtatgcctgggatgctttcatcagtgcgagtgaggcgcgcgggctgattccgagtcggagtttttcgctgtttcgcgtagcctcggcaatgttcagaatgtattcttttataggttcgcttacagttatttcacataccgcgtctgaagctgcttttacgtcctcttttgtgcatacggcggacagagtatcaagcggatttttgccgttgtactgagagagaatttccttttccgcgcttctttcgggatatccgagcgagagcttcatgagaaatctgtcaagctgagcttcggggagcgggaaggtaccgagtgattctatcgggttttgtgtggctattacgaagaacgggtcgtcgagcttgtatgtaactccgtcgactgtagcctgatgttctcccatgcattcgagaagcgcagactgagtacggggtgtggtacggtttatctcgtctgcaaggaggatgttagtgaacacaggtccgcgtctgaacacgaattccgtccttttctgatcgtaaaagttgatccctgtgacgtctgacggaagaaggtcgggtgtgaactgtattctgctcatttccgcggagactgactttgcaagagcctttgcgagagtggtttttcctgttccgggaatatcgtcgagcagaacatgtcctcggcaaagcatggcagttaccgcaaaacgaatctcacgctccttgccgtagattacttttccgacattatttattatgctctcggcagttttgtttatgatatcgcatttcatgggcgtatcccctttattataataaatcagtagcttttttgcggataatactcttctgcttcaacggtttcggtgaggtcgcggctcagctctttttgtgtgcgctggagagggcttacgatgaatacgcacgacgacgcgcctatctcttcctctaccattgtgtatatttctccgcggaactttactgtatgtgccgctaacttgcgtacttttccagtgtaaggattccattcttcgggagtgaggttccctctcaggagaatgtttccgtggtattcctcgcccattgtgtttgtgaagtagtaaatgtcgcatccggcgtactttttgtgcaggtaattgatggagcatccgctggcgagccgtttgtcaacaccgaccttcatgaacgcggggagatgatagtttacgataccgaggaattctctccttggcatattgtctatgtacacgtcaggcgcgataccgaagttctccgtagcctggaaaagaatatccgccgcaacagattccgtaccgtcgacggagcgtttgtttgacgggagatagtacgccgcgccgcctttttcgttctcgtttttgtagtacattctgtattttttgttgtcaagcacatcctcgccgaagatgtattttataatctcctgcacttctctgtcctcagctgattctgattcaagcgccgcgttgactgatgtgtagatatcggagcactcgcaggcttctgtcgggaggttgtccgttgcgattatctttccgccctcgtcgtagaatttctttattatacgcagagctttcaggctgattatcgacattgacgggagtatgacgagcttgaacttcatcacgttctgaccgctgctgagatacagtacaccgttttcggcgagagcgtgttccactacggcgcttggatggatgaatgtagaatcgattcccacgtagttgagaaagttgttcataagctccatgtagtcggcgttttccggagtggacgggtattcaaatcccgatatttttgactgatacaggtatacgagggagtgaagcgaatgtatcggatatagtatggcaacctcgcttatgtgctctcctccgcgcagcattgtctgaactcgggttacaaacgacgcgtattccgtgaggtcgtcgccttttgagaatatcgagccccacacaggcgtttcgttttcgacaatatccgtgttttcctttgttctgtcttctccgaggtgggcaaaaatcatgtttactccgcggacgaagacattcattgattcacggtagatgatatcccttgtgagcgacatatagtatttgaatagatctgcggtcaccgtgtcgcatcccatttcatctgccgcgccggctgctattcttatgccattcaaaccgtagagataagcgaaaggcatggagactccgggagccgaggcatacttatgaagcatctgaccgtctccgaacaaccatgagcaggctgcggctttgctttctgcgggaaaacccgtgcagaacacattgtgagccttgcagtaatacgatacggctttgagatatccttcaacgagcatttttgcacggcagctcatgagcatacacttgtatcttcttgagcttccgccgaagtcacggaacatgagcgtgtagtaaggagcggggtcgaagccgtactcttcctcaaagcactcgttgaaatgctcgtcccacattctgcggttctgtccggcgaacattatattacggtagataaacagtgaaaatccgaccttctcgccgtctgaaaagctttccgtgagtctgccgaaggtggagcggatgaagtcgagggagatatcgtagtcgagggtgttgatgacatgagcgttcatatccggctcgcatacatattcctcgatgttccagtttccgtcgggtacctgccactcaagaacattgtcggcggcgaaagaacgtaaatccgttactgtgaggtcgatatcgttcactgcgacgagggacatgagctttccttttctgtggagatttatcttaattttttctccctcggtgcaggaatattcgtattttgtcaggattttacatattacatcctccgcgttatcctgcgccgctatgtattcacgcattacgtatgagtcgtcaaggtaaccgagcttcatctggcaggcgtcggcttccttctttatctttccgtacatatcgtagtattcacgcgtcagagctttcactacgctgtttttgtcagtgaacggaataatgccgctgtagcctgatttcttgtagcctgctatcagtttttctatctttcccggaacaagtccgcagtccatcggcaggtatatgtaaggtccggtaggttctttttcactttggaattgttttttcagcgatacgggatcatttatcaagtttttttcgtttatcataacacagtttacgccctcatcttattcggagtgagaaacgttcctttcctgattcactgtaatatagctacattatatcatataattttatttttgtacataccgattaaacaatattttaaacagatgtgtgtaaatataacatgacttttattatatgataaacgataattctaaaattttgtattaaaattttaataatgcattgacttttgtaaacatatagtatataatgtctgtggttgtgcaatatgcggaatatatgaagcgtttgatttatgcattattaataggagtttaataactatatgcttacaaaacaatggtatttcagtcctgccgagcctgcccttgtgcctcttgatttgttacaagtgctgagcgagcgcggtatcgacgaaaaatatataaagctgtgcgtgaagtccgatttaaaccgtgaaatggtgcgctctgactgttacctgctctgcaccgacacggaaattatcgttctctccggctctgtcaccataaagaaaggctcgcagaaaaagactgtgcgcaaattcgagcttctttcgtgggatgtatttgagcttgcgggactgtcggacttcaaggttgaagagcagatttcctcggcgagatttactgcaaaggataaggacggaagatatgtacttctcgcgaatctttcaaacacatacaagggagactttttcacctgcgcgaggttcatagaagagctgaaaaaggacggaaagatt

SEQ ID NO: 3595 - DNA, 32759 bp, Unknown
  16S sequences of unknown bacteria
ctcaaaaaaagtgcaagaaaaagggactgccgcattatttaatgcgacagcccctattcccgattccgggcgcgcggccttcccagttggcgccttgctccccgcaagcccttgcgccttcgtcaggtcacgccaacataggcgccgttcccccagcgcgcggcctttcatgttggcgccttgctccccgcaagcccttgcttcttcgtcggatcacgccaacataggcgccgttcccccggcgcgcggcctttcatgttggcgccttgcacctcccaagcccttgcttctccgttggaccgcgccaacaatgcgccttgaaaagcggcgcgcgtccttccatgttggcgccttgcaccccgcaaacccttgcttctccgtcggaccacgccaactccggcgccttttttccggcgcgcggccttccatgttggcgccttgtaccctgcaagcccttgctccttcgtcgtgccacgccaacactggcgccttttttccggcgcgcggccttccatgttggcgccttgtaccctgcaagcccttgcgccttcgtcaggccacgccaaccccggcgcctttttcccggcgcgcgtccttccatgttggcgccttgtaccctgcaatcccttgcgccttcgtcgggccacgccaaccccggtgccgcgctctggtttggttcgcgcccgccggccggcaaagccaatgaattcggttttcgagcgcgaaccctggaacggaaggaggcggaaaagcagcccggactcaggttcggttcgcgcccgccggccggcaaagccaataaattcggttttcgagcgcgaaccctggaacgggaagaggcggaaaagcagcccggactcagatttggttcgcgcccgccggccggcaaagccaatgaattcggttttcgtgcgcgaaccaccggcctgggcgagggaaggcttcggctcggattgtgtgaagcaaaaaacacaggaattcccatccactttcttgaatgagtgctaggactctgttaaaattaaatacgttgaaccaaaacccgcaagggtaagatatacaagaaagaagggatagaaatgacgaaagtagatattttttccggattcctgggagccggaaagacgacgctgattcggaagctgattgaggaagcttatggggacgagaaaatcgttctgatcgagaacgaattcggagaaatcggtgtagacaagggattcctgaagaataccggaattcagattaaccagatgaatgccggatgcatttgttgcaccctggtaggggatttcggaaaggcactgaacgaggtcatcgagcagtaccatccggatcggattctcatcgaaccgtccggcgtgggcaaactgtccgacgttatcatcgccgtgcaggatctggagaataaggagattcagctgaacggctttaccaccgtggtggatgccaagaaggcgaagatgtatctgaagaacttcggcgaattctacgtgaaccaggtggaacacgccagctccattatcctgagccacgtgcagggattgagccaggagaaaatcgatcaggtcatcggtctgctgagagaacacaataccgaggcatccatcgtgaccacggattggaaggaaatcagcggcaagaagatcctggaaaccatggaacagaagaagactttgtccgcggagctggatcacctgagagaagaagcacatcgggaacaggaagagcacgaggcggagcaccatcaccatcatgaccatgaggaccatgaccacgagtgcggctgcgagcatcaccatgaccatgaggaccatgaccacgaccatgaagaacacggctgctgcggccatcacgaacatcaccacgaccatgaccacgaagaacatgagcatcatcacgatcacgagtgcggctgcggtcaccaccaccatcatcaccaccacggccacgatgcggacgaagtgttcgatgaattcggtgttaccaccgctcacaaatacagcagagagcagattgaggcggcactgaaagccattcaggatgaagagaagtgcggacaggtgctccgttccaagggtatcctggaaggcaccgacggcaagtggtaccagttcgattacgttccgggcgagccggaagtgcgtgagggcgagccggaagccaccggcatgatttgcgtcatcggtgtgggtctggcacaggatcacatcaaagagttgtttggattataatagcagaggaaaattatgacagtaagattggaagatcgtcaagcccgagaactgccggtatatctttttaccggattcctgggcagcggtaaaactacttttattcaagatacactgaacagcccggacttcgatccggaggtgccgacgttgttgttggtctgcgaagagggcgaggtggaatacgatatcagcgcattcgcaagtccggagaacgttttcgtggaatacatcgatgacgaggcggatttgacccgtatggcgttgcagaagctggagagcaagtaccggttcgaccggattttggtggaatacaacggcatgtggatgctccagtccctgtttgccagcctgccgccgaactggattgtggcgcaggagatgctgttcgtggatgccaccacgttcctgatgtacaaccagaacatgcgtcagctgtgctttgacaaaatgcagaccgcggagctggtggtgttcaaccgctgcaccaagggctttgacaaaatgccgttccacaaggaagtgcgggtggcgaaccggagatctcagattctctacgagtacggtccgtacgatgtggagccggatgatatcgaggacccgctgccgttcgataagacccagtctaaaatcaccatttccgatgatgattacgcggagtggtaccgggatatcaacgagaacgaggacgattacgagggcaaaaccctgaccctgaagggccgcgtggccatggcggaggacctgagcacgaaagggcgtttcgccttcggccgtcacgtgatgacctgctgcgtggaggatattcagttcgccggattgatgtgcatttacgccaatgcggacgatttcaaaaccggcgattgggtggaaatcaccgccaaagtccgggtagaatacgaggaagcctacggggagaagggcccggtgctttacgccaagtcggtaaaagcatgtgcgccggcggatccggaagtggccacgttctaggtccatcacgtttttctcggggaggcgagcgcgaaccatgccggaagaatagggaaaagcgctataaaaaagtgaaaagccaagcaaaagcaccggaatgcggttcgttcgaaaactgcattccggtgctatttgttacttgttattctttatttagatccaccctcggtttttcaggatgaacagccagaaggtgagagaaaaggcggaaagcagggtggtgagcatcaccgtgctgatggtaagatctcccttgtgccccatgccctttgccatgacaaagcagctgatggtggtggacgaaccgcacatcaccagtgccgccaccagcaggtcgttccggaaccccagatgaacccctaaaggcaggaacagggcacacagaccgaacagcttgataaaagtactgaccagcgcgggaccggcagactgccgggctttctcccactgaaaggaagcacccatggcgatgattcccagcggggtggcgcagcggcccacgtagtccacggtggtatcgccgatggtgggaagcggtaggcgcaggagcgaccaggcaaaacccaagagaatggataaaatgataggattggtgagaatcccgtgaagggttttggggaggagcatcgcgtccaatttcccccggtccggccggtacatctccaggatgattaccgctgcgatgttgtagatgggcacggcaccgatgaccatcaaaggcgccatccccacattgtgatagaggttttgaaccaccgcaatgcccagaatggtagcactgctgcggtaggacgtctgaataaactccccctgaacgctccggtccttcagaagataggaaactccggtgcaaatcaggatgccggccagcgtggccagggcgcagtacactacgtaagcggtattccagtttgtccgatagtccgtccggtacatgtcgtgaaagagcagcgccggaaggcaaacccggaacactagcgtgttgagccgcgcagtaaaagcatcgtccatcagctgaattctccggagaaacatccccagaaggatcagaaaaaagatgggcaccgtcgcgttaagacaaaaaatcagattattcagcatgcgttaaaaactctagtccttccatacaaaatgggcgtctccggcttccccgccgtcaatcagcaggttctgcccggtcatgaagcgattccgtaccccgacgaaatagatccattccgcgatttcctccggcgtcgcccagcgtcgaagcggcgtcagcgccatgatttgattccacagctccggatcctccatcaccggtcggttcaaatccgtcagaaccccgccgggatcgatgctgttgcacaccgcccgaggcgccagacgaagcgctgcgttcttcgtataggtgagaagtccgcccttgctggccgcatactccggaaattccgaccccgtatgagcgctggcggatcccaccatcaccaccgcccgaatccgcgggttggcgatggcatatttttccgtaattcgaatcgtccccatcaggttgatttcgatatcccgtccgctgtcctgaacgcccgcattgttgatgagaatttccggctgcacatcctccggataggcatccgcatcgcagatatccagaatctcatggcaataattgggatgtgcgagggcagggggcttccggtcgaaacccaccaccgagtgaccccgctccagaaaatattccgccgtggcccgaccgatgccgtcggacgtgccggtaatcagaatgtccatggcaaactccttttatcccattctcctaaaaacaatttacgcggactgcgccgttttccggcaatactgcaggtacggttcgcctactttttccgcttcccactgcaggctcacccgatagcccagcgggctgaacaccacttcgcacagcagttccattacggcgccggtgagggagcagaaaaacacctgcaccggggtccagccgaagaagtggtaggacaccaccagcgcgaaggtgaggttgtcgatgaactgcgcgatcattgtggaggtgaaagagcggatggcgaaatcccggtagctcgtgttccggagccttttgcccaggaatgagttgatgccggcgttgcagatggaagacaggaacatggccaggctgctgcccagaaccacgtaccaggccccgccgatggtggcgttcagcgcgtcgttcacctgcatgctgccggtggaatagtattccccccacatgcccggcgtcatggtcagcgccttgaaaatcaagctggcacccaggttaatcaccagggccagaatggcgattttcgccgccgcctttccgccgaagcgcttgcacagcatatccatgcacaagaaagatacccagctcagtgcgaaaccgcagtccaatgccaggtacttaaacgaaaacagctccttgttggccagaaggttcatcatgatgacgctgaccacgaaaagagatgttacgagacttggaacgttgcgaagaaggattcggtaatcctccagttcccctttgatccattttttcataatagtactcctttggttttgattttttacaagcaggatatcggacccgaactgcttgataagaatgtcttccggcagaggcaatctccgccgaaaatacgtacgccctattgtaatcccaagggcgccggattgcaagggtaagaggattgagatataataaaaatagtttaacataatgcaaaagcgaccggaaaggaaggcaaaaaagtgaaaatctttgtatataccctgagagagttcgacgaactccctttctttgaaaaattttcgaaacagtacggtgtggaattcggttacaccacccagtccccgggaccggagaactaccatctggcgaaaggctacgatgccatttccatcatcaccactccgaccccggcggagatgatcgatgccatgaaggagaacggcgtaaaggtcatctccacccgcaccatcggatacgatcacatcgacgtgaagcacgcctttgaggtgggaatgggagtcaccaacgtcacctatgacccggcctccgtggcggattacaccatcatgctgatgctcatcgcctgccggaagctgcggtacatcatggataaggccaacgtgcaggattacaccctgaagggtaaactgggccgggaaatctccaagagcaccgtgggcgtcatcggcaccggccgaatcggtcagacggtcatcgagcacctgtccggattcggatgccgaattctggcctacgatatcttcccgaaggatgcggttcggcagcatgcggagtacgtggacctggataccctgtacgccgaaagcgacatcatcaccctccacgcaccggcgctggaggacaactaccacatgattgatgaaaccgctttctcgaaaatgaaggacggggtcatcctggtgaactgcgctcggggccagctagtggacacggaggccatgattcgcaacctgtccaacggtaagatcggctttgccgccctggatgtcatcgaaaaggaactgggcatctactacaaggatctgtccggcaccatcatcgacaatccggagatggccatcctccgcagtttctacaacgttttcttctctccgcacaccgccttctacacggaggaagcggtagccaacatggtggaaaattccattctgggcattcaggcctacctgaagggcgaagatcatccgtttattgtaaagaagtactaatcggccgagcgtttctgtaaaaggagtttgcgatgaacatcattgaagcgatacagcggaggcattccgtccgtcaatatctggaaaaagaaattccggaggaaatcgtggaacgcctgctggccgccatgcgggcctgcaatcaggtggggggtctgcatatgcatctggtgctgcacgagccggaggccttctccggactccggtccaaagccatgcggtttcgcggcgtggagaattacatcattctggcgggggagaaagacgatactctggaagaacggtgcggctattacggcgaaaaagtggttttactggcccagcagctgggactgaatacctgctgggtgggttccaccttcaagaaaaaaccggaatgctacaacttggcaccgggggagaaggtggtggcggccatcgccatcggctacggcgccaaccaggggaagagccgaaagagcaaatccatgtgcgacgtgagcgacggcacggaggtgagcctcagcgttccagaatggtacaagaacggcgtgctggcggccatgatggcacccacggccatgaaccggcagagcttctactttgagcggttcggaaatgtggtttccgtggaagcgggaaagggtcctttcaccaaggtggacctgggcatcgtgaaatgccattttgaaatcggcgccggaaaggataacttccaatggatgccggaggatatgtaacattaaaaacgggagaaagacgtggagacaacgaacaagaagaaaaagggagcgatcaagctcattgccttcgttctaatcgtattgctgattgtggcgctgaatcattactatgggtggtcggatatcttttccggggatgactggtacggaaacctgcagcagatggtgaagactaatttcctgcaggcggccctgatatacatcgtggtgatggtgattgccagcgtggtgctggcggtgccgggagtgacctttgccatcatcgccggggcgattttcggtccctggtggggcacgctgctctgcgtcctgtcggccaccttgggggcgattgccgccttcctgatagggcggttctttttgcaggacagcctgcgggatcaaattgtaaagaatcgctacatcaaccgattgctcttcgacaagagcaccaaaaatgagatgatggtgctgatgatcacccggctggtgccgctgtttccgtacaacctgcagaatttcgcctacgggattacggatatcagtctgggcaagtattccctgggtaccttcgtgtttatgatcccgggggtggccatgtacaccgtgggaacttacgccctcaccggtgcgtccaacaagctgctgtacatcggtctgaccgcggccatcgtggtggcggtgatggtgctgagcaaaaccctgcggaagaaatacgtgccggaagaggaggcctccgatgagtaaattcgaaaaatgggacgagaattgctcgttggaatccctgcagaacatagcggatgcctgcgtgcactgcggaaaatgccgggagaactgcgcattcctggacaagtacgagatggatctgggagatgtgacgaaattacaagaacatgtttatgggtgctttctctgtggtaactgcgaccgggtgtgcccggcgggaatttccggcaggcagctgtttcagaatctgcggcggatgcaggtgcgggacggaaagctggaggagaagccctattccttcgtgctcaaggaaaagaaggattacaaattccggaattaccgaaatgccacggcggggcgggtgctgttcccgggctgcaatttcccttcgatgtttccgaagaccaaccggaaaatcgcggatctgtgcaaggccaagggcatcggaacggtgtacgactgctgcggaaagcccattgcggagctggggctctaccgggacgaggcgcgaattgtgaatcgaatcagccgggaactggagagccggggcatcgacgaggtgattaccacctgcccgaactgctactacttcttaaaggaacgaatccctcaaagggtgcggtccatctacgaggtgcttccggagttggtcccggagatttccgtgccgaaggatatcgagattcagattccgtgcccggaccgaaccgattgggaatggtacgacggcatttgcaaactgctgggatatgagccggcagtgactgcggcggaacagtgctgcggtctgggaggcatggcatcggcagaggagccggagctggcaaaaaaattcggcgaagggctgacttcttccgggcttcggaataccacgttctgcgcttcctgtgccggacagtacgctcgaaacgggaaagaaattcgccacgtgctgtccctgctcctgggaatggaggaggcgccggcaacgaagacctcatatctgaatcgggttaagacgaaatacaaatagaaataaaaaagggagaatgcgttgatggtgcattctcctttttgatttcccttattttcttttcttgaactcccgccacatatcaatcgcgaaggcgatggcgatgcccgcgaagagaatttcccttacgtggctctttccgccggtcgccgcaaaagagcataccggtacggcagccattaccaatgccatggtgagaagcgtcaggatatgagtaaattgttttttcataataatccacctttcgtatactattatgtatcatataggtgattcggaaagaagtcaaccgaaagccctccgcgagggcgaaaataaaatcaaaaaagaaaaacagaagcgataagaacggggtcgcttctgtttttgtcttatatggttattttgtagaggcttgtttattacaatatgataatactatacggggaatgttttgtaaaattaatagttataaatataacaataaaaaataataaatgatttacgaaaaccaaatgggatattcagaaaatcgaatatcttctcaaattcaagtatatcaacattttcaacggtctattgaatttcacgtttgtttttgatattataaattttgaaaggtataaggagaacgtttatggaaattcgtaatatagtaacatttgtcaaagcgacggaaatgcagagctttaccaagacggcggcacagctgggatactctcaggcggcggtgacggtacagatcaagcagctggaagacgagctgggcacgcagctgttcgatcgaatcggtcgaagtgtaaagctgacccattccggcgaaaagttcatgccatatgcactgcggctgctgaaatcggtggaagaggcggcgtcgttcatgaaggaagacgatgagccttccggcatacttcgcataggtgccagctcgtccttttcggccggaattcttccgggaattctcccgggttttcacgagaaatatccgaaggttgacgtggtaatcaagacgtccgatatgctgacctccacattcgatcttcttcgtcagaacgagttggacttcatctttaccctggagcggaaactgatttctgcggacttcgtcagcgtagcggagcggaaagaagatatcgtgttcgtcacgaatccggacaacccgctggcggccatgaagaacgtaccgctggagcgggtggttcgggataatttcatcacttccgaccggggagtcagctacggcctctacatggaagaggctttggccgagcggggaatcagctatcatccgagcctggaaatcggctccacctccgccatcattaatatgatctgccaggggaagggcgtgtccttcctgccgaaattcctggcggacgatccaatcaatcacggcgcactggccattatcgatacggaaaagctggagatgcagatgtggacccagctgattcgcctgaagaataagtggatgaacccggtgatgaaggcgtttgtggactacctgagggagaacttccatcagttgacgtaatgtcgggatagttctttgtcaggtggtgttggtgaagaaaaaaggtaacttctaccgagcagtgattaagctgctcggtattctttttttgctcttcgtcggttcacgccaacacgccccggctttttccggttcgccggcatcattgttggcgtcgaccttcccgcaaagcctttgcccttcgtcggttcacgccaacacgccctgggtttttccaatctgccagcgtctttgttggtgccgacttctccgcaaagcctttgtccttcgccgagccacgccaacacgccccggctttttccggtttgccggtgcccatgttggcgtcgccctcctcgcaaagcctttacccttcgtcgagctgcgccaacacgccccggctttttccggttcgccggcatcattgttggcgtcgaccttcccgcaaaacctttgcccttcgtcgagtcacgccaacacgccccagctttttccggtttgccggtgcccatgttggcgtcgaccttcccgcaaagcctttgcccttcgtcgagctacgccaacacgccccggctttttccggtttgccggtgcctatgttggcgtcgccctcctcgcaaagcctttgtccttcgttgagccacgccaacacccaaaagcatagaccgaaatctatgcaatacaaaacgagaggaaaacggctttaccgatttcctctcgttctttttttacaaaaattcgttcgtgccgaaattattcagcgataacggtaccaacgcaagctctgccggtgcatgcagcgttgccttcgtctgtgtccagatgaacaacggaaaccggtccgccgattcttacgataacgtcgccgaataccagagctctcttcttgccggtgtcgatcttcaaatcaacgttctggttctgctcaacgcccagcttagcagcgtcttcctcggacaggtgaacgtgtctctgagcaacgatgcagcctgcttcggtctcaacggagtttccgttctcagcagtcagcttgattcccggtgtgcctgccagatctccggacagtctgatcggagcatctacgcccagggaacgagcgtctgtagcagccagctcaatctgagtaccttttctagccggtcccagaattgcaactctctccatggatctcttcggtccggtgatggtcagtctttcttctgcaacgaaaccgcctgcgatttccttcttaaccttcagctcataacctgcaccgaacagtttctcgatgtcctcctgggacaggtgcacgtggcgagcacttacttcaacatttacatctaatgtagccattgggataaccctcctttatcttaacaaaatttacctactccattatatgcaatggcgaaacctttgtctagattgttagataggactaacccaaagtttttcttaaatggggggcataaaaacaagttcgtcttccgccggccggtgcccgtgggagaggagggaggaatctcgcggaaaaatccccgggatttagggtataatctgcaaaaaaacttgtattgaaaccccggctatgatagaattattcggctatggatataaatgagatgtatatgcgagaggcactgcatcaagcggaagcggcggcggaaatcggagaagtcccggtgggcgcggttgtggtgcgagatggagagattatcgcaaaagcatataaccatgtagagaccgaccgaaattcatccgggcatgcggagatgctggccatccgggaggcggaacgggtgctgggaagcaagtggctgactggctgcgagctgtacgtcaccctggagccctgtgccatgtgcgccggcgccatggttttggcacggttggatcgcttgtggattggtgcgatggatccgaagaacggagcttgcggctctgtattcaatgtggtacaggaggaacggctgaatcaccgaatggaggtggagacgggaattctggaggcggagtgcggacagattctgtcggacttctttcggaacatgcgcgcggtaaaggcacggaagcgaaaacttttccggcagagaatgacatcgccggacaatactgatggaggaaacaattgatgaagagaaaaggcctgattgcactgctggcagcggtgctggtaacaatgagcatggcattcgtttcggcggatgaaagcgattttaaattggtgaattcctatccgaaggatggacagaccaatacttccattgagaacgtcggcgtgaagctgcgtttcaaccgggagctggccggcgaaaaggcacagaagaacaacgcgaagtgcgtaaagattgtggacccgaacggcaaggaaattccgattaaggtgatgagcagcaaggaggacaagggccttctgctggttctgggtgacagcaacaataagaaattcaaggttgagaacaacgcgaaatacaaattggtaatttccgagaatctgatggacgatcagggtgaccgcctgggcaaggagaccaccctttctttcacgaccttcaatcagcgcctgaacatgatgattaacatgggcatgatgttcctgatcttcggtggtattaccgtgatgaccattcgaaatgccaaccagcagcaggaaaagaagaataaaaaggacgagaaggaagaggtcgctttcaatccgtaccacgaagcaaagcgcaccggcaagaccgtggaagaggttattgcagagaacaagaagaaggaagaaaaggccgcaaagaaggcaaagcggaagaacaaggatggagaagccgagtacgtgaaggattatcagctgaagctgagtgagattctcccgaacgtgtacagcgtttccgcaccgcgtccgatttccgcagcgggcggtaaatatatttcctcgcacggtccgacggcaaaggcagcgaaagcggcaaagaagtccggcaatcggaaccagagatagtattttttgaaaggaatgcccttggcattccttttttgtaagcagattccgaatcaggagggaaaagaatgaattcatccatcaccatgaacgcctatgcgaagatcaatctttcgctggaagtactccggagacgtccggacggatatcacgatattttgtcctttatgcaagatctgggacttcacgatgtagtaactatgggacttacggaagagtccttgggtatttgcatgcaaaaatttccttcaaacaattgctttatccagggtgttcgtgtaaaattttgtatgaattacagtgcaatttccctgggatcggacaacttggcgtaccggggagtggaagcggtgctgaaggcattgccggaagacggaaaacgaccggaggaactgtatctcttcgtggataagaaattgccggtagcggcaggcattgccgggggaagcggcaatgcggcaggatgcatgctggcgaccaatgccctttgcggaaatccgttctcgctgcgggaactgatggtgctgggtgcatcggtgggagcggatgtaccgttctcgttgatgatgaatgcgcgaaagaacagagcggttttttcggaattgccgggaattgaagaagcttcagtagctgcagagattgagggaatcggcgaaattgttcggccgacggaaccgaaaccatacggagtgattctgatgaacccgggaatcggagtatctacgcgagaagtgtacgaagcattggatgctcaaaccggacgttcggtggaagagaaacttttttttaaccgaatggaagaatacacgctgaaacagtatccggaagcgaaagcgctaaaggatgccatggaggcaaatctccgggcggaccgggtgctgatgagcggcagcggacccacaatggttgcatattataattcgatggcacaagccgaatccgattaccgaatggcgaaagatgccccatggattcgggacaactggaaggtatggtacacagaaagtggagagatgtatgatggacattgatttgcagattcagaagccgttgcgagaactagtatatctggaactcaaacacaaaatccttaccggcgagattcaagccagaacgcgtttgatggaaatcgatttggcggagagaatgaatgttagccggacaccgatccgggaggccattcgagagctggcgacggatggacttgtggtgattgaaccgagacggggtgcgtacgtatcggatatttcaatccagaacatgctggatatttttgaggtaagagaagatttggaaggtctggcggccggcctggcggcacagcggattacagaggaagagaagctggcactgagcaagatgcaccggctgtatgagatggccgtggaagccagagataaagaggaaatcgtggaatacgacgagaagttccataacttcatcgttcgctgcagccgaaacaacgtgctgattgagctgagccgtcaggtgcaggaactgtccatgcggttccggtatctctactacgatgacggaaccgtattcgaacggattccgaaggaacacaagcatgttatggaagcaattgttgccggtgatgcggagaaggcgcgccgggaagcagaagcgcatatcaaagacctgaagcagttcatcgttgggctggacaaggtcacaagatagattaaaagaaagagaaaggttgctatttcaggggaattttgcgggaggtgatgagataggaaaaattcgcaagggttatgaaacgtatgaaatgatggttttttgaaaggagattactttgaataaggataagaaaggctatctgatactggcggatggcacgattctggaaggtagaaggttcggagcggaacgggattctatcggcgaactggtcttcaccaccggtgtggaaggctatgtggaaacgctgacggacccgagctactgcggacaaattgtcatgcagacatttccgctgatcggaaattacggaatgatggaagaagatttcgagggcaaatgcgccctgaagggatatgtggttcgggaatactgcgataccccatccaacttccgctcggaatatgatctggatacattcttgaaaaacaacgatgtgccgggaatttggggcatcgacacccgtgcgctgacccggaaaattcgggagcacggcgtaatgaacgcagtcatctgctccgagattccggaaaacttggatgcagtaaaagaatatacaattgttaatgccgtaaagtccgttacctgcgatgaggcgtacaccgtttctccggagggagaagcaaagtatcgcgtcaccctgatcgattacggcgcaaaaagaaatatcatccgcaagctgaaccggtacggctgtgaggttcgggtggtacccagcaccacttccgcagaggagattctggcatcccggccggatggcgtgatgctgtccaacggcccgggagacccggcggaaaataccggatgcattgaagaaatccgaaagctgatgaaccgggttccgattttcggcatctgcctgggacaccagctgctggcgctgtctcagggcggcgaaacctttaagctgaagtacggccacaggggcggaaatcagccggctacggtcaccttcggcgagaattgcggtcatacttttatcaccacccagaaccacggctatgcggttcgcccggaaagcctggaaggaaaaggggcggtcagcttcgtgaacgccaacgaccggacctgtgaaggaatgatttatccggacaagaacgcattttccgtacaatttcatccggaggcccatgcgggtcctcacgatacgagttttctgtttaaacagttcattgagttgatggaggagtacaaaaatgcctaaagataaaagtattaagaaagttctagtaatcggttccggaccgattgtcatcggccaggcggcggagtttgactatgccggcgcccaggcctgccgggtgctgaaggaggaaggcatcgatacggtgctggtgaactccaacccggccaccatcatgacggataaacacctggcggacgagatttatctggagccgctgacggtggaaaccgtaaagagaatcatcgagaaagagaagccggacggcctgctggccggactgggcggacagaccggattaaccattgccatgcagctttccaaggagaactggctggaagagcacaacgtgcgcctgctgggatccaatgtggacgccatcgataaggcagaagaccgggagctgttccgtgaggtgatggaagaaatcggcgagccttgcgtgccttccggaattgcggaagacctgcagacggcgctggatattgcaaaggaaatcgggtacccggtcatcgtgcgtcctgcttttaccctaggcggcagcggtggcggaatcgcggagacggaagaggaactgcgcatcatcgcgcagaatggattggatcagtccccgattacccagattctggtggagaagagcatcgccggatggaaggaaatcgaatttgagaccatgcgagactccatgggcaatgtgattcagatctgcccgatggagaacctggatccggtgggcgtgcacacgggtgactccatcgtcgtggcaccgaccctgactttggcggataaggagttccagatgcttcgttccgcggcgctgagaatcatttcggcgctgggcattgaaggcggatgcaactgccagtttgccttgaacccggacagctttgagtatgcggtaatcgaggtaaacccgagagtgtcccgttcctcggccctggcgtctaaagccaccggctatccaatcgccaaggtaaccacccgaattgctttgggatacaccctggacgaaatcgtgaacgacgtaaccggaaagacctgcgcttgcttcgagccgacggtggattacgtggcgctgaaggtgccgaagtggccgtttgacaaattcgccggctccagccggaagctgggcacccggatgaaggccaccggtgaggtcatgtccatcgccaactccttcgaggcggcattgatgaaggccatccgcggtgcggaaatttccctggacactctgaacttcgagtaccagggcgacaaaaccctgcaggaacggatcggcacgcaggacgatcaccgtaacttcgcgattttcgaaggctttaagacgagacaggtcaccgtggatcaggtgcacgacatcacgaagatcgaccgctggttcctgaacaagattaaacatctggcagacttcgaactggagctggcagattcggccaaaaataaagaacttccggcagagatgtacgaggaagcgaagaagctgggctataccgacgaagcgatttgccggattgccgaagtggaagaagttccgggcatggacttcagctataagatggtagacacttgcgccgcagaattcgacgcaatgaccccgtatttctattccacaacggataaggattgcgaatccagaagcttccgccgcagcggaaagccggtcatcatggtactgggttccggcccgattcgaatcggtcagggaatcgagttcgactattcatcggtacactgcgtatggacgctgcgggagatgggctacgacgtagttattgtcaacaacaacccggaaaccgtatccacggactacgacacggcgaaccgcctgtatttcgagccgctccatccggaagacgtgatgaacatcatcaaggtggagaagccgatcggcgtcgttgtggccttcggtggtcagaccgccatcaagctcacccagttcctgcacgacaacggaattcagattctgggcacctccgcagaaggaatcgatctggcggaagacagaggtaagttcgacgctcttctggaaaaattcggcatcagccgtccgaagggccagagtgtcaccgatctggagggcgcactccgggcggcagaagaaatcggctatccggtgcttctgagaccgtcctacgtcatcggcggccagaacatgaccattgccggggacgaagaggatacccggaagtacatggagcgaattctggaaaactccgacgacaacacggtgctggtggacaaatacatgccgggcatcgagctggaagtggatgttatttccgacggagaggatgtgctgattccgggaatcatggagcatatcgagaaagccggaattcactccggtgactccatcgctgtatatcctccgttcaatctgtcggatcgtcagctgagacgaattgtggatatttccgagaaactggcgctggcgctgggcaccaagggcctggtcaatattcagtatctccagtacaacggagagctgtacgtcatcgaggtgaatccgagagcatcccggacggtaccgtacatcagcaaggtgtccggtgtaccgatggtggatctggcatcccaggtaatgctgggggcaaagctggaagatctgggatacggaacgggactgtaccgcactccggcctacgtggctgtaaaggttccggtattctccttcgagaagctcaccgatgccaactccatcctgggaccggaaatgaagtccacgggagaagttctgggactgggtcggaccatgaacgaagccctgttcaagggactgaccgccgccggattcaccgtgccgccgagaaaatacggagaggagcacggcgtgatgatttccgttcagaaacgggattatccggaaatcctgccgattgccatgaaactgcacacactgggaatgaagctttatgccacaagaggcacggcagaagccatccgcaccatgggtatcgaggttactcaggttcagaaggctcagaagagcacggatatcatcgatctgatggaaagcggaaagaccagctatatcatctttaccggacaggccaacgatgcggcattgggcgattacaccgccgtgcacaagcgggcgatgcagctgggcatcccttgcctcaccagcgtggataccgccggtgccctggtcaatatgattgaatccagatattcggaacagaacaccgagctggtagacatcaaccacatgcgggcaacccaccgaaatgtgtactttaccaagctgcacagctgcggaaatgactatatcgtactggataacttcgacggacggattgagggaccggagtccctgtgcatcagcctgtgcgaccgccaccgttccatcggcggcgacggcatcgtcctggtggagaagtcccggaaggccgatgtgaagatgaaagtcttctacagcgacggcacggaaggggatgcctgcggaaacggcatccgctgcggtgcaaaatacgcctacgagcagggcttgatcggtcgggatatgatgacggtggaaaccgtcaacggtatccagaagctgaagctgttcatgcgagacggatgggtaacgtcggtaatcatgtatgttccggaagatcagttcctgtgcgaccgcgaaatggaaaaggcagccgctgctgacgcttgcgttcaggagaagctggcggccgccggcgcaacggcgctgaaaaccagccggattgccggaggcggactccactgccagattttctgcgactccatcgacacctttgatatcgaaaagctgggaccggaaatcgaatattcggatatcttcaatgcaccggcatgcttcgagttcatcaaggtggtggatgcgtccaccattcgtttgaagatctgggacggcgccaacggtgcggtgctctccagcgccagtgcggcattctgtgccgctcgcatggcggtggaacagggctattgcagaggagataaggaaatcaccgtggaaacaccgggaggcgatattctggtgaacttcctggaaggtcgaatcagcctgacggccgaggtgtccttcgcgttcagcggtaaattctggtattaagtatcgggcagacttgtccgggaaggagtagtttatgtgttttttagttggaaagacagcgattattaccggaggtggccgcgccacactcagtgacggaagctgcggttctattggatatggaattgctaccgcatatgcgaaagaaggggcgaatctggttatcaccggcagaaatgtgaaaaagctggaggcagccaaggaagaactggagcgactgtacggaatcaaagtgcttccggttcaggccgacgtcagtgccggtgcagataatgaggcgactgttcagaatgtagtcgacaaggccatggaagaattcggcagaatcgacgtgctgattaacaatgcacaggcttctgcgtccggcgttactttggccgatcacactacggagcagtttgatttggcgctgtattccggattgtatgctgcattctactatatgagggcatgctatccacacctcaaggaaaccaagggttccgtcatcaactttgcttccggtgccggcctgttcggcaactacggacagtccgcatatgcagcggcaaaagaaggcattcggggattgacccgcgttgccgcaacggaatggggcccggacggaatcaacgtcaacatcgtgtgcccgctggcatggacggctcagctggagaagttcaagcaaacttatccggaagcatttgaagcgaatgtaaagatgccgccggcaggtcattacggcgacgtagagaaagaaatcggccgtgcctgcgtacagctggcttcgccggacttcaagttcatgagcggcgagaccatcaccttggaaggcggaatgggcctgagaccgtaaagggaaaacataccacgaaaaaagcgggagagctgcagtgcagccctcccgcttttttcgtgaagcgtctatatttttgttagttcttcaagctctgaagcggagccggaatccgtccgccgcggcgaatcatttttgccggagaaggattcttcagatccattaccggaccatagcccagcaacccgccgaagttcagttcctcaccgctcttcaggccgatggccggaataacgcgaacagctgtggttttgctgttcaccataccgatggctgcctcgtcggcaatgatggcggagatggtttccggagtggtatctcccggaatcacgatcatgtccagacctacggagcatactgcggtcatggcttccagcttctccagaaccaggtttccgctgcgagcggcggcaatcatgccctcgtcttcacttaccgggataaatgcgccggagagtccgccgacactggaggaggccattacgccgccctttttaaccgcatcgttaagcatggccagtgcagcggtggtaccgtgggtaccgcactgctccaggccgatttcttccagaatacgggcaacggaatcgccgattgccggagtcggtgccagggacagatccacgattccgaacggtacgcccaatgcggcagcggcttcggaacccaccagctgaccgacacgggtaatcttaaatgccgttttcttaatggtttctgccacctcgttcagcggtgcatcgtccggaaggtcatgcagcacggaccgaaccacgcccggaccggatacgccgacgctgaggacggaatctgcttcgcccacgccgtggaaagcaccggccatgaacgggttatcctctaccgcgttgcagaataccaccagtttggcagcgcccatgcactgattatctttggtgaggagtgcggctttctgaacctgtcggcccatcagggcaacggcgtccatgttgatgccggccttggtggagccgatatttaccgaggagcacaccagctgggtttcggccaaagcctgagggatggattcaatcagttcccggtccccggcgctgaagcctttctggaccagtgcggaatatccgccgataaaatcaattccgacagtatgagctgctcgatccagcgtgcgtgcgtatttcaccgggtcgccgccggacacaccggccagcatggcaatcggtgtaacggaaacccgcttgtttacaattggaattccgtactttccggtaattttttcgccggtttccaccaggtgttccgcttttcggcagatcttctcatagatcttctcgcaggagcggtcgatgtcgctgtccgcgcagtccagcagagagatgcccatggtggtggtacggacatccaggtttttgtctcgaatcatggaaatggtttccaagatatcgccaatatcgttatacatgcttgttctcccttctgctaaatccgatgcatggaattgaaaatattttcatgcattacgtgaacgtccattgtcgggagttccttcagaatcgcatcccggagctcagcaattgttacattcatctgttcgacgctgatgaccatcatcatggtgaagaagtcctgctttacggattgggtcatctcgatgacactggcattggcattggcgcagcaagcggagacggaggccagaatgcctacattatctctgccggtgacggttaccacagctttctctctatccatttttttcctcctttgcagatacccggaactgtccgtcggccaggctgtcgtcccggcgaaagcggaaattgaattccggaaatttatgggtaaaatactttttattgtcggcttcattacctaccatattagaataccattttccgttggaaaatacatcaattttctgtttgttttctgtcaaagaattgccggaagcgttgagtttcaatcgattcagcagcggctcgatgcgttctcgggcaatcgccccttccaccagctggcgaaaggccgggtggtaggttccgccgttaatggctccgccgtcgccgatgagatccgtgctcttcagccccactcgcatgatggtaatatcggccgcctctaggattttgtacatttcttttgtgcgaagaacggcctcttctcggctcagcgggatgtacgtgccctgccgatattcttcatagagatccgtttcgtccaaaacgatggtgggatacaggcgcgccagctgcggccgcagacgggcggtttcccgtgcggaatagaggcacttctccatcgtatcgccgggcagtccgatcatcagctgaattcccagctcgaagccgtagctttgaattcgcgaaacggcgtcgtagacctgctgcgctgtatggcctcggcggctttggcggagtacatcctcatcgaaggactgtacgcccagctcgatggtatccacggaatattctttcagattgtccaggatctccggggtgatgtagtccggccgggtggacaggtgaatcttctgaattgcccccgcccgtttgtactcccgcgccacttccaggtaggcccgctgttcttccaacggaatccccgtaaaactcccgccgtagaatgcggcttccactaccggaacatcttgcagcgtggtgagccaggtgcggatggtggttcgcacatcctccggggtgactgccgccgagcgtgcggtgattttccgctggttgcagaagatgcagtcgttggggcaccctttgtgagggataaaaacagggatgatggcgtgcttcttgttccggctagccaatggtcagctctccccgcaggtccgattctacccagtcgcgaacctcgttggcagtgaagcctttgctgaacaggtactgaagcttggtgaccgtggcctcggtggtcatattgctgccgctggcggcaccggcccgggccaattcggagctggtctcataggtgcccagacgaacggttccctgcatgcactgcgtgcataccaccacggcggtgtcgttttcgatagccttgctgatgagcggcggaagctccgaatcgtagttcggaatgtttccggtgccgaaggtttccagaaccagggcccgaagatccttgttgacgattggcgcaaagagatcgaagtgaattcccgggaacaatttgatgacaccgatggatgtgggtttcatctccgttacccggaacggttcttttggttccggcaagaagcggttcgggaagtattcgatgtcgatgccggctttggccagtactgggtagttcggggaggagaatgcaatcagtccgtccgcagaggttttgacagcacggtttccccgaatcagatggttgccgaaatacaggcatacttcgtggatgtcgctgttggccgcaatcatcagggaggtgatcagattgtcccgcccgtcggaacggagctcgtacaggggaatctgagagccggtgaaaataactggtttcttcagaccttccagcatgaaggacagggcagaggcgctgtaggccatggtgtcggtgccgtggagaatgacgaagccgtcgtagcgctcgtagttctctttaatggtgttggccatccggttccactgcatgtaggtgatgttggacgaatccagaagcggatcgtattcgatgagatcccacttcggcatggcatcggaatacagatcccgaatcttctccagttcgccggaaaaatatccctccttcggctggtagccgtcccgggtcggtaccatgccgatggtgccgccggtgtaaataatgcagactcttttgttcatacattcctccaaatgttttacataattaataaatcgaatgaaaatagcagtgcgaattatacaccgtaaaaatctctgcccgggttctgcgccggacagagattgaattattatccatgggttttatttttgctttcggtatccgtcggttttttcaccgtatccatttcgaaccagaagtcgctgccctggccaaccttgctttttaccccgtaattagcattgtggagtaccagaatacctttgacgatggaaagccccaggccggatccttcgatgctccggttccggttcgcgctggtgcggtaataccgttcccatacgtgggacagctcgtcggaggcgatgccgtcgccgtggtcgataacatctacccggacctttttgccgattcgctttacctccacgatcactacccgatcctcgccgcaatacttaatggcattggagacgaagttggacaggacctgtttgattttttccttgtcgccgtagacataagccgccttgcacttgttcagtcggatatggtatccgttctgttcgttcagcaccttataggtagccacgatttcctccgttactgccaccagatcgaagatttccttgtccagctccagattgttggactgaatcttggaggcggaaagcatgtcggataccagcttgttcagccgatccgcttcggtgatgatgacctttaggtgctccttccgcttctccggattatcaccggagatgtcgttgatcatttccgcgtaggatttaatcatggtgaggggagtcttcagatcgtgggacacattggcaatcaaatcccgttgatagaagtccgtcttctgcatttcgtaggaagcggtattcaaggttcgggccaattcgttggtctccgtgaacatgcctccgttgaatttcacgttgtagttgccgtgagaaagttccatggccgatttggtgatgtccttaatcggtcgagacagccttcgggcgatgaacagtgccagcagtgcggccacaatcagggcgatgaagctgatgtatttcagctgcagccgaaggatggatatggtggatttcaccggatacaagggggccacaatgaacaaaatgttattgctgggtgtgtccccgatgtaggtggcataaatcagttttcggctgtccttcttcgtatcgttggccactagggaaacggaattcttattgctcttctccaagcggtcccgcgccgtggatgtttcgtaatcgtaggcgatggaagatggcctgaagtacgaaccgttatcaaagacgctggtgccgtccggagtgtccacccggatgaaaatatcactggatgcagaggcattgagcgccagattcttgaattgcccgtcgtcctgcagaaactcgttcttcagaagagcggcagtatgctccgtttcctgaaccttcatctgttcaaaataatgggtcatgaagaagctctggagcgaccaaatcagcataatcaatacggctgcaaaagtgaagaagtacagcagcatgacggttcggatgctgttaagatcaaacttattctgctgattcttttcctttcttgctgtcgtcgtactcaaatttgtatcctactcctctcaacgttacaatgaaatttcgatacggtcccaggttgttccgcagattcttgatatgggtatcgatggtgcggtcgtcgccaaagaagtcgtatccccagatgtcggaaagaagcttgtctctggacaaagcgatattcttgttctgaatcaggtagaagagaaggtcgtattccttcggggtcaggttgacccgttcgccgtctacggtaatggtgcgggcggcaaagttcacttccagtccgtcgaatttcattacctgggcgctgttgttctcggaaccgctcttccgctgcaggaccgcattcacccgagccatcagttccttcgggctgaatggcttgaccacataatcgtcgatgcccagctcgaagccgaacagcttgtcgtattcttcccctctggcggagagcatgattaccgggatgtccttgatcttcttgatttccttcacggagctgaatccatccagcttcggcatcatcacatccatgataatcaagtcgtaatcgttgagtttgcagagaccgatggcactcatgccgtcggctgcttcggtcacctcatatccgctgaactcagcgtattctttgatgacctcacggatcttatcttcgtcgtccactacgagtaatttcttcattcaagtttctcctttcagtatttcggcagtcccttttattataagagattgcgccattgaaaaactgtaaagattatatcacagaaatgtgaaagatgatagaataacaactgataagcatatgtttccccgttccgaaaagtaccgcttgcggcaataaaaagcgagaaatgcagttgacatatatacagcatgatggtaaaataattaatttttacttgcaaatattttttcctcgggatataataatagtgtgtcgaaaaaaggagaggcgatatgtttcaggttggcgagaaaatagcatatccgatgtacggagccggaacgattacagatattgtcgagaaagaagtgctgggcgaaattcacaaatattacgatgtgaacctgccgcacagcaagatgacggtcctgattccggtggaaagttctgcccgggttggcgtgcgcagaattattactgcggaagattttccggcagtctttaagctgctgggcgaagaggcggaagcgatgccggcgaattggaatcgtcgataccgcttgaatatggatcggctgaaaaccggggaaatccaggaagtcgcttcggttgttcggaatttagtgcgaagcgatcgaaagaagtccctctccaccggagagaagaagctcctgggcacggcaaagcagattctggaaagcgagctgatgctggcgggaaattatacaatggaagaagcagatgaactggtcgaatcccacatataaccgagaacggtatatggccggaaacgaccggtttttatatatgaatacttttagaaaaatatcttgagggagaaaacgatgaacattggaatcgtagttgcggcgggaaaaggaacccgcatgaacgcggaggtgccgaagcagatgctgccgtatcggaacagcactgtgctggagtgcgccgcgcggccgtttgcggaacatccggatatcgacgaaatcgtcatcgtcacgccgaaggacggcacgaatgcggatttttacctaaaaacagcccgcgccctgcaggaggtttccggcaaggaggtgcggctgacgaagggcggaaaggaacgaggagactccgtccgggccggtctggatatgtgcggaaatatttgcagagagaaaggaatttcggaaaattccgtgaaggtgctgattcacgatggtgctcgagcggacctgacgaccgggatcattgaccgaaacttaaagggtctggaccggtgggatgcggtatgtactgcggttccgtcggtggattccatgcggattattccggataccgacttgaactcgttatttatttatcctataatggacagtaaagttattgagagaaggcgcatgttttgcgttcagacgcctcaaagctttcggctggatgtgattcgccgggcctacgatgttgcgagacagaagggatatgccggtaccgatgatgcatccgtcgcggaattggcgggcatctccgtggcccttgtggagggagagtacgccaaccgaaaaataacaaccaaagaggacatttctatggaaatcagaacaggaaacggttacgatgtacaccgccttgtcccggacagaaacctgatattgtgcgggaccccggtccccagcaaattgggacttctgggacattccgatgcggacgtagcgacgcacgcattgatggatgccctgctgggagctgcgggaaaaggagatattggaaaatattttccggataccgatgagaaatatcggggagcggacagcatagagctgctccgggaggtaatccggattatcggcgactaccgagttgtcaacgtggatgtgacaattatttgtgagaagccgaagctggcacctcatatagaagccatgaaagagaatctcgcccgggcgatgaatgtttccgagggacaggtgaatgtaaaagccaccaccacggagaagctgggatttacgggacgagaagaaggtattgcggcgatagcgagctgcacgattgaagggagacaatagaaatgaaattatccaagagacatctgaagacattgagagaagcaccgaaggaagcggaactggtcagccatcagctgctgattcgtgccaacctggttcgcaaggtagcagcgggaatctatgaattcatgccgctgggataccgttccctgcggaaggtagagaatatcgtccgggaggaactggaccgcatcggcgaccaggaaatcctgatgccgggaccgaatccggccgaactgtggaaggaatccggcagatggtatgcatacggaccggaactgtggagaatcaaggacagaaacggaagagacttctgccttggaccgacgcatgaggagaccgtaacggatgtcgcacggaacgaattctcttcctacagagagcttccgcagaccctgtaccagattcagtggaagtacagagacgaagctcgtccaagatacggactgctgcgttccagagagttcctgatgagcgacggatattccttcgacagagatgaagcgggaatggatgtcagctacatgaacgagtacggtgcttatgagagaatcttcactcgctgcggactggactacagaattgtagaagcggacaacggcccaatcggcggaagccgttctcacgaattctccgcactgtctaacgtgggagagagtgaactggcacactgtccggaatgcggatatgcagcaacgctggagagagcggaatgcgtagatgacgaaccggttcaggaagagatggaagaactgaagagcgtatatactccgggaaccaagaccatcgaggacgtatgcaactacctccacatggatgtaaagaagtccatcaaggcgctgatgttcgttacctacgacgatgaactgaatccggcagagtacgtatgcgccttcgttcgcggtgaccgtgaagtgaacatgattaagctggtaaatgcactgggcattccggaacactacatcgaattcgccaatgaggacgagatgggtgcaaccaccggttgtgtcggcggattcaccggcccggtaggactgcagaactgcaagattgtagtggacagcgaactggtaggaaccgtgaacatgtgtgccggtgcgaacaaggaagaccaccacatgaccggcgtatgctacggaagagattacaagggcgacatcgtaacggatatcaaggtcctgaaagagggcgagcgttgcccgaagtgcggaaagccggttatcgagcatagcagaggtatcgaggttggacagatcttcaagctgggaaccaagtactccgaatccatgaaggcgttctacaaggatgagaacggaaacgactgcgtataccagatgggttgctacggcatcggtatcacccgtaccctgcaggcaatcatcgagcagcacaacgatgaaaacggaattatctggccgatttccgttgcaccgtatcacgtaatgattaccgtaatcaatccgcaggatgaaacccagatgaatctggccaacaagattgaggaagagctggagaaggccggcgtggaagttctgtgcgatgacagagatgagagaccgggcgtgaagttcaaggatgcggatctgctgggactgccgattcgaatcaccgtcggaaagaaagccggcgagagtgttgtagagtataagctgagaagagaaggggagatgaccctgaagtctgcagaagatgcgacaaaggatgccatcgatctggtaaatgcggagagatttggactgtaattgtgttagagctttttataacattctttaaactgggattatttacgattggcggcggtgtggcgatgataccgattcttcagaacatcgccgtcaacgaaaagaagtggttcacggcagaggaagcgctggatgtcatatccgtctgccagagcctccccggtgttattgcaattaacatggcaacatacgtgggattcaagcgaaagggtttgcttggatcccttgtttcgactgtgggggttgtacttccttcttttgtcgtgattattctggtggccaaaggcctgtccgccttcggagacaatccgtacgtgatgggtgcgttgggcggccttcgggcggccgccatgggactggtgctgattgcggtatattccattgccaagggtgtcatcaaggattggttttccgggatttcctccttggtggggattctgctgatcgaatttacgaatatgagcgtggtgctgattgtactcctgtttcttgtgaccggaattcttcggtcgctttggaacactcgccgggaaggaggcttgaaatgattttcgcaaaattattctgggcgttcttcaaaatcggcgctgtggggttcggcggcggcatggccatcgtgggcatgatctacgataccatccggggatttgtgtccatgaccccgtcccaatatgcggacatcgtggcgattgcgcaggttacgccgggaccggtggcggtgaacacggccacctatgtgggataccagacggcgggaatgctgggatccctcgtggccacgctgggggttgccacacctgcttttatcctggtggccatcatcgccggcatgattgatcgctacaagcagagccgaatcgttcaaggcgcgctggagggcattcggcccgcaacggtgggcatgatttttaccgcggctcttaccatctgccggccggccatcgaagcggagcatcctttaggggggagcatttccgccatttccggtattttgccgggacacattgacggacttgccatcctgatgtgcgccgccaccgtcctgctgatcaagaagttccacgtaaacgcaatatacgtattgctgattatgggatgcattggtgcagtagttggtgtataatttactggaccggattttgaatcgggtgatggagaccgcccgaaattgttttaaccgaatgggaaccgccggagagatttggcggggaaaggggaaccgatgaagatatacaataccatgaccggctgcaaggaagaatttgtaccgctggaagaggggaaggttcggatcta

SEQ ID NO: 3596 - DNA, 19222 bp, Unknown
  16S sequences of unknown bacteria
gccgccgttcatctcgttgccgctttcgtcggtcacgggcccgccgccgttctcttcgggcaggggctgttcttcttttttgtcaaaccagccgtaaggattccaattcttgaaaccttgcgtaatagccgccgtgaccgccaccgccaacatgagaacggcaagcagggtacagaaccacttaaagccgtcgcttttcttgtgtttttgtaattcgtttttcattttcttttacacctcgttattttttaacaacaatttcgacactcggcacgaccggcagtttcctgtttgaggttgactttctcgatttgccgccgcttttcttagatgcatactcttttttcgtcgtacccaaaggcggatatttcgaggggtttttctccacctttttcttacctgcacgataacccgccttaaacgattgcatattttcgggattgtcaaaattgatttcttttcccgaatacgcagtcgaataacccatacccgagtaataagcctgtttctgcgccctcgtgtatttcgtttttgccataataaacctccaaaaattttatattatacccgattgaatatcggatattttcatagattactcgcattgacttttatcttccgaaaagatataatttaaattgcaacaataaataaccaaacggaagataaaagcaacgagaagaaatatctaaacgtacttacaatcgttttggaaattgtttgtgaaatcgtcttactcccgtttcacgttattaaaacaattttgatattcttaacgaaataagtaaatgatctgtcagccgtcctactcggtagggcggttgtttttatcgtccaattccattttgagttgttgcggctcgttgtcaaagggattgtacgcggtatcgccgcagagtttttcgaacatggcattgaaatccattttcttgacagtttgttgtttcttttggattgattcaataagcgtgtttttgtacattctgccgatgcctttcggtttgccgtattcgtccaaaccctcatcgtacacaagtatctcatctttcttcacttccacgtaacaagtaatgcggcgataaagttgtacgaaatcttcgttttccaaagaaaagaataatccttttgagtttttgcctttgtaccaatatcgcaacggaacggaagaagtaatgatgatcaattcgccgttgaaaactttgttattgaatcggcttgcgacactcgacgaggtgtgattgtcgataatctttaagaaatcggaaaaattctcaaagtttttatcccgcgaatcgtctaagatcattcctttttgtccgagataatcctgccacggatcgttgcttgcggaactgacacagtaatcatctccgtaacggtctttcatgatctgtttcgcataggtcgttttacccgtgccgcccttgcccgttataaacatgaccgaaatatttctgtccgtctgcatggataaccatttgcaatggtttttccatagggtatctaactgacggtatgcgctgacctgttccgacacgggcaaggaatgaatgtaatttaattgctttccgtaactgtatttatcgaagtcaccgaggattttcgcgtttttgatttccgtttcgaaatcgaagtttgcgatcacttcggaaggggaatattgatacttattttgttggctgtcgttgccgtgggtaagatataagagcatatccgttgcacggcctttgaccttgtttacttggctttcttgaagtccgaaccactccgcaacctgctttgtatcgatacccgaatttccgaaattcaggtaaatatgataatgcggcgcggtatcgtccttgtcgtgcaatatgtaagcccatttcttaatggttttgtggcttttgatcgtttcctgtatatcgcacttaaaaaattcgacgcgtgattccacttcacattgtttcaaatacatttgtaacccctcgacttaaaacaagtgaatatttttgcacctttttgcaccttttgcccgaggcgcttggacaagccccagcgcctcgggcgtagaatttttgccttgattgcggcaacttcctatgctttttgcagttgcctttgcaccttttgcaccttttgcctgttttttatttcccgtcatgagagggaagaatatttccgttatccacatagtccgaaaacagacgggataaagaggcgtaatcgtcggaaacgtcgatagacgtgccgtcatcgaggacaacggaagtacttttctttgtttccgcaaagaaaagtactctgttgacattgacggatactttctcgttccgtactgtttgaagttcaatgaacttttccacgcagatatctccttgtttggttatccataaaaccgattaaaagaccgccgcgccgtgttgcgtcaatgtgtattgcggctctcgttcgctttcttccaatccacgaactccgcgtctatgtaatgcgttctcttgcacttcggacacacaagcatatccttgctgtccaatgttatcttcctgcccgtcaacttatgaccgcaggcacattcaaacgtttctgctttcattccaactcctccacatagcaccacgaccgtggcggacgggttatctcgaatctttttgcccatgccacataatggcaatgagtattaggatagagagtgtataaccattgttcctctgtcataaagccctctttcctaaactcccccaactctttcggcttgtcgtagattttcaaatcggagattttcatttctgtaatattcttataatctttgccgctgtatttccgtatttctgcgacagatacgcaagcattgcgcggcaatgtcgcgggaatacccatgcaaatacgccactctgtcatgcttttacaaatccactcgttgacaaccttgttacgaccgaagatcccgctttcgtatgtataaacccgaaacggcggttttattttgggcggtcttgttcttaattccgaaattttcaatcccgtttcaatgtttttgttatgtcgttcctgtattgacatcaatattgattgcatttctatttaccttgtttaaaagggtattccttgaccgtcagcctcacagggttgcaatacaggctttttacccgactttttatcggggagatcggggagttcttccgcaaacgcggataacagcacgcgacgctcgcgatagcggtcatctctgcccgtatctttgttttcaaagtatttcacttcgataggcacaaggatatcgccgcatttcgcaaagaaattcgttgccgtcttttgttctccgtctttctcgtaagacacctgctttttcatcaaattaaccattgccataataaatctcctttggctatacgccattaaaatatatttacaatgcctatacggctactgtatcaaaagaggggaacggcaggaatcgaacctgctaaacttcaatgtttactaatccacacgttcccaaaggggaagtggctataacgccgccacttacggcatgagagcgttttttagagaataaaaaaaaacgcaaaaagtgaaagttgataaaactttctcttttcgcatttaattataaaacctaaaacgcatatataatgcctgaaaaccgcacagaataaattgactaaataaaaaaaatttggtaaaatatttttatggacaatacaaaaaaacttctccgcgcgttgcaggcggaagccatgcttaccgaaagttgcgatctgcgcgcttatctgacgggtttttttagttcgttcggatatgtctacacggattgggaagagagcgttttctttaccgacccgcgctatgcggaaggcgcgaaagaagcgctgaaagggcaggataccaaggtagagatcgccaaatccgccgcatccgttttcgattatatcaaaaccaaaaaagtcaaaaaactcgccgtccccatggaacgcgtcagcgtgcccgaggcggcggtttataaaaaatacaaattcaaactgacggacagtatgcccgcgttcgtcgaggcgatgagcgtcaagacggacgaagaaatgcaaaacgtcgccgccgcgtgcgagatcgcagaaaaggcgttggacaagttgtacggcgagttgaaagagggcgatacggaaaacgaagtcgccgcgcggctcgaatactatatgcgcgcattcggcgcgggcgaccgttccttcgagaccatcgcggcgttcggtaaaaactcttccgtgccgcaccacgcgcccgacgataccaaactcgaaaagggaatgcccgtgcttctggatttcggctgcaaagtgggcggttactgttcggacatcacgcgcacctgccttttcggaaagagcgcggacgaccatttcgcaaaaatttacgctcacgtttacgatgcccacatgaacgctgcggagcatatccgcgcaggcatgagcggacacgaagcggatgcgctcgcgcgcggcgttttggaaaagcagggactggacaagttctttacccattctctggggcacgggatcggcatcaatattcacgaatatcccaccttacgcatcggggcggactgtacgctgaaagacgatatggtcttttccatcgagccgggcgtatatttcgaaggagaattcggcatccgcatcgaggacagcgtgcggctgaaagacggcaaagtcgaatcgttcatgcgttcggataaaaaattgattattttataatttaattcagatagattaaaggagattattttatgattgcagcaggagatttcagaaagggcgtcaccatcgaatacaacggcaacgtatacgtcgtcgtagagtttcagcacgtcaaaccgggcaagggcgcggctttcgtgcgcactagactgaaaaacgttgtaacgggcgccgttttggaacttacgttcaacccttccgaaaaggtggaaaacgcacatatcgaaacgaaaaagatgacttattcctattcggacggtgaactgtattggttcatggacgaagaattcaacctgaccccgctcaatcacgatcaggtagaggacgccttgaaatatatcaaagagaacgatcccgtgaccgtgcgtttttataagggcgccgcgttttcggtggagtgcgaaaactttgtcgagttgaagatcgtcgaggcggaacccggcgtgaaaggcaataccgcgaccaacgccactaaaatggcgactttggaaacgggcgcaaagatccaggttcccatgttcgtgaacgagggcgaagtgatccgcgttgatacccgtacgggcgagtacatggagcgcgtaaagtaatttaaatcgaatcaggcgcgcggcgaacggattttccgtccgccgcgtaactttgtaaggaggaaatcatgcgtgcattggttcagcgcgtgcgcaaaacggcgctgtctgtcggaggaaaacccgtatcggagattccgttcggtttggcggtctatctcggcgtgaaagagggggatacgcgcgcgcaggcggaatttatcgcaaaaaagattgcgcatctgcgcatattcgaggatgagaacggcaaaatgaatctttccgtcaaagacgagggcggcgaaattttgctcatttcccagttcacgctctacggcgactgtacgcacggcaaccgcccgagttttatcgcggcggcgcgccccgaaacggcgcagcccctttatgaaatcgtaaaagaagaactgatcggatacgggatacccgtttgtaccggcgtgttcggtgcggatatgaagatcgagcagtacaacgacgggcccgtgagtattctgatcgaaagcgaggcgtaaacgatgcggatacgttatctcggcaccgcggcggcggaaggctttcccgcggtattctgcaactgcgcagcctgtaaaatggcgcgcgaactgggcgaactgcgtacccgctcgcaggcgctgatcgacgaaacgctgctcgtcgatcttccgcccgaaacctattatcacaccgtgcgtttcggaatagatttgtccgccgtgtcgcatcttctcgtgacgcattcgcataccgatcatttttacgcgcaggaactcgtgaaccgcggctataaattcgcctacggcatgcgcgcaaaaacactgcgcatttacggcgacgaaactgtgcgggaagtattcgcagaaggtaccgcgcgggagatcaaggatgacgtgcgcgccgatatccgctttataacggcggaaccttttacggctttcgactgcggcggatacgaagtgtacgcgcttcccgcaaagcatacgccttccgagcgcgcgctcgtctattttatccgcaaggacggaaagggaatattgtatctcaacgatacgggtctgcccgacgagggtttgtatgattttctgcgggagcataaactgcgcgccgacctcgtgagtttcgactgtacgctcggcggcagtcaggagattcattcgggaaggcatatgaacgtgtacgagaacgcgcaggtcttggaaaaacttttgagaatcggcgcagccgcgcccgacgtgcgggcggtcataacgcacttttcgcacaacgccgcgccttttcggaaagatatggattcgctcgccgcaaaattcggatttatcgccgcctacgacggcatgacgatcgaaatttaaaaacccgccgtacaatttgtgcggcgggttttcttaacgctttacttcatagacgatatggggcatgaccattccgtaataatatttggtctgtttgccgacgggtatcatgccgtttcgcacggcgaccgcgatcgagggcagattgttttcgcggataatggaatatacggcgggaaaatccaacttttcgaaagcgtaacgtttgcaggcggcggcgcattcggtcgcgtaaccccgatgccagaattttctgcggaaaagatagccgatctcgggcacgagcgcgtcgtcccatttctgcatggtgatcccgcactggccgagaaattcgccgctttttttgtcttttacagcccacagcccgaacccgtatatgcggtaccgttcgatctgtcgttcgagccattcgcgcacttcgccctccgaaaaggcgtgttcgtaggcgtacatcgccttctcgtcctgcaaaatcgtgcacagattgccgaaatcgcattcggtcagttcgcaaaagaacgtgcgctccgtttccgcgatcattgcacgatcacccccagatttttgattagatccgccgcctgcacggcgttgattgtcgcgcctttgagttcggaaagatcggcggagatctcgatgccgctcaatttgctgtcgctcaaattaatccctttgagcgaggtcgtgtaaaaattcacgcgcgtaaaatcgcatttggaaaaggcgacgcctttcagtttgcccatggcgacgtcggcaaaagaaaaatcgcactccttccagcaggcgttctgcattttttccgcgttcagattggcgtaagaaaagttacagcccgtcgcgacgatctctttcaggacgctttcggacagatccgcgcccatccatttggattgcagaaaggcgcactgcttgaaataggaattgcgtaggctgccgttggaaaaatcgcagccgcggaacacggcgttggtatattcgaagcgttcgaaggcacagtcgttgaatttgcagttttcgaacacgcagccgaaaaattcggcgtgcccgaaccgttcgttttcggcgcggaaatttttgaaaattttttgttcgatgcgctcttccgtgtcgcggtattccgatactgcggcggaaaaatcggcgggataaagcggctcgggaaattcgggctgcaaaatgcgcatgatcgttgcctccgtgaatttgattgtttcagtatatcgtataattaccctgctgtcaagcgcggatccggcggaaacgttgacttttcgcggtaaaaatagtatcataaaggggaaaggaccaagggaggagaaccatgaaaaaaagtctgctgaaaaattacgcgaaactcatcgccgttgtcggcggaaatatacgccccgggcaggacgtggaaatttttgccgagcccgaccagcccgcgttcgtcacgtatttgtgcgaagaatgctacaaggcgggcgcgcgcagcgtgcgtgtcgagtggtcgagccaggcggtcgaccgcctcgccgcccgcttcgaatcgcaaaagacgctctcgcaggtgccttcgtgggaagaggaacttttaaaagagcgcacggaaaaactgcccgtacgcatcaagatcctgtccgccgaccccgacggcatgaagggcgtagaccgcgacaaactcaccaaggcgcaagcggtgcgctcgctcattaccaaaccttatcaggaccgcatgaccaaccgctatcagtggtgcgtggcggctgtgccttccgttggttgggcgaaaaagattttccccgacgagcgttccaacgcggcggtggaaaaattgtggcaactcatattggaaacttcccgcgcggcggggaaggatcctctcaccgactggatgtggcataaccgcgccttgaaggagcgctgcgaaaaactcaacgccatgggacttgcgtccctcgaatataaaagttccaacggcacggatttttccatagccctcatccccgaagcggaattcatcgcgggcaaaaaggtgacggcggacggacattatttcaaccccaacattcccaccgaagaggtgttcaccacgcctctcaaaaattcggcgcagggactggtgcgcgcgacgcggccgctctcctacgggggcgaactcatcgaggatttctggatacgtttcgagaacggaaaggcggtcgagtggggcgcggaggagaatgaaaaactgcttggcgacatcatcaacatggacgaaggctcgtgctatctgggcgaatgcgcgctcgtgccctgcgattctcccatcaacaagagcggtattttattctataacaccctgtttgatgaaaacgccgcctgccatctggcgctcgggcgcggctataccaataccgtgaagaactttgcctcatacgggcgcgaacaattcgccgcaatgggcatcaacgattcttccgtgcacgtcgattttatggttggcacgcgcgatctgttcatcacgggcgttacgaaagagggcgcgcgcctgcccattttcgagcgcggcaactgggcgttttaaggagaaaccatgaaaaagactgttttgaaaaattatgcgaaactcatcgccaagacgggcgtcaacgtaaagagcgggcaggacgtgatcattcgcgcggaactcgaccagcccgaattcgtggcgtacgtggcggaagaatgttaccgtgcgggcgcaaggaacgtgcgcgtggaatggtcgcatcagcccgtttccaggctcaacgcgatttatcagagcgaggataccctcgcggaagtcgcgccctggcaggaagaaaaactgcgcgaccagtcgctctctcttcccgccgtcatttatctggaatcggcggatcccgacggcatgaacggcgtggacgcgcacaaagtgagcagcgcctccatgcgccgctttcccaagatcaaaccctaccgcgacgcgatggaaaataaatatcagtggtgtatcgcggcggtcgcgggcaaaaactgggcgaaaaaagtatttcccaaagaaaaaaacgcgcaggctgccgaagaaaaattatgggaggcgatcttgcgctgttcccgcgcggaaggcaatcccatcggcaactggaacgaacacaataaaaatctttccgaacgctgccgtatcctgaacggacttcatctgaaaaaacttttttaccgttcgtccaacggcaccgaccttaccgtggggctcatgcccgaaggcgtgtttgcaggcggcggcgaaacgacgctttcgggccgctatttcaatccgaacattccgtcggaagaggtgttcacgactccccgacgcggcttggcggagggtgtcgtgtactcgacgaagccgctctcttatcaggggcagttgatcgaaaactttcatctgcgctttgcggacggaaaagtgacggaggctgcggcggaaaagggcgaagaagtgctcaaaaaaatgctcgccatggacgagggcgcgtcctatctcggcgaatgcgcgctcgtgccgttcgattcgcctatcaacgagagcggtctgctcttttacaatacgctgttcgacgaaaacgccagttgccaccttgcgctcggcaggggcttttccatgtgcgtgaagggttatgaaaattattccgacgaaaagatcaaagaactcggcgtcaacgattcgatgatccacgtcgatttcatgatcggcgcccgcgacctttccatcgaaggcgaaacggaggacggtgcgcgcgtgcccatattcgtaaacggtaactgggcgatttaaaaatgtcgctcggaaagcgaccaaatgttgaaagatttgcgctatactgatgccatcgaaacaaggaggcatcggaatatgcgcaaaaattttacggagatcattttcattctcgacaggagcggctcgatgggcgggctcgaaaaggacgtgatcggaggtttcaacgcttttatcgaaaagcagaaagaacaaaaggttgagggcgcggtcacgctcgtgcttttcgacgataagactgagacggtattcgatcgcgaaaatttacggacgacgccccgcctcggcgaagacaaatactatgtgcgcggcagtacggcgctgtacgacgcagtggggcgtaccgtggcggaagcggggcaaaaacttgccgcgctcgtcgagagcgaacggcccgaccgcgtgatcgtcgccgtcacgacggacggtttcgaaaacgccagccgcgaatatacgcaaaaacgagtgcgcgggatgattgagcatcagaaacagaaatacaactgggaatttctctttctgggcgcgaatatcgacgcggagcaggtcgcgggcggaatcgggatcggcagagagcgcgcggcgaactttgcggcgagcgcggagggcgtgcagtatacgttcgacagcgtggccaaagcggtctgtatgatgcgcgctggcgaaaccgtttccgaagaatggaaggcgggtgaaaaaaaaggcgctcccaagcgtcccgcggtacgggcgaaaattcttccgttgatggtatgcccgaaaaaagacaaataaaaaaatgaaaaaagcggggcgatattcgtaagaaaagccccgctttcaagttgcttttaccgtagaaaaagggtataatgttgaaaacaaagacgaggctgtaaaatgataagagaaatcacccgaaacgaccgcgattcatttttgcgcttatccgacgaattttacaagtcggaagcggtattgcacgatattcccgccgcttatcacgaggcggcgttcgacgaactgatgcgctcgaaagagtacgcgtcggcttatatgatagagtgggagggcgagatcgtcggctacctgctcaccgccaagacctactcgcgcgaggcgggcgggctcgttttatggctggaagaaatgtatatgcgtcccgcataccgcagcaagggattggggaaagaggcgttcgcctttatcgaagcgctcgccgcgcgcgaaaatatccgccgccttcgtctggaagtggaagaggacaacgtgcgcgcgcgttctctctacgagcggctcggctatcggcctctcgaatacggacagatggtgaaagaactcggatagagatatacgtatgaaaaaattaggcgtcaaccacacgctcggcgcgtgttacataggctacatcacgcaggcgatcgtcgtcaatttcgcacctctcctgttcgtcacctttgtggcggattacaatatcagtctgacgctcatcggggcgatgatcaccgtcaatttcggggttcaactgctcgtcgatctcgcgtcgtcgctgttcgtggataagatcggctatcggccgtgcctcttcgccgcgcacggctttgcctgcgtcgggcttctgcttctggcctttcttcccgatcttctgcccgtgccgtgggcgggactgtttatcgcctccgccgtttatgccgtcggcggcggactgttggaagtgctcgtcagtcccgtgacggaggctctgcctttcgaggataaaaaggcgaaaatgagccttttgcattccttttacagttggggacagatggctgtcattctgctttccacgctgtttttcgcaattttcggcatcgggaactggaggatactcgcctgtatctgggcggcggtgccgctcttgaacggcgtgtatttcctcttcgtgcccatttataaactggtggaagaaggggagagccagcccgtgcggcaactcctgtccaccaaaaagttttggtttttcgcgatcttaatggtatgcgcgggcagcgcagaacaggcaatcagccaatgggcgtccgcgtttgcggaatcgggactcaacatttccaaaacgctgggagatattctcgggccgtgcgccttcgcactttgcatgggcgtgtcgcgcgtgctgttttccaaattcggggaacgcatccccatccgcacggcgctgctcatcgcgggtacgggctgtatcgcgggatatgcgatgtgcgtcttttcgcccgcggcggcgcttgcgctcgtcgggtgcggcgtcgtgggatttttcgttggcatcatgtggccgggcgtgttcagtttcgccgccagggagtgcccgaaagggggtaccgccatgttcgcctttttcgccttggcgggcgacgtgggctgttctctcggtcccacggcggtgggcgcgctgtccgatacgttcggcagcatttcctttgggctgggtgcgggcgcgctgtttcccgtactcgccgttgccgtgatctttttttccaaaacgggaaaaagaaagcaagatgatcttccgcaaattttaaaatagaagtacgagaatatgaataccgatcttacggtgggaaaaccgtggaaagtccttttaaaatacatattgccgttgttgggcagcgccgtctttcagcaactttacacgttggcggataccgtcatcgcggggaaattcgcggggagatccgcgcttgcggcgatcggcgcatcgacggcgatcgtcaatatcctgatggcgatcgcgctcggcgcgaacgcaggctgcgcggtgcttgtctcccgctgtttcggggcaaaggaaaacgccaaagtcaaatcatccgtctatacggggctgatcgctttcggggcgttcagcgtcctgctcatgacggcggggctcgcctcctgcgcgcccattctgcgtgcgctcaaaacgccctcgaacgtgctcgacgcgagcgtcgtgtacctcaatatctactacatgggattgccgtttctcatcctgtacaatctcggaacgggtatcttttccgcgctgggcgacagccgcacgcccttttattttctcgtgttttcgtctgtgaccaacgtgatattggattatttcatggtgcggccgtgggggatcgcgggcgtcgcgtgggcgacgttcatcgcgcagggcgcggcgtgtcttctgacgctgttcgcggtttttctgcgcctgaaaaaaatcaaaacagaggaaaaaccgaaaatattttcaggagcgctcttaaaaatgctgctccttttggcgcttcccgtggcgctgcaaaacagtttcgtttcggtggggaatctcatcgtgcaggtcaagatcaacggctacggcgatgcggtgatggcgggctttacggcgggttctaaactgatgatcttctgcaccacctgtttctgcacgtgcgccaacgggctgaccaatttcgtttcgcaaaattacggcgcgcacgagtttactcgcatcaagcgcggattttacgcggaactcgtcatttccacgctgctcgtggctgcgtttttcgcggcggtgttctcgtttgcggaaccgctcgtcaaactgtttttatcggaagaggaggataccgcaaagactctggaagcgggcgtgcagtttgtccgcatcgtatcgccctttttcttcgccgtgaacgtcaaagtttcggcggacgcggcggtgcgcgggagcggcggcaacgcgggctttatggtcagcacttttaccgatttgctgctgcgcgtcgcgttcgcgtttatattgactccgtcgatgggatttgcgggcgtatgctgggcgtggcccgtcggctggacgctctcgacgtttgtcgcgctcgcctattatttccgccgcccgtgcctgaaaaagtcttatatcgcggcaagcggcagatgatattgctatgataaggaggaactatggccaattttctcgaacagatggaatcgaacattttcgacgcgcagatcacccgcctcgcccgcaagacgggcaagacgcccgataaggaatttatgcgcgccatgtattaccgcgtcaaagagcgatataaggaggaactgcaaaagcgcaagatcgttctccgccaactcgacgccgtgcgtctggacgagatcgtgagttatgtgttctattatcatcttttccatacggcgcacctgccgcagccgctcgtcgcgcagttggaaggggatgaaaactaccgcggttttctcgtgcgcgacgtggcggtgtacatggtcatcaacgagcacctcaacgtcgaaaaactttccaatacttccgaatattcccccgagatcgccgcgtacaacatggcgtgcagttattcgctcttcgtgctcggttcgttccgcggcgaaaacaggcgcatgaacgggatcaataatctcttcaaaaaggcgatgatcaccattaaaagcgtgatcagcctgcttgcgggcggcaacagttgcgacgcggtcattttgtggcggcatctccacgaacttgaatgcgtgctgctcgttttgaacaacgcggacgacgaaatgttcttcaagtacatcaagcacatggaatatttcaatatggagggcagtcccaacggagaagaactgcaaaagcgcctgtctgaggaatgtaaacaatacggcgtgaaggaacggaacgcctttatcaattacggctggcttttatacgtgcccggattcaaggaagaagtgggcaaggaataccgcctcaatttcaaagagggcttgcagcgccttgcggggcagggaggcaggcatcccgcctatgcgagcgcaagcaagatcctgcacccctcggcgtgggtcgtgaccatccgcgacgacaaattttataaattcacgctgttcgaattgtaccgttcgctcacgaatatcgtggagcagatcaaactttacgtcgcacgctaccgcgaaagttcaatcaaagcgtcggaatgcgacaattatttgaagagcatcgacggctatatgaacatcattgtccgcaacaataagatcatcgcggtcaaatacccggattgacgaaatcggcgcgccttttaaaaaaaggcgcgccgcgttttttcagattcagttaaaatcccatttcttcgctttctttgcgaagggctctcgctttgtacaggcggatcgcctccgcgagttggtcgggacaggacgtattcgccctgcatttaatgccgcggagagaagtttcgacctcgtcgatactctttccttccacgagtttggaaatgccttgcaggttgccgctgcaaccgccgatgaatttgacgttgtgaattttgttttccccgtccacgtcgaaaatgatctggcgcgagcaggttccttttgtgttgtacgtaaacatttgataccctcgtattttaatctactaaattttcatagatcaccgcatagacgtctgcggccttcaattcccattttttatagatgttctgcgctgttttccggtcgggcacgacgaatttcagttccagcatgggctgcgccggcgctaatatccgtaaaaacacggtgtacgtgccgtctttattctggtagtaatcggatttgcattcctgacggttgcggtatttggcgctgttgttctttacgaacacggcgatctcttcgcgcacgctcttgggaatgttgatatagaaattcgcaaggcaacttcttccgtcgggagtgatggtgtatagcgtatcgtcgttggtctcgaccgtgcagatgaacccgtcttcgagaagttgggatatcatcatgacgcaatccatatagttgatccagtcgttgctggtggcgcacatatccaccagagtcctttccgaaagggcgctttccattttgtcgaagacgaaaaggagtattaatttgttgatggacgtttcgccttgaatctgcatggaatcggctcctttgccgtaaaaaacgtaatgagggactttccgccccgaacggcggacaaaaaatccgctttcagatgccaaaagcggatttgtccgtatcttgtgctaaataagaactttacgcgaactttttgagttcgtcgatgagatcctggcagtcatccgcatgaatttccacaaccaaaggcttggaaaggtcaaggctgaaaataccgaggatggacttggcgtcgacaacatacttgtcgctcttcaaatcgatttcgtaaggatagtcctgcacgatcttcacgaattctttcacgttctgcgccatttggagagaaattttaaccgatttcattgaaatgaacctccgtttttgaattggttctattatacataaaatttccgtgaaaatcaagataatttccgaaaataacttaataaaaatgaaaatttgtgatataatgataatcgattcgggaaaaggtataaaatgtgcacggaaaaaggagtttaacatggatttagaacgacagcagatcgatgtgtttttggaaaaatgcgacgacgtgatgcgctccaaattcatcatcgcggatacgaagatcagcgaactgttgaaatcgatcgcgacctcggatcttttgtacgcctttttcagggagatcacaaaggatttcgattacgcggcggcgcagcgcaagtacatgaattacgcgcccgagggcagcgtaaacaagcggaaacttctttttcccgcagatcctgccgaaaaactcgcctttattttttgccttctcgtcgatttcgacaataagaccttcgacctcggcgaatttttacaggaatatttttacgaggacggcagttattacgagagtttttacgccttttccaatcaggtcgtcaaaccctttaaaaatctgatcaaacagatgttcaaggaatcgcgcctgaaaaagatcgcggaagcggaaccgaaggaccgcccgccgcataaaaaaaacgaggatgtcaccgacgcggtgctttccgagcgggaacagttatttcattcggctctgccggacagttcgaaagtggacggcatgatgatcttgaacgccctcgcgatcgcttcgcaaaaggacggaaaggctttttgcgggcttctggcgggctatcggtattttatcgcgtctacgggttttacgagcgcgttcacggatacgctgttggcggaatatgaaaagatcaaggagagcgaactatgagtttttccgaaacctgcgtcaaaagcaacgtcgtttacaacggaaaaatcgtcaaactgcactgcgacgaggcgtcgctgccgaacggcaaactttgcacccgcgaatatgtggagcacggcggcggttcgtgcgtgctgttcgtaaaagataacaaaattttattggtgcgtcagttccgctatccttacggggaagaactttgggaactgcctgcgggcaaactcaacgcgggcgaagatcccgaaaataccgcgcggcgggagttggaagaggaaacggggtatattcccgaagaactttccctcatgcaggtcatgtatccctcgcccggctacaccaacgaaaaaatttatatctaccgcgccgtgcgcgcaagggcgggcgccgtgcatctggacgaggatgaatttctcaattcttatttcgtgcccgtggaagaggtgcgggagatgatcgcgagaggagagatacgcgacgcgaagacgatcgtcggcgtgcagggttatcttttgagcggcaaataaaaaaactgccacggcgaaaccgtggcagttttatgtttacggcttatttgcaaccgcagccgcatcccccgaagagatgagacagtccgcctttcttgcatacgcaatacaagagcgcgaggatcacgggcaaatagcagctgttgcagatattttcgatgaaagaggtgccgcagcagcagatgatgagtaagataatgagaatccaaaggcaagtgttatcgccgcaaggtccgaaacagttcataaatattttttcctcctgtattcatttacgccgcggcggtatgtaggttataaggtgtaccgcgccgtaaatatcttatactcatatgtatggcgcggcaaagaaaaatgttacaggaaaaataattgtgcggatttcgcgtaaaataagagtggctgaaaaatttataaagtcaattcacttgctatcacgccgcgtttttgttataattgtaggtacttttaacaggatatgcacaaggcaaatacgttcgtgcggtttgaccttgcaaatgcataaatttatttttttttcacagatattcccgtttcgggaaatctgatggaggtcatcatgaaaaagaaggcttttttcacatcccgcaacatcacctttctggcggtcttgctggcactcgtcatcgtattgcagatcttcggcggctatatcaagatcggccccgtgaactttacgctcacgctcgtgcccatcgttctgggcgccgtcatgctcggcccgcttgcagggctgattctcggcttcgcgttcggactggtcacgctgatcaacggcgtcgtcggcaacgacgtgttcaccttttatctcttttcgcagcaacctgtcttcacgacggtcctctgctttgtcaaagcgatcgcggcggggctggctgcaagttacgcgtatcggctcatcgtaaagaaaaatcagtacgcggcggtgtttaccgcggcgatcgtcgcgcccgtcgtgaatacggggctgttcattttgggcggactgatgatgagcggcacgatcgcgggattcatgcagtcggtcggaaataccgcgagcgtcgtgtattttctgttcatcgg

SEQ ID NO: 3597 - DNA, 7362 bp, Unknown
  16S sequences of unknown bacteria
ctttggcgctgtgcgcacttcgtaaaggcgtagacctaaaagaccatgaggccgtaaagcaagcggtcgaggatgccaaagtgaccatcgaggtgggagaggcaggccagaaaacctttttaaacggagaagatgtatccaaagcaatccgtacgccggaagtgggagcgggcgcctctaccataggcgcggtaggatttgtaagagaggtgctgacaaagcaggtacggcgcattgcagctgagttgtctgtcgttgtggatggaagggatgtaggcaccgcgatgctgcccaatgcggatgtgaagttttttctaacggcaaagccggaggagcgtgcggagcgccggcgtaaagagcaggaggctaagggcttgcatgagtcctttgaacaggtgctggccgggatacagaagcgggattatgatgattctcatcgcgcgattgcaccgctcaaacaagcggaggatgcggtggtcatcgattccacatacgatacgccggaggatgtgctggcaaaaatggtttccgtggtggaggaaaagctacaatgacgcctttgtataccgtagcatggcccattgtttgggtgatcctaaagctctttttctttctcagtgtaaagggaaaggagcatatgcccaaaaagggggcagttgtcatttgcgccaatcatgtgcatgcattggacccggtagcccttgccatggttcgctaccgccagattcattttatggcgaaaaaggaattgttccgtaaaaaatccgtcagctggctgctgacggcgctgggtgccttttcagtggatagagagggcaatgatatcaaagccatgcgcaagagcatggaatacctaaagagcggtgaagtgctggggattttcccggagggtacacgaagcaaaacgggccagctttcttttcatgagggtgcagtcacgtttgcgctgcgcacaggcgctgcgcttgtgcctgccggcatggctgtttcattcaaacccttccgccggcatcgtgttgtggtaggagagccgctggatctatccgcttatcagggaaaaaaggcgagcaaggaagacattgcaacggttaaccaaatgttggaggagcgcgtcatggcgttgacggagcaggcgaaacaaaaatgaagctgatacaaggaaaatacaatggattttgttttggcgtgaaaagcgcggtagaggctgtagagacggagctgactcgtaccaaaccggtctatattttgggccctatcatccataatcaaggcgttgtggacaagctggaggcagagggcgcgattacagtggagagtgtaatgcaagtcccggagagcagtacgatggtgatacgcagccatggtgtgccgccggaggtgtatgatcagtgccggcaaagaaacatccgtatcgtagacgcaacctgtccgtttgtggcacgtatacacgatatcgtgcaaaaggcctgccgcgacggttggcaggtagtgattgctgggcagaaagagcatcccgaggtgatagggatcaatggattttgcggcaataaggcctggattgtacagacggcagagcaggcggaggcgctgccaggcgcagagcgcgtctttttggtggcacaaacgacgtttgtacaggaaaaatttgagcagatcgcctttgtgatggctacaaaatatccgtcctttagaaagcagaataccatctgccaggccacccggcagcggcagacagaagcgtatgaattgagccaaaaatgcgatgcgatgatcgtcattggcggccgccacagcagcaacacaaaaaaattggcgcaaatttgtaaaaacaattgtaaaaatacctatattttggaaagtagcgcggagttgcctgttgaaaatctggagttaaatggtataataggtattattgcaggtgcatcgacgccgcaatggtcaatcagggaggtaattgccagaatgaatgaacaagatctcaacaccactgttttagaagaacaggtacccgcagagcaggcgcaagcccagccggaggaagcggttgaagctgtacaggcagaagctgcaccccagacggaagcggaaaagccggcggaggaaccagaacgtgagctcacacccgaagagtctttcgagcgtgatcttgaaaagacgatggtgcgtatccgccccggtcaggtgaaaaagggaaccgtggtgcagatcgtaggagacgatgtttttgtaaacatcggatataaagcggacggcatcattccgcaggccgaattgtcgttggatcccaaagcgacggctgccgacatcgccagcgtaggcgatgagatcacggtagagatcgtaaaggtcaacgatggtgaaggcaatgtgttgctgagccgcaaatccatcgagcgtagagagcaggatagggctgccattgctgagttggaagatggccgctactttgatgttaccatcaagcaggctgttaaggctggtgtgctggccgagtatcgtggcgcccgcgttttcattcctgcttctcagctttccaaccgctatgtggaaaatctggaagagttcgttgggaaaaaggtaaccgttaaggcgctggaagtagataaatcccgccgccgcatcgtcgcttctcgccgtcaggttttgcaagaagaggccatcaaggcgcgtaaggaaaaatataagcagtttgaagcaggccagcatgtcaagggcattgtacgccgcattacggatttcggtgctttcaccgacattggcggtgtagatggattgatccatgtaacggacttgtcctggggccgtccgaaacatccctctgatattgtaagcgttggcgatgaattggagctggagattctttccgtaaatgctgaaaccgagcgcattgcgctgagcttgaaggctttgcagccgaagccgtgggatcatgccgcggaacgctacctggtcggtgacatcgtagagggccgtgtagaccgtattgcaccgttcggcgcatttgtagaactggagccgggcctgtttggtttggttcacatttcccaggttgctacccgccgtatcgataaggtggaagacgaactgcgtgtggatgatgttatcaccgtcaaggttttggatgttgatccggaagcaaagcgcatcagcctgtcccgccgtgcggtgttgcagccggaacgcgagcgcccgcagcgcaaccatgattcctatgatgaggatagggagccgtcttataaactgccgccgattgaagaggcgaaggtcactttggcggatttcttccccaaaatggatgattttgaagactaagactcacgataaaaagcaccggaattccggtgctttttttgtagtcagccaaaacttaggcgttgatcagaaaatccagcacattttcgccggtggatgtctcggaacggtacagctcggtaaacccacagtttgtacaggaaacggtgatgaattttttgttctgtatatcgaataacttggccattgtgccgcccgtggcttggaactgatcgtgctcaaaggatgtacatccgcattttggacattgataaacctgtttttccatgaataaacctccttaatcatgactaagtatatcccttattttgtatcctccctggcaaacagagatttgaccaaagcctcatcaggagtgataaacaatgttttttgtgaagtgtaggtaacaaacccgggctttgcaccggaaggcttccggacatatttgatcaacgtatagtcgatgggaacattttccgaacgccggcctttgctgtaaaaggctgcgatctgcgctgcctgcttcaatgtctcggtgggtacattggaagatttgatgagaacatggctgcccggcattccctgtgcatgtagccatgtatctgtggattttgatagcttaagggtaacaaaatcgttttgcgcgttgtttctgccgcaatacatgtcgatgccgtcggtggaaacaaagtgaagcggttgggactgggccgtctgtctgcggcgccctgcttcctgggataggggaatcagcccttcctcctgcaattcatgccgaatgtccaaaagctgatccaacgtttcggcctgctggacagaaaacagaaccccttccaaatactgacgttccggctcaatttcgcgaatttgcatctctgccgcctgcgaggctgaacgaagcttttgatatcgcttaaagcgtttttgcgcattttcctgggcgctaagagccgggtcataggacaatgtaaccattgtatcctgcgtatagtcgtacaattctattttggcttgatgcggcggaatttggtaggcataggccaagatcagttctccttccgtgcgaacacgctcaaatgtatcgctcttggctagggtatcccgttgaatctgcagccgtttatatagcttctgcagccttgtttgcaacagacttgtcaactgggtacgctgacgcagaatggatttttccaaccgctttgcctcgtaataggccaacatggcggcctgcatactttccataggccgatatttgcttccatcattgggcaaaaatgggaaaaatccctctgcctcctgacaccctcgatacaacaggcaaggcgtaaacgaatgagtaagcagatccttttgaagcgtcagcagaatagatgcaaccgattggcacacatcctctggaaagggggcgtgcagatcggcttcataccctgctttgcggcaaagataccgcgctgcgtaaggggagatgccataaaagcccgagaccagaacatcagataacgtcgtagcttcaggatgatgcagagcggcctccaaactgtcaaaagaagcagataatagatcctgcttatgctgtacaggcggcgcttcgtaacgatctccgggcaaaacggtgcgcagactggaaacggaaggaggaatgcgcttggcacagtccaagattacgccgttgggacccaccaggatcaggttgctatgctttcccatcaattcagcaataagtgttagacgcactctagcgcctagatcgtccagtgcatcacagacaatttgcaagatccggtcgcagcgtggcacgtttatttccacaatgcgggcatgcaccagatgcttacgaagaatcattaaaaatgtaaagggcttttccggccctttttctgctgtctgtatcaaatgcgccctgggggattccggttcacagcttagcaagagacgatggttgtgcccctgtgcacggattgttaagaccacggtttggcgagatggctgtgcgatgcgctctatgcgccctccctgcaaggatcgctgtaattctgaggcgcaagcatataggctgatgccgtctagctgcaaaacaaattcctcctctgtttctatttgcctataagtatagcatttttcctcgcttctgtgtgtttttgctttgccaaaatcaaaacccacgatataatagaacagcaaggaggagaaaaatggaaagattggatggtagaacgccggcgcaattgcgcccggttacaatagaaatgggttttcaaaaaaatgccgcaggcagctgtctggtctcctttggcaataccagggtgatttgtgcggccagcgtagaaaacaatgtaccgccttttttaacagggaaggggaaaggatggctgacggcggagtatgcaatgctgcccgccagcacgcaaagcagaaagcggcgtgatggtgtaaagcaagatgggcgcagtgtggagatccagcggctcattggccgttcgctccgtgctgtcgtggatttggaaaagctgggtgagcgtaccatccgcctggattgcgatgttttggatgcagatgggggaacgcgcacagcctccattaccggcgcctggtgcgcgctggccatggcggtagagggattgaaaaaacaagggctgcttcaggaatctccgattttatcccaggtagcggcagtcagctgcggtgtggtagaggatacgccgattgtggatctttgctatacggaggacagccatgcgcaggtggatatgaactttgtcatgactggccagggacagtttgttgaaatacaaggaacaggagagggcagggcttttaccagagaagaaatgcagcagatgctctgcatgggacaagcggccatagaaacattgttttcacagcaaaaacaggcattggaggcattgtacgaatgaaattactgattgccagcaataataagggaaagctgaaggagattcaacagatactaggcagcttttatcaagagatcgtaacgccaaaggatataggtcttactttagacgtagaggaaaaagggcagacttttttggaaaatgcccggttgaaggcccatgcgttcgcaaaagcagccaaaatggatgccctggcagatgattccggcttgtgtgtcgatgcgttggagggcgcgccaggcgtgtattctgctaggtttgcaggcggccatggggatgatgatgccaacaacgctttgctgctaaaaaagctggaaggagtgccggaagagaagcgcacagcaagattcgtttgctgcgtggtactggcgtcgccagagggcgcagagatctatgcgcagggagaaagcgaaggaattatcctaacagaggcccgtggcgatggaggctttggctatgatccggtattttatgtgccggcgtatgataaaacctatgcagaactttctgcagaggaaaaaaaccagatcagccatagggccagggctttgcagagcctaaaggaaaaacaggtgaagctgcatggctaaaatgtgtatcggtgtgctgtcggatacgcatggaaatcgacgcgcgtttgaacgggccctagaggccatgggggcggtggatctgctgctgcatgcgggggattttgccaatgacgccatcgttatgggaaatatgtatgggattccggtacagactgtagcagggaactgtgatttttttggtacagcagaggaagccaaattgtttgaaatagcggggcataccatcctattggtgcatgggcaccgccagcatgtgaaaagcggtttggaggagctgtacgaggcgggctgtgccaatggcgcagatatatgcatttttggccacacgcattgccatgaaatcgaatggcgcggaaatatggtacttatcaatcccggaagccccagccagccgaggggtagtaagccatcctgcatacgaatgatgctggaagatggaataccgccggatattcagctattgatgctgtaaagcgatgggcgatataaacaaaggcaccttatcaagaaaaaattgggaaaagcggttgacaaaaaggacaggcgtaagtataataaat

SEQ ID NO: 3598 - DNA, 4252 bp, Unknown
  16S sequences of unknown bacteria
cggggcgatttttgcgtcggaaaatcccattttccagagcaaaaatcgtttccttgcagtttccgcgcccgaaaatccgcaggattttagcggaaactggtaggggtggcagtggcggggaagcttgctcccccgccaccaggggctgtgaaaaaaccaaaagttttttcacagccccattgtccctctatactggcggaaacaggtcgaagaagtgctcactgcgccgcttcctctggctgcgcttcgcggcgcgccttgcggcggtaggccaggggcgtcatgccgacggtgcgtttgaacaccttggtgaaatggctctggtcgccaaaccccgtttcctgcgcgatttccgaaagcggcagatctgtagaagtgagcaaatccttgcacttatcgatgcgcagcgtggtgtaaaactgcatgatggtcacgcccattttccgcttgaacaaccggcaaaggtacgtgggcgaaaggtacacgctgcgggcaatgtcctccagcgaagtttttgcgccatagttgagttgcatatattgcacggtgcggtggatgatgtccgcatcgcgcatttcggagaaattgaacgcctcattcatatagcgcttgatggcgctggaaagccacacgcacagcgcgtcgaaatcctggttttcccgcatttccgccatgcagcggtcgttgagcgccagcaccttttccggcgccgcgccctcctcgatggccgtgcgggagatcaataccagcagttcataggcccgcgcctggatggtttgaatgtcgcgcccctgggcgaacatgatgtgccccaacaactcgttgagcaatttttgcgcctgcttttgctcgccccgcgcgagcgcttgcaaaaaggcgcgctccaggcgaaagggatacgccggcgtctcccgctcgcgcttgagttcctgaatgtaggaaacgatttggccctgcatggccgtgctttcctgcgcgccctgcaggcggttcacgtcggacacgttctggatgaatcccgccgccatgaacagcatcgtggcgagcgcgctgatggtgtgtggctctacatagggaattttgcgcacaatgggcaaaatggtctcgatttcggcttgcggcatgcgcatgcattcctgcaaatcataggtaacatagtccatttcgtccaccatgcgaaatgggcccaccgtgatttgcgcctggctgccgttgggccccaaaatgggcgaaacaaagcagttcatgcccatggcgcaggaataaatatagctgccgccaaagcgctccgcctcgcgcatgccatacagctgcgtttgcatgcacacgcccgcttcgcgcgcgctggccgcgcacaattcgcactgcgtgcatccatagccctgggcgaagagcagctgcccttgggcgtcggtcacggtgcagccaatgcccgccgctgtgcaaaacgcgctggcgcattcgcgaagcaatttttcatcgatggtatcgctcatggcttgttctccgcacgcggcgctcaacgttccgccgcgccgtcttcgggctgcaaatgctgttcataatgcgcgcgcaaccgggcaaagctttcctcgctcaaatcgtgttccagcttacaggcgtcttcctgggccacttgcgtgtccacgcccagggcgatcagatattttgtcaaaagttggtggcgttcatagatgcgcgcggcaattttcttgcccgcctccgtgagcgtgatgtatccttccgcgtccatcacgatatagccgttttcccgaaaatgtttcatcgcaacgctcacgctcggcttggagaagcccagttccgtggccacatcgatggagcgcacggctcccttgcgcttttccagcatcaaaatggtttctagataattctcgcccgattcgtaaatcttcatggcgcacctcctttttggcaagctgcccgccgcaatgctttgttccattcgccggccctcagggcacaatggcgactttcatcgcgccgtcccggcggttttcaaaacaatcgtatgccgcggcgatctcctgcagcggataggtatgcgtgatcagcggcgtggtatccaggcggccggcggcgatttcagccagaatggcgtcgcaatcgcacccgtccaccccgccggttttgaaggtgaggtttttgccatacatcgccggcagcggcaaaatctgcggccggtcgtacatggccaccaccgttaccgtggcgttgggccgggcgcatttccacgccagatcgaaactgccctctgtgccggccacttccagcaccgcatccgcgccgccgtgggcgctgtgcgcgcgcacaaattcttccgcctcttccggggcgcaaaccaacgcctgtggataccagcgagccgcaaaggcccggcgttgcgcgtccttttcgcacacgatcacgcgcgtcggggatttcagcagcgcgcaagacagcgcgcacaggccggtggggcccgcgccgatcaccagcaccgtatcgcccgcggcaatctgcgaaatccgcgcggcccagtagcccgtggccaaaatatcgcccacaaagagggcctgcgcgtcgctcacgcttgcgggaatgcgattgagcccctgattggccagcggcacgcgcacatacggcgcctggcctccgtcgatccggcaacccagcgcccagccgcccaggggatgcgtgcaattgttcacaaagccattttggcaaaaaaagcattcgccgcaaaacgtttccacattgacggcaacgcggtcgcctacccgcactttggtgaccgccgggccggtttcctccaccacgcccaccatttcatggcccaccgtaacgcccggcacggccctgggcacgctgccttggcgaatgtgcaggtcgctggcgcagatgcttgccaacgtcacccgcacgatcgcgtcttgcgcatccaaaatgcgcggcataggcttttcgatgagagtgaaccgtccccgttccacatacgtataggcaagcaccatttttcccacctttccgatttgcgttttcattatagcacgttaacaagtccctgtcacggcctcaaaagcgaacatatttcaaacaaaatgttatatttcgcgcgattgacgggcgcttgggctgtcccggcaaaatttggggattgcgcgtcccttggcatgcgcggtatactagaaagtggaaaacgaggggccttgacacgggaaaggagcgtcgcatcggaatgagggattggagcgaatgggttggcgcggccgcgccgggcgcgccgctggtatttttgttggcgggcgaacccgaggggctggttgcgcccttgcgcgcggcgctggaacccgccgtcgcgcaaggaacgtgtcccgcttttttgctggcggggctgtcgcccgtggattgggaccgggactattcgccctggccggcccagggaagccagggacgcgcctttgcgggcgaagcgcgcgcgctgctgccgcgcgtgcgggaaaccattgcgcggttgcaggcgcggcatgccctgggagaggcgatctaccccgtgggctattcgctgggcgggctggccgcgctgtatttccattgcgaagccgggttttccggctgcggcagttgttccgggtcgctgtggtatcccggttggttggagtatctagaggcgcgcgcgccgggcggcaaaatctatctcagcctgggcggcaaggaaaagaacgcgcgcgatcccctgatgcgcaccgtggaagaggccacttgccaaacgaaagcgctgctgtccgcttccgcgcgctgcacctttgtacacgagccgggcgggcattttcgcgatgtgccgcagcggcttgcccgggccattgcttggctgcttggcgcataaatttggacaaattggtggacgggggctgagaaaaaaccacaagaattctttcacagcttctgatcgcgaataaatccggtcgccatcttcaaaaatgaaggaatgaattttgtttccggcatttttgattttcggcaacaaagcgtgtaatgcgcaaaacaacccctcaggcagcttcgctgccagctcccctttgccaaaggggagccttttgggcgctgccgcgccgcatggaggcgtactatcaaaggggctgtgaaaaaaaggagcaataaaaaaagaggatttggcgccgaagagaggcgctaaatccccagaccactgacaaagcccgtttcaagaagtggaagacgggctataagcctgagc

SEQ ID NO: 3599 - DNA, 2578 bp, Unknown
  16S sequences of unknown bacteria
actatcggcgaaagggtcttctttgattttggctaaccgccggatttataccaaaattatacttctcttgacagccgaatttttagcctatatttttgcaccgtcaccagttttgtttagctgaaactgtaagttcggttcgatataggctaaccgcggattgtcgcttgtttgtgcgttgacatttagcgaacgtgtgatttcgtgcagcttgtttcgcgatttttaattcatcaatagccataaagaaccgcgaaaaacggacgaactgtatccaaagccgtacaatacgtagacggcgagcagggtctaggcggtccctgcgagctcactccactacttctgatgtcgaggatatctccaccacgcgcgcaagcccagtgcacccctgaagctgactccctcccttagattcaccatataaatcctacccaattttgaagttctttgctcagctttctttcaagaaagcgcgttccccgttccccgttcccctgtagtagcttacgcaactacctcaatacatcaaaatactctttcaatgcttctgctgtccggcgttctctttcgcttatcatgtattcgacggagtctcggagtgcttgccagcttgcgtttattacgtcgcccgatactcctactgtgcgccagactgagactccgtccgttgattcaatcgctactcttacctgggatgcagtagcttttgagtcgagcactcgtacgcggtagtccgacagcttcatcctgcctacctcggggtagaacgacatcagagcgcggcgcagtgcttcgtcaagggcgtttacgggtccgtttccttcgcctgccgtaagctcatcctgcccgcctaccgatatctttatcacagcagacgagtgcagctcttcttctccgtccagcatctcgtccgtcatcactttaagacttttcagcgtgaaataatcgtcccttatcccgaacgcacggtcgataagaagcgcaaacgatgctcccgcgtcctcgtagtcgtagcctctgctctcccgctccttcagctccgccatcagccttataagccgcgggtcttcttttgtgatgttcgcgtattcgcccgggagataccgccgcagcttgtcgagaagcgcagccctgcccgacagcccgcttattactatgttccgcctgtttcctactgcgtccggcgaaatgtgctcgaacgacgcgggatatttgcgaactccgtctatgtgcgcgcctgccttgtgagtgaacgcgtagcctcccacaaacggcgatttttcgtcaaacgcaagattcgcggcgtcggaaatgcttctcgcggctctcgtcaagttcttaatccgctcccctatgcacttcacgccgagcttcagctggagtacgggaatgacagtgcaaaggtcggcgttgccgcatctctcgcccactcccatgacagtgccgtgaatctgcaccgcgccctcgattacagccgagacggtacacgccgccgccatgcccatgtcgttgtggcaatgcactccgatcctgccgccgaaacgcttcaccatagcggacgttaccattcccactacatcggggagcgcgccgccgtttgtatcgcaaagcactgctgtttcagctcccgcgtcgagtgcggtttctacggttttcgcggcgtagtcggggtcttcggaatagccgtcgaagaaatgctccgcgtcaaaaatgacctctttgccggagcttttgaggaaggctatactgtcgcgtatcatacggaggttttcttcccgcgagacaccgaggacttcggcgacgtgtacggttgaggcttttccgtagattacggcggcggggagatgagtttcggcggacatagtgaggtgcgggtcattttctggggcttctccggctttcacggtacggcagaacacgcagagcttcgcgttatcaaggtgcattttctcgagctgtgcgaaaaattccgcgtcctgcggtgaggttatcattccggcttcaatatatgatacgccaagggaatcaagctcgtgaatgacgcggagtttatcgtcggtggagaactccacgcccgctccctgtgcgccgtcacgcagagttgtgtcgaggatttgtaaaaacatagcggtatttctttatgattctcaaatattttttgtcttcgtttatctgaattttttctttgttgctgtcaaaatttcggtttaggttaatttttttgaaagattcaagaaagagcgcaacaattttcttttccttagactacgggcgtattctaagagactccactggaatgaggattcactttattccaagtgaagaagaaagtagaaaggacttcgccctttcagattaattaaatctcactgcggtgaggggctgctcctacgcggagggcgcacaaggagactcagatgccgtctcattgtgaatctacgctcgcggtggagtatggttgatatgattcacttttggtgtcgcccccatcaacagttcagtcgcgcggttttgcataagccttagtagtggcattagaatgttcgcgcgggggagtttgacgcggggaattcagctt

SEQ ID NO: 3600 - DNA, 5989 bp, Unknown
  16S sequences of unknown bacteria
gggagcctgtcacggagctttgcggagttctcgtgccccgttaaaccaagctcgtagaagtcccctttcgttatcggcatttccgaggaaatattctctggtgagctttctgtaatttcgcccgaaatctcgaatagctccggatgtgccgacgcaaatttctcgaatatcccgcagagaatgccgtcctccactccctcaacgccaacgtacccggctttcgagggcgtttgctttctcttttcctttcccggaatctgcggaatgtataagtcatatacctttatcccgccgagcattccgcgcagtgaagagcgtattatctgcccgccgccgtcgctgtcgcagagcattatcactccgttcttgccgagagttcttatcagagcgcgcttttcggcatttttgaatatcccgaagccgtcggtcgtcagaattaccccgtcaattacgttcgagagctttgccttgtcgtatctcccctcgactattatcggtatctttactttcattttcatccttcttgtcctcgtcctcttcgggttctacaaacatagcgggagacagacgcgcgataagcagctcaatctctccgtacccgcggttccccatcgtcttcatgttgcggtcagctgtcagacatagatccactgcgttcatgaaatatgcgtagctggcactcttcgccgaacggtacatcgactccgcacggtacgggtgcattttcatagccttcgcatagtccgatgaatcacgtccgtccgagatgaataacgccgccgccgcaagatccgtgaacgtcttcgctatctgcccgagcagcatgtacggatcctgcctcagccttatcttcacgccgagtattgcgtatgcttcggaggtgtttccggcggtgagcgcgtttgcaagcccgaatgcgtcgtcctcgtccacccgcgagcagcacagcatgcactcctgcactcctatttcgcttatcccgttctgggcgcagtaggctgataccttgccgatttctcccgacagagtgtacatactcctgccgcatgtgcgcatcatgtagtctcctgccgcgggggatagctttactccgtagtctgcggcgtgtctcgagagccatgaaaacagcttcgacggctccttatagtcaaaacgaacgcacttcgcaaacttttccatagccttcagccgcgcgctcggagtctttacattgccgtagtcgaacccgccgcacgacgctttcactatgaccgccatactgccctcgtccgcgtgagcagacagaagctcgttcagcgcgtcctttacttttatagaatcaaaagaggaaaaggatactacaatgagcttcagcggggacatcataggaggggcggagagcgcgttttctatctcgtcaaggcggcactcaccctcgccgtagtcaagccgtatcagattgaacgacgccatggggtccgaactcacaaatttctcgcaggcatcgcggatgtagtgatttttgaggtagtcctcgtcgccgtagaggaagtatattcccgataaggtcagcgagcgcacctccttcgcaaattccgcttctgtcatatcgttatcctttcattttgaagttaatatattttaataaccagttaataaagttgatgtatgattgctttgtaataataaatcctgaaattcctgcatataggaggaaaaaccatgccaaacgtaatggattatcttaaatggagaggggatttgtcctttaaagccgctccgttctgtgaggtcgacaacataatcctgtccatgctttcgttcatcgactattcgtcagccgtgtcggattcggtgtacgccatgcccgtgcgacttgacaaatgcttcgacgagaaccgcataaagtacccgaacggggagagattcggtcagataatacccgacaccacaaacgacctctttattgctgccgcccgctctccgagattccgtgaagtgtacgttgcggcatatcgcgccaaaatcgaggaggaggagtgtcttcagttcgcggcggtgacgttcattctccccgacgacagtatatactgcgcattccgcggaacggacgacacgcttgtgggatggagggaggattttaatctcagcttcactcatcccgtccgcgcacaggctttagcagaggagtatcttcgcgaagtcgcctcggtatatcgcggaaaaatacgcacgggaggtcactccaaaggcggaaacctcgcggtgtattcggcggttttcgtaccgaaggagattcgcgacagagtgatacgcgtctacagcaacgacggtccgggctttgtggaggaagtggtaaactcccccgaattcaaggaaatggacgacagaatcatcacaatagtgccgcagtcgtctgttgtgggaatgctcctgtgccgcggaagccatcttgaggtggtcgaaagcacggtgagaaacggacttatgcagcacgacccgttcacatggcaggtaatgggcaaggagtttgtgcatcttcacgcgatgtcccacacgggaaagaagcacgacgaggtgttccgtgagtggctcggcaagctcgacgcggagaagaggaaggagttcacggacatattcttcggcgtactcgagtcaacgggagcgaaaacagtgtccgacctgtcgcaggatcagctgccgaagctgctcgcagcaacgagaactctcggttcgctcggaaaagaggagagggacgtcctgactgaattcacaagaggactgttcgacgcgataaagaagcagggatgagataattatagcataatcgcgccttttccgcaagacttaacaattttgcagaaagagcgcagcaattttcttttcctcagactatttgcgatttctaagagactgaattttgagaaactgcatggagattcaagtttggtctttgaatttcgtgcagtgaaatggctggataggacacggtatacgtcagctttggaatgagcttcaccgtcgtgcttttatactttagtccaaagggaagtttgccgcgagggcgcggagtagtagagaaccatgcttccgcacctgcgcattaagttaaacgaaatcgtaaggcagttggcgcagccttcctgaaacttaggaattcagtcaacctgtgattcagtaagccgtagcttagttaagacattaaactaaacgaaatcggacgttcgctccccgtcagcgcacaaaacaaacgacaatccgcggttagcctgctcaaattcagttataatttggtattctcgactatgcgcgatagagaaagctgtgatttgtacgaacaccccgcgtctacctcaaccgcgcgaacatgctaatgccactactaaggcttatgcgatgccgcgcgactgagctgttaatgggggcgacaccaaaagaatcccatttcaaccgaactccaccgcgagccggtactcgcagagggatctgaacctctctgcgtgccctctgcaaagagcgccccacgcgaagtggaataattaatctgaaagacgcaagtctttcttctatctctctcactcgaagtgaggaaaaaacaatatttgataataaaaaagaaaaaataatgttagtttgacaatccccctcttccgtgatataatggaagaaaatctatattttaaggaaatattttataaggaaaatataatgaaaactaaatcccatgttgacccgcgtatcggtatcgtcggcggtcaggcagtcctcgaaggagttatgatgaaatccggagaaaaatgctccctcgccgtcagaactcccgacggaaaaatcgccgtcgataactctaccttcacctccctcagaaaaaaacataaattcttcgcactcccactcatccgcggtatcgtctcgttcgtcgaacagcttaaactgtccatggatatgctcacaaaatccgcggaaatgcagggaattgataccgaacagcccgaaactaagtttgaaaaatggctctgcaataagttcggcgataagctcatgtccgtcgtcacaggtatcggcatggtcctcggactggctatcggcgtagtcatgttcctcatgcttcccactttcgcagcaaaaggtctagactttctctccggcgggtttatcggtacaagccacttcctccgcgctcttgtcgagggacttatcagaataggagtcttcgtcggctatatcgccctcacttccctcatgcccgatatgcgcagaacctacgagtaccacggcgcggagcataaatctgtagcctgcttcgagaaaggtcttccgctcacccccgaaaacgccgctgcctgcaccagattccaccccagatgcggcacaagcttcatgttcgttatgcttattatttccattattgtaaattcgttccttacttgggataacgtctggctccgcttcggtctgaagatactcaccatccccgtcatcgtaggtctcggcttcgagtttatccgctacgccggcagccttcgtcaaaatcctctccgcgcccggtctttggatgcagagaatcaccacaagagaacccgacctcactcagctcgaagtcgcactggaagctctcgaaaacgcaatccccgaggaattcagcgagcaccacgatatagagacggaataattatacaaatccaatgaatctttatgacgcagaaaaaatcctctccgacgcagggatagacgacgctgaatttgaatgccgactcctcgccgagagatttctccgtatccccatgtcccgctccgcttatatgaaaacgggacagcttgattacatgcctgattttggcgagttccgacgcgcattggagaagagagcaacacgttatccactccagtatatcataggcgagtgggagttctacggactgagaatgaaagtgaacgaaaactgccttatcccccgtcccgataccgagcttgtagccgaaaaagcgatagttgagcttcaaaaaatgccgaaaaagactgaattccgctgcgtagacctatgtacaggctcgggatgcatagccgccgcagttatgagtcacgtgaaaaacgcaagcttcaccctcgtcgatatctcaaaatccgcgctcgatatcgcaaaagaaaacatggagctgaacggacttttaactagaactaccctcgtagaagcggacgtgatgacggaaattttccatagcgagaagttcgacctcgtaaccgcaaatcccccgtatattccgagcgaagtcatgcaaaccctcgagccggagcttgaacacgagccgcgaatagcactgaccgacgaaggagacggactgagcttctaccgcgctattataaatctgtataaatatgcactcacagaagacggcgtaatagtcctcgagcacggctacgaccagtacgaaaaagttcgcgaaatagcagaggaaaacggcatgagcgcggaagtgatactcgactacggtaaaagacagcgcggcgcagtcctgaaaaacgtgcggtaagagttgcggttttggctaaattttggctttaacttgtagcgattgcgggaagattcaagtttggcttgcggatttcgtgcagtgaaatggctggataggacacggtttacgtcagctggagctttagcttgaacctcgtgctcttgaactttagtcaaaagggaagcttgccgcgagggcgcggagtagtagagaaccatgcttccgcacctgcgcgtattgtttggcgaaacttaaagtctgtcggcgcagctttcctgaagtcgaagaattttgtcaacctgtgataacgtcggacttagcttagttaagatatgaaactaaacgaaattggacgttagcttcccgtcaacggaaaaactaacaataaccccccgcaactgaacgaaattggacgttcgcaaaatgtcaacgcacagattaacgacaatccgcggttagcctactccaattcagttataatttggtattctcgacta

SEQ ID NO: 3601 - DNA, 32759 bp, Unknown
  16S sequences of unknown bacteria
attatacgcccgccgcaatgcgccaaatctcatgacgccgaggctcggagctcctgagtgccggaagcacttttacttctttatatcaaaaccgtcttttttatcgagaacagtccagcccaaatcggaaatcttcttgcgcagttcgtccgcgagagcgaagtttttcgcctttttggcttcccatctcttgtttgcaagttccacaatttcatcgggaatttcaacgggcgtttcctgtgtttcagcctcaatttccgacaagtcgatgccaagcgcgtacatcagcccgccaaatgcgctcaagttttcttgggagtcgccaagctttccgagagaggcgaatatttcgccgattgcctttggaacgttgatgtcgtcgcagagcgccgcccaggctccttcaaaagccgtcccttcaaacttggcagagggctttacgagctttttgaagtccgacattttaaacccgagcttttcgagagctgattttagcgatttcgagagtttcgcaagcgcgctctttgcgtcgtcgagccctttgaaggtaaagttgagctgctggcggtagtgcccggatatcagcgcgtatcttatctgttgcgccgtatagcctttggcggcaaggtcgtcaaatgtgtacaggttgccgaggctctttgacattttcgccccctcgaccattaggtgcgcgctgtgaaaccaatattttacgtacggtttgcagcccgtggagcattcgctttgggctatttcgttttcatggtgcggaaagcataggtcgataccgcctccgtggagttcgaaggaaggcccgaggtattttgtcgacatcgccgagcattcgatatgccagcccgggcgcccctcgccccaaggggacttccaaaaattctcgccgtcctccggcttgcggctcttccaaagggcgaaatccgagacgttctccctttcgtattcgtccgcgaggtttacgtcgcccgcagagtttacgctttgcgttgcgagattttcgcggtcgagccccgataatttcccgtattcggggtcggacgaaatcttaaagtaaacgctaccgtcgcccgcaacgtaggcgtgcccgttgtcaacgagctttgagaccatttcgagctgctctttaatatgttcggtcgcctttggttccactgtcgggggcaacatattcaggcgctcgcagtcggcgtggaacttgtccgtccatttcaatgtgaactccgagaggctgacgccaagtttgcggctttcgcgtatggtcttgtcgtcaacgtcggttatgttgcggacgtgctttacttttaggcccgaacattcgagaaccctgcgcaggacgtcttgcgcgaggaacgtcctgaaattgccgatgtgcgcaggcccgtataccgtcgggccgcagcagtacattccaaaaacttttccggacggttcgagaacgtcttttctccttgtcagcgtattataaatgctcggtttcatttttgttgagattttttttagactgacgcaatatcaaaacacaatggaagaaaaattcaagctcgatatgcccaaaaggccaagaagactccgcaaaggcgcgtctatgttgtcgctttgcgcggaaaacagactcgatccggcggatatgattctgcccgtatttattatggagggcaaaaacggatccgtcaaaatcccgtcgatgccgggagtttcgcgccatacgatagactccctcttgaagctttgcgagaaatcgctcaaatgcggagtgcgcgcaattgcgccttttccgctcgtagatcccgcgcgaaagacaccgcgcgcggacgaggccgtcaacccgaagtctcttgcaaaccgcgcgattgccgccgtcaaaaaacgctttccggaaatggttgttgtggcagacattgcgctcgacccgtacacttcgcacggccacgacggtattctcgattcttccgggaaatggattctaaacgacgaaacagttgaagtgctcgcgggaatggccgctttggcggcgcaggcgggcgccgatttcgtagcgccctccgacatgatggacgggcgcattggcgcgatacgctcgacgctcgacgaatgcgactttacagaaacagcaataatggcttacagcgcaaaatacgcctcagcctgctacggtcctttccgcgacgccataggctccgcgccaaagtccgccggaggtgcaaaaaaggcgtatctcgacaagcggggctaccagctaaaccccgcaaattgctccgaggctctccgcgaggccgatttggacgaagaggagggtgccgacgtaataatggtaaaacccgccggcacatacctcgatatcgtagcaaagattaaggcgcgcacgaatctgccggttgcggcataccaagtatccggagagtattctatgattcaggcggccgcgttgaaggggtggattgacctcgaacgcgcaagggacgaatcattgctctgcataaaacgcgcgggcgccgatataattctaacatactttgcgctcgacattgcccaaggtcgataaggggcggtttttataaaaatatgcgtttgccgcgcaaaaaccggcaaacgctttttattgtttgcgcgcattgcgggtagggacgtttcaaagaatttcagcagataattatgccggcaaaaaaaaacttgaccgtcaaaatctcataataaacaatatagaaaatgaatatgaagaaatttatattgccaattttttgccttgcggcaggatctgtgcttgcgaatgtaggatacatttacaaaggttccggcgcgttggacgacgcgtcttcgtggtatctgataacttcgggaagcataggcaattgcaattatgctccactatatcccgaagattataccggagaatacactacaaagggagacgctggcaactacggcgtgtatacccaagcaacgactgcgccaaccgcatctgacactgtcggatttatccgttatgaagtcggcgtgattggcgaaaattcgtcggaaataacgttttcgggtgaaacaaaagactacggtgatgtggttttcggttcgagctactcggtcggaaatatttattcgagatcttatatgacgaggcgcctcgtgttgggtagcgaaaatgccactgaaagcgagtttgtgcttaaagtcacgggaaacctaaatatgttctattcaggcaaccatagtattgtaatatccgattcggctgaccagacctcttttaaaattgatgtcggcgggcagctcatgtcccagggtgtaacaaacggcgcgattggcgcacaaggcgcgtacatagacgaggttaaagccaagtctttcgcaatgaccgggactgctgctcagactttaaatatgtatgtaaagtcgatggtaattgcagaatccgccgaattgggcataggcgacgttatactgcatatatgcgagcttgaccccgactcggcgctatttgatatcggcggaaaattctccaaaaacgcagagaaaaaagtgacgctcgacttctccgaattggaactctcctcaatagcttccggaacctacgatataatttcggcgggctctcttgaaggattctccgaggacggaacaattgcagacgattttgtagtttcgggattggacgatgaaaacttctcgctcgcgtggaatggcaacaacttgcagatggtcgtagtccccgagccggcggcgatggcctttgcaataggcgcagtttgccttattcttgccggattgcgccgcaagtttcgcagatagttttgcgcgataatttttttatccttttaccataaagctgcgggtagccgcggctttttttatttccttttctcggcgcattggggttttgcttcgagatgttaaattggggaaaaatgtccgcttgcaataaaatgccggtagagccgctcgtctaaaagtccgcctccgtttttgccgcttttaatgattgagaaatatcgattctcatacgttaaaaaaaaggcaaaaaaaagttgcattgcatgattctatgtgagaaattcacaaaaacatggaattgtcatcgtacatatcggtattcgttcagataataactgcactcgcgatgggaattgcgattgtcgcggcaagccagatttttgggcagagggcaaaggcaaataaacccgcaaattccgcctacgaatgcggagtcgtccccgaaggacagccccacccgcgcttcggcgcaagattctatgttgtggcgatgctttttgtgattttcgacattgaggtcgtctttcttatcccgcttgcggtcgcctacggggattttgtttccaacaatttcccgattctgctcccgacccttttctttatagcggttctcgcaacaggcgtactttacgagatgaaaaaagacgctttaaattggaatatcccaaagagcaattagcgtaatgaatttaaagcgctacctatcgaaatcgaggattgtagatgtgtcggccacggatttttccgaggcggtcggccagcttttggaatgcataccggattccattctcggaggggcggagcgcaaagatgtggttgaaaacctaatcgagagggaaagatcgatatcaacctaccttgggcacggaatatgcatgccgcacacgcgagttcccggcttgaagcaaaaatacgtattcgcagccggcaaatgcactgaggacggcataaacttcgacggcttggaggactataagcagacgcgtatactttttctgatgctctcggacgaaaaggtggacaattatctcagcgtgctctcaaatctcgccaaaatattttctgccgacgtctgcgcaaaaataaaggcgaccgccgatctgcccgaatttaaagacgccgtgatgggggcgttcaacggcggaaaatcaaaatccgcggcaaaatctgaaaacaagcgcaagccgatgcgcaatgaagagcgcctaaacgatatgattatgcgctccgcatttaaaatttccaaggcggcaaaatgctcggcgataattctgttgggcgactcgttctcggaaatgccggacatatcctcggttttcggcgattcaaaagttgtgattgtaagcgaaaaaccgcctgtatcaatgcctcctaagtgcgaatttataagtgtgaggtcgttttcagacgtgaggttttcacagctgcgaagcgcagttatgatagggcttgcgcgcggaactttcggggtgaaagaaaaaatttgctgcctcggcggagtgcgcgatagcaatctgattgatacgattgttatgctcgatatcggcaaagagttttccaacgtgttcatcgggcaaaaaaatatgcttccggaaggtgtcacccccgaagtgctcgaacgcgttttggatatagcaacggaactttcagtcgaggggcgcgagggcaagccggttggctgcatatttgttatcggttcggccgaggagttaaagccgcatctcaagcagctgattttaaacccgttttacgggtacaaacctgaggatagaaatgtcttgaatccttttatggacgagactgtgaaggaatattcgctgatagacggcgcatttataatagactcttctggggttcttgaagccgccggcgcactaatccacacccccgattttaaacttcagcttccgggcggattgggagcgcgccacgccgcagcttactcgatttccctcatggccgactgcatatccatcgtagtgtcgtcgagcactggtcagataacgctttttagaaaaggacaaatgcttccgattacggaaaaacgcaagtagcgcgttgagcgggtcgggggaaaatataaattacctatgttaaaatattttgaatggtcgatagggataatgattgtggggctgggcctcgcattttaccgcggagaatgcgtgggggcggggctcgggtggagctttatgtttacggctctcgtgattacagccctcgaagtgagtctgtcttttgacaatgccgtcataaacgccacaaagcttgaaaaaatgtcccacaaatggcgcatgcgctttttgacctggggcatagcgattgcggttttcggaatgcgctttgtattcccgattgtgatagtcgcgatattctcaaacatatcgtgcatggaggtcttgcgcctcactctcgaaaagcccgacgactacgccaaattgcttcatgagtcgcacgtgggaatctcctcgttcggcggggcgtttttgatgatgctgttttgcgagttcatgtttgacagggaaaaatccctccactggctctcgatgccggaaaagctcttgcaaaaaatcggcagaagcaggctcgcgccgaccgtccttacgctcgcggcgctcggggcgatacagcctatgctccctggggggcagcactgggtttcgattatcgcaggggtagtcggcattgtggcgcatttgctaatacacggggtgagctcgaagctcgaatcgctcgcgaagcaggagaacgcgtttgcattaaagcatgcggggcttgcggcatttatttatctcgagctcatagacgcgtcgttttcgctcgacggcgtgctgggggcgttcgcgcttacgaaggacgttgtggtgataacgattggccttgcggtgggcgcattttttgtgaggtcgcttacgattatgctcgtcgagaaaaagactcttgaaaagctcgtgtaccttacgcacggggcatattgggcgataggttcgctcgcgactataatgcttattgcgacttttatggaagtcccggaaattgtcacaggctctattggaatggcgtttatcttggcttctttggtgtcgtcgatattcgagaggaagcgcgcttagtttttgaggaaggcaatatagcttccgttttttgccgcgcgatatttttaaattgcgccttgaattttctcaatacgcctatttttagcaaaattttggggcgtgagctgaatgtttttctccgcttatagatgaattgcaatgatgtgtgccgcggcaaatagaataattttcccgtatttttatatagttctccactcgcgcgtggaggtatcgcggaagaaattttttctctattacatcttacaatctaatttcttccgaatgccgctaagcaaactgtcaaataaaattcaattccgaagcttggaatgcgtaaaaattttcccgcccaaatacaggctcgcccgacggcataaaatgtttttttatagccaagctgctgccgcataaaacttttacggctactcttattttattcgcctaccgggacaaaataataaaattttaattttctaaggtaaaaaacttgcgagcttgccgcatgcagggtgtgcgcaaagagaattggcgctattgcgcgcgcgcaaaaatcttttttttgtgccgaactatcgtgtccgccgcacgaatttaaaaattttttacagggcgtggtatttgcccgtaagtttatccttttcgagaatcttgaagcctgccttttttatgcgcgttgtgtctgatagagatttctcctttcccggggtgtactctatgtttatgttgggagcctcgaacaccctttttacgggctttccgttttcagggtgttttgttattgggtccgaatttgcagactgctcgacttcaaagacgtcgccttcggagccgtcgggttctatcgtaatatacttgtatattggcattgctatgaaaatagttttacgacaagcagcgccgcgtatatgaaaaccgacgctatcgccctcgttataaacataaatatcgacgcggtaaacggaatgtttaccaataaaagcaatattagtattccgtacctcgaaattgcgtaataggtatgctcgctcatatcgacggcgtattttaggaagcggctgccgtcgagcggcggtatgggaatcatatttattacaaagagaacgcagtttatgtacacagattgaagcgcgacttcctgcatattttcccagcctaagagtaggaacgccgcaagcagcatcgccgacacgaacgccactaccagattcatcgcgacgcctcccgctgtggcgataatgtctattcttttgcgcgtctttgggtttgagagggaaatttctacgggtttgccccagccgaataccattggaaaccccgtccccatggacagggcgatggttattataggcaggacgaccgtcccgatagtgtccatatgcgcgagggggtttattgtcaccctgtcttgcaggcgtggaagcggatcgccaagcttatcggcgaaaaatgcgtgcccaaattcgtgcatagtcacggcgattagcagcagtatgtagagtatgccgccctctcttatctggcttaaaatgtcggggttcatcgttaaaggctattttgattctgattgggttttattttttgcgtcgctttcgattacacctaaaagctttgccttatcttcggccaaatgctcgtttactacttttgcaagtatttctctggcttggtcgtcgcgcctaagttctattaggactctcgctttgtttgcgagggcggtctgcctttcaagctcgagggcggaattttttataatgtcctcccagcgcgagagcgcctcttcccaatcggggtgcgagacgctgtaaaaggcttttgcgcactcccattttgcctgggagttcggcgcggaggagtccgcccacttccggtagcattcgagcatttttttgtcgagttgcgcaatgtcgaattttccggacgcggcgagctccgtgcgcgcaaccatcaggaatttcgctgtttgggatatgtaaacgttgttttcaggctcgagttttagagcatcgagaaaatgtgcgtacgcctccggaaattgtccgttttcgctctcatataccgcgagctggtgcttcactgaggcgagtgtcgggtccagcgcgtctgccgcgagaaacgccttgtaggcggcggtcgaatttgatgtttcgcgcaggtatttcccgtagattgcgaaactttcggcgtcgcgcttctcgcctgtgaagtattcgttccatagggagtctatgcgtctcttttccgacaggaggtcggaatttttcattacggataggcttttggtgccccttattttttcgaggaacctgttttgcgcggcgactatttcaaggagctttttttgcgaaagcgtataggtttgcgacgtcgccggcgcgcgcgggatttttgcgccgctttcgcttccggcgcagccgcagagcagggcggaagcaaacgccgccgccgcaaagagttttgcaaattttacgccgtttaaagtcattttgttcaatggctgtgcccgcagtggcaatgtccgcagcacccgtggtgcgcccctgagacgcatgcgcagcttttggcgcgcggcttgcgggctgttcccacgccgaagaccgacacgagttttttcagccgttttgagccgcactccgggcatgcgggcttttcgtttccgcgcaccagcgcctcgaaaacggcagagcactttgagcatttgtattcgtatatgggcatatcgttaatataagattaaaatgttgaatgtttggcgattctttttttattttagaatatatttaaggttaaatcggcaatataacttcaatggcaaaatcggaaaaaaaatctgataagcagactccaatgatggaacagtattggagccttaaaaactccctgccgaaagacactctgcttcttttcaggctcggagacttttacgagatgttttacgatgacgccatcgaaggctcgcgcctgctgggcattaccctcacgaagcgccaaaattatcccatggccgggataccgtaccatgtaatagaccagtatcttccaaaaattctcgcatgcaacaagaaggttgccatatgcgagcaaaatgagccgccagtggcaggcaaattggtaaagcgttccgtgacccgcataattacccccggaaccgtcatggaggaagcccagctcgacagccgccgcggaaattacatttttgcgctcgacatagacaaatcccgcaagttgtacgccgcatggatggagattagcgccggagagttctattgcgccgaattcgactccccgcaagatttcctgcccgtgctgtccgctttcgacgccaaggaaattctccttccggagcaggcgtcccgcgagtggcccgcggatccggccctcgcggcgtggaacgcgatttttaggagcgttctcgacacccgcacggtcactttgctgcacgacttccgctttgagcctgattggggcgcggcacaggtgaaggaagctctgtcggtagctggccttgaggggttcggaatagagcgaggctcgcgcctggcgggccccgcgggcgcaatagtcttttatgtgaccgaaaacctccgcgcccgccccggtaatttgagaaccctgcgcaaattctccggaaaaaaatgcgtgcttatcgaccccgcaacccagcggaatcttgagatattccgctccacatcgaattcgcgcgagggcagcctgatttccgttatggacgggacgaaaaccgcagccggcgcaaggctcttggagacatttctcgcggcgccaacgctcgacttggaggaaatttccgcgcggcaggacaccgtatgggagctttattccgcccgcgaagaatccgcagccctcgcggattcgctttcccaaataagggacattccgcgaatacttggaaggcttcaaaaccgcatacgcaacccgcgcgagctgcgcgcaattctcgaaacagtccgccagataccgtcgatacgcggcgcgcttcgcgaggtcggagggcgtaggtgttcggaaatggcggaatctctgcccgacctttcagagcttgaagcgtacctcgaatcggcgctcgcagacgagctgccgtcgaaaatccaggacggcggcattatacgcgagggattcgacgccgaactcgacaggctaagggggctttcgcgcgacaatatggcgtggcttgcggagcttgaacagtccgagcaaaagcgcacggggatacgcaatctccgcataaaatacaacggagcgttcgggtattttatagaggtgacaaagtcgaacctcgacagcgttccgcccgactatatacgccgccagactatggtcaactgcgacaggttcaccaccgcccagctgcgcgaaaaagagcgcgagattctccacgcccaagagtacgcgctcgcgcgggagcaggagctttttgccgaaatagtctcacgcacgctcgatttcgcgcccgcactttcaaatgtggcggacgcccttgcgagaattgacgtttttaggggctgggcggaaatcgcgcgcgagtgggactactgccgccccggggtggacgactcagatgtgatagagatttccgaggggcgccatccggtcgtcgagcagatgctgcgccgcgacgcaatcggcctagcgcgcacggagtcgttcgtgccaaacgacgcgtcgctatcttcttcgggggaacagattgccctgattaccggcccgaacatggctggcaaatctacttatatccgccaaatcgcgctaattgcgctcatggcgcaaacgggggctttcgtgccggcgcggaaatgcagaattgggcttgtcgatagaatatttagccgcgtgggcgcaagtgacgagctgtctcgcggaaattccacctttatggtcgagatgaacgagacggcgaacattttaaacaattcgactgacaggtcgctcataatactcgacgagataggcaggggaacgagcacctacgacggcctaagcattgcctgggcggtggcggagtttatccacggcgagggcgcgcgcgggccgcgcacgcttttcgcaacccattaccacgagataacgcgcctcgaggagactcttccgcggcttgtaaaccttcgcgtgagcgtcagagaatggaacgacgaaataatctttacacgcacgatagagcgcggcgccgcggacaggtcgtacggcatacaggtggcgcgccttgccgggcttccgcaaaaggtgatagaccgcgccaaagttattctcggggagctcgagtccgagggcgagacaatgctcgacaacctcggtgaaaccaaaaagcccaaggcccgcgcgccaaagccccgcaaggtcggaggctcgggcgagagcaattttatgcagctttcgctgttctgagcacagtcactatgcgcaaccttccagcaataaaagaaaagctcaggcgactgccgaaaacgagcggagtttacgttatgaaggactccctcgggaacgtaatatatatcggcaaagccgtcaatttgaagcgtagggtggggcaatattttatgaattcgtacaagacgcgcgcctcaaacccgaaaatcgcgtcgcttgttgactgcattgcggactttgagttttttaacacccgcagcgacgcggaggccgtcatacttgaaagcaagctcataaagcgctggaagccccgatacaacactctcgaaaaggacaacaaaaatttcctgctgcttagggtcgaaacatttgcacccatgccgaggttcgcgtttgcgcgccatagaaaggaggacggggcaatgtactttggcccatacctcgggacctcggcaataagaagcgctctgacggagctcaaaaaaaagttcgggatactgctctcggacgcgcacccgaaaaaactcgaaaacggaaagtggcggctatacgacgacgccagaagccaaataacgaactttgaaaacgaagtggaggagtcagagtacgcgcgcagggttgaggcggccctcgaatacctgcgcggaagagacagcggggctatcgacgaggcgcagataaaaatgcgcgaagcctccgacgcgctcgactttgagaaggccgccaagtggagggacctgattgcggcaatagaggaaacgcgcgtggcaaacgcacgcggaaacgtggaggctgacatttcggcgtctcccgcagacatcgcaatcgccgcgatggattcgcttagaaaaacgctcggaatgaaaaaagacccgcagtcaatagagtgcttcgatatatcgcacatttcgggcagcttttgcgtggcctcaatggtgaggtttgagttcggagagccggcaaagcaaaaatacaggaggttcaaaataaagtcgtttgtcggtaacgacgacttccgcgccatgcgcgaggccgtcggaagaagatacgcgcggctccaccgcgagggtttgcccatgccagacttgattctaatcgacggcggaaaggggcaggtgttttcggcccttaaagctttcgacgaggagggcataacgccccccaaaatcatagggcttgcaaagaaggaggagacgattgtcaccgactcttttgaggaaaagcttcttccgcgccgccacgaaggcctgaagctattgcagcgcgtgcgcgacgaggcacacagattcgcaaattctttcagcgagtctttgcgaagcagaaaaataagggagagcattctcgacgactttccggggctcggcgaaaagcgcaaaaaggcgcttctcgaacacttcggctccatatcaaaaataaaggcggccactgtcggtcagcttagggaagtggacggaatcggatttgaaactgcggcggctctcagggaatttttagacgcaaattttccggcgcacaaaaatgaagggcaaaacgtatagaacccgcattgccccgacagtctcggggctgttgcatatcgggcatgcgcgcacatttctcgccgcgtgcgatagggcgcgcgaattcggcggaaaagttgttttgcgcattgacgacattgattcccaaagatgctcccgcgcgtacgaagacgcggcgattgaagatattcgctccgcgggcgtgcactgggacgaaggccccgatgtggggggcgagtacggcccgtacaggcagagcgagcggatttccatgtacgagtctgccatggagaggctgattcgcgggggatttgtctatccaagcccgcaatctcgctctgaaatcaaaaagcttgcgcgcagctgcgcgcggactttcccgttttgcgacgcggaacccatcttccctgaggctctccgcccgctttccaccacgacggtggaggaattaaaaaatttcagaaattttaattggcgtttccgcgtccccgacggcgaaaaagtacgctttcgcgactcgctcgcgggggatatggagtttgtgtgcggggaggattttggcgattttctcgtctggcgcaaaagcgcggaaccgtcgtatgaattggcgtcggcggtcgatgattggcttatggatataaccgagattgtcaggggcgaggacttgcttctttcaactgcccggcagatactcgtttggcgcgcactcggggcggaaattccggatttcaggcactgcccgcttttgcgcggcgacaacggagaaaagctttcaaagacttcaatcgcaaaaagcggcggctcaaagtggctcatacgccggcgcaaagggaaattataaattcgcaaaagctctcggcctcttggggggagtctgcaaaaaacggaggaatgcacatcgatttcgacgattccgcgcgcgcttcggcgctcccgttggctccgaagccgccccaataaattggcgcaaacattccttcttttctaagctttgcatagactgtatcgcgcacatgggcgtcgcggaatttcaaaacggggcagtataccgaaaatttttcgggatttttcccgcctgaaaaagtgagctcctcaaaatatccgccgagtgccgctttaagcgaaaatgcgcgaaccgagcaataccgggtctccgcaattttttttgcgtcgagccgcgcgaacatgtgcattgaatacgcgctcattcgcgccggatttgatattgcggaaattttcgcttccgcgccgtaaaacaggctttccgcgaagtcgtccgagcggccgttctcctgcgtgcgcgcgagagatgccgccaaaaagtccgccgcaaaatccggcatggacgacgcgggccttctaaacatttccgcgggattctttgcggacacaaatccgccgtcgggtagcggaagccattttctcagcgagccgaacgaaaagtcggcgtccgccgctccgtatgaaaagggcgtgtgcgaggcgttttccaaaagtattgtttcgggatttaaacgcttccattccgcccataatgccatatcgcgcaggccgaaaaaatttacggccattacggcgtctcccggcgcggcgtttagtgtatcaaaacgcggcgagtcttcggagggcaggtcttcaaaaaattcaacttttacgctctttgcaatcgaccttgccgcttcgggacaaaagtagcgcggcaaaaacacccttccgcgaaatccgcgctttttgatttccgaaatcaccctgtttaaagcgcatcttcccgaagcgaaaaattcccagtcgccgcgcagcggcgcgggcgagtcgagaaggtattttgatatttcctccgggctcggaagcgggtatatttttcgcgggttaaatttcacgccagacattttccaaaaagcgactctttgcgtccacaaaaaaattccctgcctgcgaatttgcttcccgtttgttcccccacgcgggaaattcatatttgcatttcaatcctgcaatttgctcagtagcttgcggtaccctccttaaaaaaatgcccgttgcgctttcgtggattgtgaaaaaagcaaattttctgatatgcagaaagaggcgattcctctttcaagacacagtcttgcgcgcgcgtgcaatccggttatttcgcgccgatattttttatcgaaaaaaaacgccttagaatcgtgcgggcaatttccaaaggcgttttaccgtttttttatactgtcccagtacttgcagaatactatgacgatttcttgcgcaattttcccaccgcaaaagccgctgccgcgattgcgaatatagccgccgccgcatttggctcgggaacggcggcgtttataacgcccactccgctcaaatcaaagccgggggacccgtgtgtaggataagcgtcgtatatcggggttcccgtggagtcgagcgttttgccgtcgcctattatatcgattatctttacgtagcttacgctgcccatatcgaggtacgaatagttggcctcgaagtcggcgacgtacgtatctgtaaattggcattcgcccgtgcctttggtttctgatatgtattcggcgacgcggtttagctcttccaagtcgtatccgttgccgtagcctatcatatatttgctcccgaggttgtacacgtatgtagggtcgtttgcgccgccgccgatttcggtgtccgagcctacgggttcgcttccaagatagtagttcgggaatcttacaaagtgctctccgtcgctcgacacttctataaatgcaaattccaaaaaagtgtcgtttagagagttctcaaaaacggcgaagtcgtatccgctgccgttgcaaattggggcgtcgaaagttagcgttatgctgccggcgtctccgagcactactacgtcgaaagtatcgtttgacgtcgccttcccaagcgcgttttccgtgttttgccacatcggcggtacgcttgtcgggctgtaatccgctactccgcttgcccagcctgcgaacgttatttgcgagccgtcggacaatttgccgttgacgcttatcgacagatttccaggggcgcttatgccgccgctaaacgacgtcattattcccagctgctcgttgtagcccgcgttgtcgtatatcgggatatatgcctttgcaggcagcgtttcagccgcgagcgcggctgtcaataatatgcatgctatctttttcatcttagaatttcaaatttaagcctattttcatcatgcgccccattccagggtagtatgttccgctccagccgcacgagacgtatctcttgtcgaaggcgttttctatcgaggcgaaaattgagccgtagcggcagaagttgaacgacgcttggaagtcaaatgtggcatatgcgggaatcattcttgcggtattggaattgtcgttgccctcgtactgcgagtttgcaaggttagccctgaaagtgagctttatccattcgagcggctttacatagaccgcggcgctcccgtagaagtcgggcacgaggggaactcgcctgcccgagtaggcgccgccgtcaaattccgcgcgcactgccgtaaacattatgctcgccccgtaatattgcgagtcgtatgagatttgcgcgtctatgccgtagcggcgcgtcggtggaaggttgacgtttatgttttgggtgttgtcgaatgaaatttcgttgtccagatattgcaaaaatgcgctcgcgacaaccgtccagccatcggaaaaatattttgcgccaatctcgtaattctgccctgtttcgggctcgaggtcgaaattgaagggaagggccatggtgtagccctggtaggcggcgacttcgtctatcgacggatagtggtatatctggtcgaatttaaagaataccgatgtgtcttctctcaggctgtaatttgcgccgaaatttgcgccgaacccgtgctgccatttggattcgtcgtaggccgactttacggtcgggccgtagtcggggtttggtatttcataccgcttgccacctacggttatcacgcgtgtcggcagaattgagttctcaaaatattcggtgttgcgagcgtccatgcaggcggcatcgaaccttccggcggcgctgattgtaagcttttcaaaaagagtggtgtcggcgcccaagtagggcgagaaggaatatctccgggcgtcggcaaacgagtgggtgtagggcgtctgctggtagtagcgcttgaaatcgacgtcttcgtacgttccgtcaaagcccgcgagtatatgcgaatcttccccgacatcaaagcggtagcggggggtgaaagtcgcggtccattgtgtgtttctgctgttggagctcgtctgccaatatatgtcccgaaagtttgccgccagcccgacttcgccgctgcctgcggtggactctgtctcgagattcagggcaaaaatgccgtcgtcggattttgacgattgcgatttcccgtcagactgccgggggtcttgcacgtactgctcccacgaaaggggcccggggtattcaatgtaggatttcgtgtatgagccggaaaagacgagcgaatttttttcgtttatgtcgtaccccaatgaaacatttgcgctccgagcccaagcttcggagttctcgcgccagccgtcagtctggtagtcgttcacgcctgccgaaaaaaaccagtcgccctccctaccgctcgcgcgggctgcaaggttgtatgttgagtatgagccgtaaacagcctcgccaaagaacgaatagccgtcctccgaaggtctgcgcgtctttatctttataactcccgcctcggcggacgccccgtacagcgcgctcatcggcccgcgcaaaacctctatgctctctacgtcggaaagcggtatttgcagccagtttatcgcgcccatgtcggggcggttgaacctctgcccgtccaccattaccagtatgcgggtctgcgagttctccccgaacccgcgcatcgacaagtcgccggtggcgtttgatccgacaaccgaacgaaacctcacgttcgcttgcttttcaagaacgtcgattacatttaacgccgcggattcctctattttatcgcgcccgatgtaggtcgaattcaacgcctgcgaaaggggatctgactcccctacgcgaaaagccgtcacgacaaattcgtcgaggacggcgtccgcagattcttcagcctgaatttccgggcttgcggcgtcttggcggcttgccgactccgcaggttcgtccgccggtatgtcgtcggcgagcgcgggcgtcgaaagtagggcgcacagggcgcaaaatctaaaaaaaagtttcatttgcgaaagcgaaacggggaaagcgtccgcgaaaaacgtaaaaacggacgctctccccggcgtttatttgcgtgaagaaatcttcctgcgcgaaatagcgagcgcaagcgcaaccaaaccgagcatcgccgcaacttcagcaggttcgggaaccgcgaaatttacgttgtcgattgctatgtaattgggcattgtaagcccgccgccgttgccgaaattgctaatgagctggaaactcaaccctttcaggccttcttcgaggccctcgcttaaagacgcaacatttatagtcatccagtctggcgatatgaaaacttcgccgccgtcgttgcttgcaagaatcgtatcgacatagtcttccgtcagcgttccgctttcgtcaacaagcccgtatatcctaagcgcaaagaacgatccttccgtgttggatatcgacttgtaagggttggtgacgggatcgtaagcgccttcgtttactgttccggtaaggtagttgccattttcaagcacatagtaatcataggcggtgagcgcaacgtctatcgtggtaaactttacagactggtcggttattatgcttgtgacattcgggtaatttttataaaaaattgtgcagtacgcattgccgaataccgggtcgtttttcaatacaggtgtattgttcataacgtccgggtcggagtagtcgctcccgtcgtatgacggcagatacattacagcaaagttttcgccagatgcagcaccgccgggtttcgactgcaagtcgtttccgaagtcggtggagtcgttgcctttttggttggaaacggcgcttcccgcccaatagccggaatacgtatcgtagtcgaatgaaaatgcgtattctatcgacgcgttaattccacttgaagatgttgtgaaagctccgtaagaaccgccggaatatgcgtcagcctgtaaagctccggtattttggggaattaaagatgacgaaacgtcctcaaacccgaatgtgcccgcataggaaacgccagcggacgccattgccgcaagaattaatgcagatattttgtagtttttcatatgttgccttttttcgttttggaatttttccccggcggggaattcggaggctcacagcgaaaaaaggcgcgccctgcgcatcgacgtaaaaaaatgcggggcaaacgacaatcgcaaccaagccctctgccttccttgcgcgggaatcaaagggaaatttttaaacacgtcttctggcttatgcccgcgctgcggattttttccgcatgcaacccggacgccttcccgctaatttcgcagtggcatatgttcgggtatcggggcaattacagaggcgcgaccgcgtccgattttcacggacttccgtttgtttaaaaacgtcgcagccgacataaatgccgacttatggatttaaaaatcctatttgaatgaactgttgccgataaaaattcatacggcataggcatgtcaatcttttttggaaaatttctttcaaagattttttttcttagtttcgcgaaattgcaaaatatgtcttttctaagcccggcatacccatctttacgcccgaaaaaaatagggcgcgttttttttgcgcccattttaaaaaaagttttttgcgatttattaaaaagaaactatcagctggcctccgattacgagggcgtcgtctatatcgctattgccgttcggcctaaatatgtattgaaaatcgggctgtattgagatgttttcatttagctgaatgacgtatgtagcctcgactaccatttcgtacgtcgcagaataagattccgccccttgccagtatccgtactttgaattaaacgaaccgtacagccatgaaaagtagattccgtcttggctcctgtaaggaacgagcccttgcagctgtactcccgcatagaacataagtggcatagtcgatatgctttgaacgggcgcgtattgcattcctccccaaacgctgacatggcggtacggggcgtcggagtcgcgccaaaccatctgctggccctgaatccagaatccgtatccgcttccgcggtcgcccccggagtagtcggtcagcccttcgtatcccccaaaaaagtatccgcctatttggtacaacccctgcaagcctgtccccgctatctcttttccgccagcccctgtctttgcgaaaaattccggactccatgaggcttgaaagagcgccatatagccgtcgtccgagtgtatgccgaattccgtgccgttccagttggcgtctgaaagcgattgcggcgcttggtatagccccgcagaaagtgttatctcctcggagggcgaatactggacgtttatgccccaagttgcttgaggcgacgatgtgaaaggcgagttgtaaaaaatagcctctggagtgctatcggccccgccgcttacgaggtatcccattacgggcagcgccataaatacgtcggacatgctcatgcgcccgaagttgacttctatcgagcccgcgcgcgtgtcgaacgactgggtgaagtacatctcataaaatgccgctccgtttgtgacgtacgattccgacgcagtgaaaaaattgccgattttgtcggagagattcgctcccgtactgtacgcccctgagattgtgaacgcgcctcccttccagcctatctgtttttccaagtcgaaatccagaccgaacagcatttcccccgtgtaattggtgccctgcgcggcgccgccatagggattgcttacaaggacggagtagtagtcgaaaaagaaactgacgcccgtctgctcttggaggtcgctgtcggcggagtttattttgtctgatatgtagtcaagccccgcgttgccgtagggcagggatacatcggccgcttcggcggccgcgagaagcgcgcacaatgcacatgacgtggcgaattttttcatctttttaacctttttgcgcgtccgtgcggatctccgcccggattttttttattcgacatgctttcttatgtttttgttccgtaccgccccggcgttttgtagcgggcgcattttcgctcagtatgtattttgcattctaaatttgccgccaattaaaaaatttttgggattatcttcgccagttcaatccgattttaatttttttaagggcatgtcggcattttttatctactccaccaaatagaaaaaaagcgcccgcaaaaaagcccgacgcgcaaaaaaaacgcttcgggcaaaatgtaaatttctcataaggggcgaaagcccgctcaatgttagaagctttttatggcttcgtcgcgcgtagtgtaaatagggaatatcgttgtaaagccggaaatctcgaaaacctgcttaacattctggctcaaacccgacaatgcaatctcgccggatatttttttgaactgctttgccgccgcgagcaacactctaagccccgcgctgcttatatattcgagatcgcggcagtccacgagtatctttgtggatttttcttcaaaaagcttgttgaaaaccttttcgaggtcggcggttgtcgtcacattcaagcgcccgttcaaggcgatgatcgacacgtcgttgtttttttcttcagtaatttccatattgcgtagcggatgtttataaaaaatttgtaccattttgaggcgcattttgaaaaaatcaagtaaaatactcgctgtcggtttttcacaaaaatatgcaaattataattcgagccgcagggggagaaaaatgggcaaaccgcctggcgccgaaagcccttttatatataagtgttgtttgggagctgcattccgccatcaaaaaataaaaaatacaccctaaattctcacgtcgaaaaaaacattgccctaaaaaaattgccggaagaaataaaaatgcttgaagaaaacgcggggcgggtattatttttattccaatcaacgcatttaacaaacaaaggaaaataatatggcaagacctctgactatattcaccggacaatgggccgacatgaaactcgaagacctcgcgcccctcgcgaaaaacatgggctacgaaggcttggaaattgcgcttaccgccaaccacttcgacatgacaaaggccgacgataaggactacctgaaaagccgctgggatattctggccgcaaacggcctgaattgctttgcgctctcgaaccacctcgtcgggcagtgcgtgtgcgacaatatcgactcccgccacaaggcgatgatgcaagactacatctggggcgatggcgatcccgaaggcgtgcgccagcgcgcggctgccgaaatggtcaagacggcctccgtctgcaaaacttttatggaaatgcgccccgagacgctcgccgaatccccgattcccccgacagtgacaggctttacgggctcgtcgatatggcagtacctctattccttcccgccggcgtccaaagaaatgattgaagccggatacgaagacttcgcaaagcgctggaagccgattctcgacgccttcgacgaacagggcgtaaacttcgcgctggaagtccacccgacggaaatcgccttcgacatagcctccgcggaacgcgccttgaaggctatcggcggccacaagcgcttcggattcaactacgacccctcgcacttcgggtaccagggcgtaaattatgtgaagtttatccgcaaattctccgacagaatcttccacgtgcatatgaaggacgtttggtgggggcatggcaacggcgaagccggagtgttcggcggtcacacagagttctgcgatccgcgcagatattgggacttccgctcgataggccacggcgacatcaactttgaggaaattatcgtcgctctcaacgacatcggctacaacggtccgctctctgtcgagtgggaagacggcagaatggatagggtgcacggagcaaccgaatccgccggccgcgtgcgcgcctttgacttcccgcgctctgatattgcgttcgactccgctttcgacacgtcgaaccaataattgttttgagtttcgcccgcggggctccgcaaggaatcccgcggcgtttttttgtataaattttttccgcggcgatgcgttttttttgtctttacaaaaacggcgcgcggggtatagcttttgagaaaaggacttgttccgactaatctaaaatagaaaataaaaataatgaaatctgcaaatctaacatacacaatggcgttttggctgcttcgtttttggctcgctgcaagggcgataggaacggggcttacaaaattcataggaaaggttgagggggaaattccgaatcccgaatttgaggcaaaaataaaagaaaccatggccgacgggctcaccagaagcgaagctatggaaatagtgaccgacgttcccgaaaaaatcagcgggacgatggatgtcataagcttctcctcctaccacggactgcccgaaaaaggcccgatgacgattgaaacattcagcgcgagcccgctgatgccctcgtttatggtcgaaccctacgcggcggttctcggatacgccctcgtggcgctcggcataactgtgttgctcggcatctgcacgcgcgtttccctcttcctcatggggctgctctacatctccctgacttggggcttcattattctcgaacccaatatgggcccgagcgcggctgcgggcattgcgtacctcggcgtgcacatggttctcatagttgcggcattgctgcttgctgactataataaattcgagcttctgccctgcaaaaaattcggtctttgcaagtgctgcagcaaagagtaatattttaaatagataaaataaatacgatatataactatgaacgactttaatcgcagagattttctaaaattggctggaactgccgccggcggcttaatgctctcgcccggcatgctttccgcacagcgcaagggcggcgacaaagtgaatgtcgctatcgtaggctacggcgccgagggcgaagttctcatgaacagcctcttgaagctcccctacataaacttcgtcgccatttgcgacatttggcagcccaggtgcaattacgcggcggctctcgttatgaggcagctcaaacaaaaacccgccagatacaccattgtgctcggcggaaaagacccctatgcccccctcgtcaaaaagggaagaatgggcgaaataaagggtgaaaactacaaggatctaataaaaaatcacgcgaacgagcttgacgcagtgattatcgccacccccgacttctggcactcgccaatgacggtcgacttcctcaatgccggcgtaaacgtctattgcgaaaaaatgatgtcggacactctcgaaggggcaaaagcgatggtccgcgctgcccgcaagagcggaaagctcctgcaaatcggccaccagagaacttccaacccgcgctacatttacgcccgcgatgttctgttgcgcaaacacaatatttgcggcaacataatggcttgcaacgggcagtggaacagggctgtatcgcaagacctcacttggccggaaaagtcggcgattcccgtcgaaaagctcaaggaatacggttacaaggacatgcatcagtttaagaactggcgctggttcaaaggccttggcggcggcgcgatttccgacctcggcgcccaccagattgacatcttcggctggatgctcggcggacaccccaagcgcgttatggcttccggaaaccgcgactattacaaaaagcccgacggttcccccgcacacgactgggacgacaatgtaatgtgcatattcgagttcgacaaaaccttccagggcaagaaagcacaggcgttctaccaagttctgacgacaacatcgtcgggcggcggatattttgaatccttcatgggcgaccaaggcacattgaagatgtcggaaaatcccgcgcttacaaagctcttccgcgaaaataacgctcccgaatgggacgagctcgtaaagaagggtgtaataggctcaggcgaggcttccgctgctaagacaactgttgcggactcacgcgaaacggctgcactcgtcggttattccttcccggaaaagattgacggatacgagccggacgtagcaaagaagccgattcatatgtaccacatcgaaaacttcttcaacgccgtcatgggcaagggcaagctaaattgcgacgccgaacacgccttcgctgctgaagctgcggtattcaaagcgcgcgacgccataacggaaggcccgctcgaatttagcgatgacgacttcattgtaagctaatttaacccttaactaagcataataaaaaaatgaaaaaaattctaatagcagtttccgctttggcattcgcctttgcgcttagcgccaagcccttaaagctcgacgttcccagagcacagataatcggaactcccgttccggtaaagctccccaacctcgagcccaaaactcccaatcctgtacccgacgttccggacgatgtaaagaatgtcgccaagggcaagaaagtgacaagctccgacgatttcccgctcattggagaactcgagctcgtcaccgacggcgataagggcgcggcggaaggatgctatgtcgagctgatgaacggcttgcagtggatccaaatcgaccttgaaaagcagacggaaatatttgcggttgcgatgtggcactaccacagccaggaacgcgcctacaaggacgtcataatccaagtttccgacgatccggaattcatcaagggcgtgacgaccatcttcaatagcgaccacgacaattccgcaaagaagggcgccggcaagaacaaggcctacatcgaaaccaacatcggcaagctcgttgttgtaaatcccccggtgaaggcccgctacatccgcttgttctccaacggaaacacgaccaacgacatgaaccactacattgaagtggaagtttacggccgttaattctataaacgcaaataggagaaatcaaaaagcgcggaaattttccgcgctttttttgttcctaaattttttttgtcttggtgaggcatataaactttttgttaggagctgaggcataaaaatttttaacttttttttttagaaatttttagtcttatccgatttgttttgtccgcgcattttatattgtccaacgtatattgggctaagccaaggcatcttagggcttatattttctatgtgagaaatgtacggttttttttgaatcgggcaatagataggattgcgcggtttgtagccatttttgttcgaggcggatttttgccgatttcgcattctatatttaaaatttttctgatatttttgtagggataaattttgatgagtctgcggcaaaagtaattgttaaaaaaataaaaattacgtctcgacatcgatttatgcgcgccatattattctaaaatattatacgaatatgatgaataaaattatagcaattttaacgattatggcatgcgcttttgcaagcgctgcggaacgcgtggaaataattacaaaatataaggacggaacggtaaaaagttcggaaaaatccctaaattttgaaaatgggagagccgttttaaaaattccccgcgactcaatagatgcgcgtaccgatacaatttccataatccccgattttatgaaagcctccgcgggcgacgacgggtacatcgttatgccaaacagcataataataccttttataaaacaaaaggactcgtcattcaccccgtatagcacgagcaaaaacgaatggcatctcccaatcggcgggataaaaaaggcagatagggcgttttattatatcgtaaacgggcttcgccacgagcatgcggcactggcaaagctgaaggacggcggatactcgctctcgacagtttttaatatcggcaagatggcatttaaaccgtatgaggacattgaaattgagtacagaatcctcgatggcgaaaatgctgattattcagggatagcgcgcgattaccgcaagacgcttctcgactccggagtttgcaagcccatatccgataggctcacaccggagctcgaatacgcatgcggcgcgcctgagcttagaatacgacaggcttggaagcctgcgccgccaaaaatcgaagaacagacggtggaaaacgagcccgaagtgaaagtcaaaatgacttttgaaaaggtagaagacttcatatcgcgcctaaaatccgcgggagtcgaaaaagtgcaaatatgtcttgtcggctggaatgtgagcgggcacgacggaaggtggccgactgcattcccggtcgagcccaaactcggcggcgaggagggcttgaagaagctgataaaaaaagcgcagtcgatgggataccagatagtttgccataccaacagcactgatatttacagcatatcggaagattggaagggcggggcgcccgtcgcgaaaaaatccgacggctctctgcaaaaaaatacatgctggagcggcggaagaatgtacaatctctgccccaaaatggcgtgggagttcgcaaagagggacttgccgaaaattgccgagcttgggtttagggggctgcactatatagacgttatatcgatgattcccccgcacgaatgcgccgacccaaatcacccgtgcaaccgcgccgaaagcgaggagtatatgaacaagattttaaggctcgcgcggtcgctcttcggcggagcggcgtccgaggggccctcttattttgtggcgggcagccaggatttcggcctctacatacatttcgcgctgctcgatagaaaaactctccctatgtccggaaagctcgtgcctctttggcagattgtctttaacggcataatcctcagcaaccccgctactgagtgcgccaactacactataaaagaccccgtaaagcgtttgaagcttgtggaatttggcggcaggccgatgttttacctctactcggctttccgcgacaacggcgacaactggatgggaaactccgacttggtatgcgaagacgaggcatcgactaataggagtataaatgcgataaaaaaaggctatgacgaatacgcgaaactctcgcgcctccagaaagtttttatggattcccattctgagatatccaaagatgttttttgcacgagatacgcggacggcactgaaattgtctgcaactatgcggactctccattcaaatataaaaatgcgcaaatagagccgctctcgtacaaagttttcgagccgcatgcgggcggcgaaaattgaagcaattaaatcccgactttcccttcagagattttagctggcgcgggaaaaaaattgaaaatttatctgccgaaatgtccgcaagaaaagaacccgcagtaaaaaatgaaaagtcgctttttttataaaaagcttgttatgcgggcgcggatatgtagaaatgttggacgtgaaatttttaaggacattaatcgccgcagcgacgctcgcaccgttgtgctgcgcgccggtagcgttttcggcggagcccgccaaaaagccgcgcaagcgcgcagacgtgccgtgggtgtctctcgagcaccagagggcgctcgaagccgaacggctgggccttgcaaaaaaagcggaggaaacggtgcccgtagtgaaaaaatcggacgggaaaccgaagttgtccaatatgattaccgcccccgaaatatcggccgataaattcgagcatgtccaaaatagcgagggcgacttaatcgccaccggcaacgcaaaaatagaagacgaaaaattcgagctccgcgctgataaaatccgctactcgcaaaacagcggcgcggccgaggcgtccggtaaagtaaaggcttctatcggccaatcgcgcgttgtcgccgaaaaattttcgtacaacccgtcaaaggaactgctgcataccccgcacgcgcgcttcggctcgtcgcccatgtttgttgaggcagacagcataacttccgataaaaacaaagtgtcgatagacaatccgaccgtgtatgtgggcgagccctcgccttactcaatgtcggcctcggcttcgcaaataaggtacgatacgcagactgagctccttgaactcgacgacactctcgtctcgataggacccgttccggtgttttatgcgccgtactattcgcagtatgggctcgagcggcccccgttcgacattcagacgagagccggatacaactcagactacggggcgtttctcgcaaatacggtaatgtacaacggcctcggcagcctcagccccggaatgctgctcgactattacaccgagcgttccgtattagtcggcccggcactaaactacgactacaaaggcgccgaaacatggctgaaaggatttttccaaggcgcgtatatagacgaccacggcagcagggacattctcggagtcgattctctcggccggcctatcgacagtgacaggttttttatgcagatgcgccacgcgcagatggtgaccgacaatatatcggtaataggctctctcgcatggtggagcgacgagttcgtcacgcgcgactttcgcccggaattcttctatgatgaccaaatccccgacaactttgcggaaatagactattacggaagcgcatacacaatttcgctctttacgaggttcgcgcccaataattgggagctagtccagcagcgtttgcccgaggcgcgcttcgacttgcagccgggggaaatctttaatacgggcttctatcagaatatgtatctgtccgcgggatattttcgcaacagcgggccggaggagctaatatacgaaactttcgagaccgcgcgcgttgacgcctattacggtataatgcgcccaatacatctaaattcgtggagcacaatcacccccgtcataggcggcaggctgacgtactacggcaaccccaaaaacggggcgtccgaatatacgcgaattttggggcagataggcttcgatgcgcaaatggatatttggggcacttgggagtaccaaagcaaaacaatgggcatagacggcttgcgccaccatataaccccgataatgagctaccgctacataccaaacgctacccagggttccggcgcaatacctacaatcgacgaaataagcatagaggatttcacttacccgccgatactcgacttgggagaaatgcggaacacagacaggctgtttaagacaaacactttgaggctcggaataaaaaacactctcgaaacgcgcgacgaaacatacggctcgcgcgagcttgcgaggctcgacatatttcaggactttaatttcgacaagcgcgtcctcgcccagaacgattttaaaagctcctctttctccgacttgtacacgaacgtttccatatcgcccgcgcgttggcttactatcggctgctacaacaggtttaacatagaaaacctaaatgttcccgaaacaaacgcgtatatcgggcttttcgattccgacaaattttcaatatattttatatcgagctatctcgcaggggcaattacccagtattcggcccttgcagaataccgcataagcgagcgctacaagctgctcgggcgctggtcgtacgactaccgcttgaatatgataaccgaccaaacctatactctttggacgaggcttggaaattcgtggatagtcgaatatcaaatatcgtaccgctcgggttcaacgcgccagaataatttctcgttcggcgcccgcctgtctatggcaatcttctaacacagcaatgccagaagacattccagcatacgaagacgccctcgcgggagggcttgaaatgtcggtaaagctaaatgtcttcgaaggtcccctcgacttgcttttattccttattaggaaaaacgagatagacatatacgacataccgatagcggaagtgacgcggcaatacatggacgtgttgcgctcgatgaaaaacatgtcgctcgacgtggcgggcgagtttttcgtaatggccgcgactttgatgtacataaaaagccgaatgcttctgccgacggacgaaagggctgtccaatcagaggaggacgacggcgattccgagcttgacccgcgctggcagcttgtcgagcagcttctggaatataagaaggtaaagcgcgctgcggacgggctagaagacctgatagacgcgcgccagaattacggcgagcgcagagtgtcggttacggaactgcctgagaggccgttaaagccgtccgacaaaatggaggtttggaacgtgtttaatctcgttctcaggcggcttgccgaaaagctcgtgcagggcgagatacgcgaggaaaatgtgactgtcgccgacagaatggagtatctgctttctatcccggaaaagaattttacgttttcttctgtatttaaagaaaagaagaccggaatagtgacgatagtcgcaaccttcattgcgatgctcgagctcacccgcctcagaaagcttagaatatcgcaaaacgaaagtttcggagaaatatattgcgagagaatagacgaaccgcgccccgccgcggacgacgaaaaggagcaaaactaaatatggcgaaaaagaaatcggcgcacttacttggcatagggcttgacagcgacgggcaaaagcgcattacgcaggccgaaaaattctccctcgttggcggaaccgaagaaacccacgagttcatgacggaaaccgtgataaaaaccttcgaggatttaaagcgcaagggcagggagctggaagatacgtctgcggacgagctttccgatattttga

SEQ ID NO: 3602 - DNA, 1798 bp, Unknown
  16S sequences of unknown bacteria
cggaaacaggggcttggcagaccggctgtgatcaccctgaatctgccagctaaagaaaggaggagcgccaatgattgatgaccaaaagctgtatgagctgctgaaagactttgaccccgcagtaggggaacggatggaaaagcacttcaaggatggggcgttttattttgaccttggcggcagcagctatcctttctttgaggggaataccgtctatacggtcattccccactttgcggaaaaaggctcggaagggatcgtgaagaagctgaagcggctgatggaaaaagatttgaaagagaaagaaccggaaagatagctgcaaaaagccaatcggagcgttataataagggcaaccgtttacttggctgcctgaacagaaaggagaagcaaatgaaccagcagccagagaaaatcaccgctttatactgccgcttgagccaggacgacgctctggacggagaaagcaattccattaccaaccagaaagccctgctgagcaaatacgccgccgatcatggatttcggaacacccggttcttcgtggacgatggcttctcaggaaccagctttcaaaggccggggttccaggagatgatgcgatatgtggaggattacagcgtatccgctgtaattgtcaaagacctgtcccggctgggcagggagtattcctacatggggcgattgcaggatttcatcttccctgcctatgacgtccgctttatcgccatcaacgacgatgtggacagcgccaaaggggaaaatgattttgcggtgttcaaaaatgtattcaacgactactacgccaaggataccagcaagaaaatccgggcagtggttaagatgcggggcgaagccggggagcatatcgccagcaatccgccctatgggtacataaaagacccgcaggacaaaaagaaatggattgtagacgaagaagcggcaaaggtggtgcagcgtatcttcaacctctgcattgccggaaaaggccctatgcagatcgcaaaaatcttcacagccgacaaggtgctgaccgtcaccgcctatcacgccaggcaaaagggctgggtcatgccggagaacctataccgttggaataccaacgccgtgcttagaattttggagcggcgggagtacacgggctgtaccgtaaacttcaagacttataccaagtccctgaaattcaaaaagcggatggaaaacccggttgagaaccagcggttttttgaggacacccagcccgccatcattgagaagggacagtgggaacgggtacaggaactgcggaagaacaaacgcaggccgacaaagacaggaagaaccagcatgttctccggtcttctctactgcgccgactgcggagccaagctgtacttctgcacctgcaagagctacaaggacgacagccagaaccatttcgtctgctccaactacaagagcaacaccggctcctgcaaaatccactatatccgggaacaggtgctttaccggattgtgctggaaaccatacggcagacattgagttatgtccgtatgttccggaaggatttcaagctggaaatgctggcgcaggacgaggaaagccgcaaggccgaactggcagaaaaacagaaagccctctccggggcgaaaaaacggatggaggatttggaccggattatccagcatatctatgaggataatgtgctgggaaagctgtctgacagccggtacttaaaattatcccgccaatatgagaaggagcaggcagagattgaacagcttgccgccgtattggaacgggaaattgaagcacagg

SEQ ID NO: 3603 - DNA, 4006 bp, Unknown
  16S sequences of unknown bacteria
ttgcagaaagagcctacgacagtctttctaaacttattgacaaggccgttttttgaaaacggcgtgaaaatttacagcgcatgggccgcaaacggcgttcccgttgccgaatataccgttgcccaaataatccttgcaaacaagggtttcttttggtcgtcgcgttatcagtcggtgggcaaccgtgagagggctcttgaaaaaagagccgatataaagggtaatttcaacagcagggtcggtcttataggcgtcggcatgataggctcgcttgtggcggaaatgcttaagagctaccgtcttgaggtgttggctttcgacccgtttttgtccgatgaaagagcaaaaaagctcgatgtgaaaaaagcctcacttgaagaaattttttcaagctgcggcacggtaagcaatcaccttgccgacaatgaccaaaccgccggtatgctgaacggtaagcttttcgaccgcatgagcgatacctcaacatttataaacaccggaagaggacggcaggttgacgaaaaggctctcgccgaatttatggaaaagcacccctttgcaacggcactccttgacgtaacatttcccgagccgcccgaagaaaattctcccctctataccctgtccaatgtcattttaagcccgcacatagccggaagcatcggaaacgaggtcagccgtatgggcgaatatatgaccgaggaatttttaagggtacaaaagggagaaaaaccgctttatgaggtaaagcccgaaatgctcaaaacaatggcctgataaaagaccttatcacacgacgggaataagcacgacgctgtccttcgggatttcatccgtttcaaagccattggcgcttttaaccgcctccacggtagttttgtatcttcttgctatttcaaacaccttttcctcttctccgcaataataaagcatgagcgcggggcggcgttcggcagccgattgttccttctcgtccaccgttatatcggtcagcatctttacttcgacgctttcgtaaagacaaccggtaagggtcatatttacgtttatttttgcgctgctttgcgaaagctcacagccaaagcttttaatacatatttcaggcgaaaactttaaacttgagctgttgtcacggcatatttcatgagaaaaatcgacgtttttttcaaaatacaccgtcgacatatctccgtcacaggccacaacgcatatttgaaccgttccgagcaccgaaattccgctttcggtgtttctcacctcggtgacggctgcgtcgccgaaaatgtcaagaattgagcttatttcgttgccgaaatcaaaattatatccgtgggtgaaattttccttaacctcggaaaggcatttttcaaagcatttgcatttgctttccgccttaagctcatttttcacggaatatgcgtcggcggcgtacataagcgaaacatttttgcaaagagaaatttcggtgttaattccggccgaaaccgaaagcgttctgacatcgccgtcaaaaccggttttggttctcacgtcaagagccgttatttcgcattttgcccttgcaaagcagtcctcgtcggcctgcgccatatcgacgatttgggtaaagggtataacgcagtcggttttgtcaacccgatttttcctgtcggtcgaatagcaaacggtaacataaagctcgcccttgacaataaccttgcccgccatggtcttgcagtcggcatattcaactatgccgtcgcttctgagtatgcaggttatgggctcggtgctttcgtcaagctcgatttcatcggtaatggcggtatatttttcggtgcatcccacagtaaccgttatgtctttttgctcggagcaaagctgcacatcgttttcggcaacgctttttacacattcctcggtctgcatttcaaaaagacttaccgtcagcgaaaggcagccgtgcagctcgatttttcttgcgctgaccattcggcagcccatgtgttctattttgcacttaaccgacggataaaactctttgtccctgtcaagattcatttcacgatagaatgtcagcgtttggtcgaaggttttaaggcagccttcttcgtctatataaaacacggtcagaaatacgttgccgtcgatgtttagcaccgagtttacaattcttttggaaattatcttggcctttgcgcggcatttgagtatacgcgccatatttccgcaaaattccggcagcatgatctcgttgtcaacggcctgctcgagaacctcttcggaggccttgctttcaagagttattctttgcttttccattgttatttccataatgacacttctttcccgtaaattttccttggtaaattatattgggagaaagaaataattattacaaaaaatccggtgttatgcacaccggaaattttaatcgaaatattttttaaagtcctccgagcttgcaagagagacaaaatcgtcgtctccgaaaatcagatgatccacaagagatatgtcaaagcatttcagacagcttgaaagatttgacgtgtttataatatcctcttttgacggaagcggtattccgtttgggtgattgtgggctatgacaacggcggtagcgcccgtctgaaaggcgatttcgcatatttttcttgtgcaaagcggaaccgaatttgcgctgccctccgaaagacggcaatgcttcagaaccgagcatttgttatccatgaaaattccgtatatcatttcatgcttaaagcccaaaaacttcggtttcaaaaactcgccgatctgctcgggcgtatacagagccgatttgagatttttggaatcgctgtatactctgaaaaggccgggcatcatgcttaaaagcgtcgccgaatagtcgcctattccgttgacctttttaagatcgtcggcagaggcgtcaaaaacgcccgaaagacttccgaaacggtctataagctcgtgggcaagaggattcaaatccttttgcggtattgcatatccgagaacaaattccaaaatttcatgttgctgaaagccgtcaaacccgttttcagaaaatctttggcgaagccgttctctgtgacccgcatgaatttccgatgacataatattcctccgaaaggtgatagaatgaaaaaatttattataggcaaaaacgacgcaaaccagcgtcttgacaaatttatttcaaaggccgtccccgacctcccgaaatcgcttatgtataaatatattcgtacaaagaagataaagctcaaccgaaaaagagcccaaatttccgacagactgtgtgaaaacgatgttctcgagctttatataaacgacgaattctttgcaaatgaggcaaagaaggattatgattttctaaaatcgagcaaaaagctcgacatagtttacgaggacgaaaacatcatgctgcttaacaaacccgagggtttgctttgccattcgtcggccgacgaatacggggacacactcataaaccgtataaaacgccgtctttatgaaagcggagaatatgatcccgaggaagaaaattcctttactccctcccttgccaaccgcatagaccgcaacacctgcggaattgtcatggcggcaaaaaacgccgaagccctcagaattcttaaccaaaaaatcaaggagagagaaatatcaaaatattatctctgtctcgtccacggaagaccgaaaaagcaaagcgacacggccgaaggatttcttgaaaaggacagcgacaggaatatggtaaaaatatacgactcgcccgcccccgggcgcctgtcaatcaagacaaagtatactcttcttgagcacaaaaaaggcatatcccttttggaaatacagctcctcaccggaagaacacatcaaatccgagctcacatggcacatctcggctgtccgcttgtgggggaaggaaaatacggcaaaaacgccgccgaccgcaaaaaagggtttattcatcaggcgctttgctcatataagctgagatttgattttcccaccgatttga

SEQ ID NO: 3604 - DNA, 16638 bp, Unknown
  16S sequences of unknown bacteria
cgcatcagctgcgcgctgggccgctgctcttccgctatgccatcacatccaacggcgcccgggtggatgatgtccgcggacactgtctgttctgccaggagatctatcccgataccgccctgtccctgctcagcgactgccagacgctgcgcatcggtatcagcgcccatatccgcagagaatacctcctgcagggccgtctgctgcagatgatgggcaaggccgtctatggaaaagatgcagagcaggcgcgctgtgtgcccgatctccgcccgctcatcaaacagagccgcggagtggaagagcttcagttttattttttcagccggacagccagagaagcgctgcggcagatcctctcctattatcccacgctgaatgccgcttactcttcttcctatgtggaaatcttttccgccgaggcatcgaagggcaaggcgctctcagcccttgcccagcaccttcatctcgatcgttcccagatcgcctgcatcggcgacagcgagaatgacctcagcatgttcgaggccgccggcacacgctttgccgtgggcaacgcgatcgacgcgctgaaacagcaggcagatcatgtgctgcccgaccgcgatcacgacccgatcgccgctgcggccgccatcttaggcatataaaaagcgaagcacgagcacttcgctttttatatgccgatctccttgggaaaataaatcagctcctgtccgctgaattccgcctcggtgagcgcgcggacgatcgtgctcttttccgagagctcatgcagcgatccatcctcgctgacgatccagatcacatgtgtgccgccgcgcccctggtatggagaatacggcttttggacgacatggtccttgacgacataatagcgcgggtcatagccgctctcctgcgccttccggcggatcttctccagctgtgactcatcctcatattccacatagtcaaacaagcggcggctgcgggccctggatgccagatcgcgcagcacaggatcatcgccatgctccagcagggagaagccataaagcgcggcagactcatccagcacatacagatcctcgatgcctgccggcccatcctgcaaaaatggcacgaacatctccaggcgggaaaacgcatccgcatccttctgccactgttccttcatccggcgaaagatcatcgagatgatcgtctcatagctgcgggcgaccggatgcaggtagacctgccagtacatatgataacgcgccatgatataatcctccacgctgtggatgccgctctccttgacagccatccgtccgccgcgcacacggatggtgcgcaggatccgctccatatcaaaggtgccatagctggtgccggtgaaatacgcatctctcagcagataatccatgcggtcggcgtccagctgtccgctgacgagctgattgagcagatcgttgggatgccggtaagcgatgatggccgcgatatcctgcggcagcctggggtcagcgtccgccagcacttggtggatctcactgtcttccagcaggatgcgctgagtgaacgtctcatgccggcagctgctcacggattcaaacgcatgagagaacggaccgtgtccgatgtcatgcaaaagccccgccagcatggccgtgcatttctcatattcgctgaaagactccgcgatatccgggatctcccgcaccatgcgcctgacgatctcatagactcccagcgagtgagaaaaccgcgtatgctctgccgtatgatacacctgaaagtcgccgcccagctgatggatgcggcgcagacgctgaaattcccgcgtgttgagacagtcccacaccaccttcagatcaatatggatatatccgtggatcggatcacggagcacttttacttctggcgttcgttcaagcatgccatcacctcctgcagacagtcgaggatcttgcggtcagcgggctgaaagccatagcggtacacttctccatagtgcacccatctgccttcgctgtgggcgctcagccgcatgtcttccgctgcgctgcggcacagaaaggcgctgacatggatctggcagccttcctgctcatccatcacatcgcacagaaagcgctctgcttcggcgtgaatgccgagctcttctgccagttcgcgctcgatggcctcgctgtgtgtctcgccgctttccactttcccgccgggaaactcccatatcccggccgcctgtccttctccgcgtctggcgatgaacacctgatctgccttatgcaggatgccgcagaccacttccagctgtttcatctgaccaccttccttcttgttccattatatcataaaacggcgcatgtccttcacgacagcgccgtttcccatatgtcaatcttttttctgcagcaccatggccagcacggcgatgtccgccggattgaccccggagatccgcgaagcctgtcccagcgtcatcggccggatctcgctcagcttctgccgcgcctccaaagagagatgcgccatctgttgatagtcgatgtctctggggatcttcatctgatccatcgcccgcagatgtctggcatcgcggcgggccttctggatatagccttcatatttgatctcgatctcgatctgccgggcagccttctcttccacttgcatgccggtatacggctgcagcgccgccagggtgatgttcggccgctttaacagatcacgcacgctgatgccctctttcagcggttcatagccgatcgcgcgcagataatcgttcacttctgacttcggcgtgaaacggatctcttcgcactgcttcatcccttccgcgatgcgccgtttcttctcctggaagcgggcatagcgcgcctcgctgatcagcccataggcatggccgtattcgctcagccgcatatctgcgttatcatggcgcagcagcaggcggtattcggcccgggacgtcaacagccggtatggctccttcgtccctttggtcaccagatcatcgatcatgacgccgatatacgcctcgtcgcggcgcagcacgagcgcttctttgcccagcaggcgcgaagcagcgttgataccggcgatgagcccctgtgcggccgcctcttcatatccgctcgtcccattgatctgccctgccgtatacaagttttccaccagcttgttttccagcgtcggataacactgcagcggatcgatggcatcatattcgatcgcataggcatatttatcgatgacacagtgctccagccccggcaggctgtgcagcatcgcttcctggacatcgtggggcatcgaagtggagaagccttggatataggtcgtatccagcgaacggctctccggctcaaggaagatctgatgacgcggcttgtccgcaaagcgcaccagcttatcctcgatgctcggacaataacgcggtcctacgcccttgaccagcccggaatatatcgcagagtcctccaggtgatcacggatgatctgatgggtctgcggggtcgtataggtcagatagcagaccgcttgctctgcaaaaggaaggatggcggtcgtatcctcgctgaagcagacaaaatcatctgtgccaggctgcaccgcagtcttcgtgaaatcgatcgaatcgctcttcacccgagccggcgtgccggtcttcaagcggaaggtacggatccccagatcgcgcaggctctgcgagagcgcgtccgtggtcggttccccctccggtcccccggacactgcgcgatggcccaccaggatggtggagctcatgaaggtcccgctggtgatgatcagcgcacggcacatttccacatgcccatcctgaagctgcacgcccttcaccttgccatcggacgcgatgacccgctccacgcactgttccctcacctgcagatgttcctgatgcagcaggacatcctgcatgtatttccgataggcgatcttgtcgctttgcacgcgcaggctctgcacgcctggccctttggtcgtgttgagcatcttgaactgcagcgcggtcgcgtccgccgcccggcccatctctccgcctaacgcatcgatctcccgcacgacgatacctttcgccggtccgccgacactgggattgcacggcatagagccgatcatatcgatgtgcatcgtaaacagcaccgtttccatccccatgcgggaagcagccagcgcggcctcgatgccggcatgcccgcctccgatcacaatgatatccaccatgttcctcacctgacttttccatactattatactcgtgaacgatagaaagcaaaagagcaaaaaaaagatatggcccatacatttcccacaatgttcacatgtccaccacactgtcattgcttcaaccgcttacaatgaaagaaggaggattgagatgaatcggaaaatcttattcactttctgcggcagcctgctttttgccgcgctatgcggatgcatggctcaaacaaatgaaccagtagaaaccgtaaccatcgacccagatatcgaaatgatcgacatcgatacagagactgacggcttcacctactatgacctggatgtacaagaagagatccagtcacagatcgatgcgttcaaatccgaaacacacacgatggaagacccgttgctcatcttcgacccatatggcacaaacaccacatccttatacatctggtttgaagaggaagaagccagtgtgctttcctatacgatccaatgtgagggatacgaaaacttcagccgcacgctgtacagcgacagtgaggataacatcagcacggcccatgaacatcagctgatcggacttgttccgggcgagaccaataccatcaccctttcggccgcaaacagcaacggcacgctgcttgaacaagtggagttcacggtagaggcgccgcagctcagctctggctatccgacccagatcgaaaaaagcacggaaaacgatgcagaactcactgatggcctgtatatgaccttcggcctgaattacagctacgacggctattcattccttatcgataatgatggcaccgtgcgcggagaactgcccttggacggcgacatgatcgaaaatgtcatgttttataacgacaccatgttttattctgtcaatctgtccaaggccgtgcgggtagaccggctgggcaaagtcatcgcggtctatgaattcccggaatacgagcttcatcatgattacgcgctcaacgatgatggcgagatcatcgcactggctaccgagtatgccaaagaaagcgtagaagacatcatcatctccatcgatctggaaagcggcgatgtcgacaagatcattgactttgatgaagtcatgggagattacaaagcattgacccagccatattctgccgacagcctgtggggctcgcaagactgggactggctgcacttcaattccatccagctggtcaacgaggatgagatgatcctcagttcacgggagacttcgacgatcatgaagtttgacgatatttatgatgacatcacgatcgattatttcatcggtccggaaaatgtatgggcagataccgcttattcccagtatctgctcacaaaagatggcaatttcaccaattcggccggacagtacaatgtcgtctatgaaacggatgacagcctggaagaagggcaatattatctgtatttctataataacaacttctggagctatgaaagccggatcgaatcgatcagcggctcagaaggtaattccacatcatttcaggacgatggcaattccatctcttattacatccgctatctcgtcgatgagaatgaatgcacttatcaactggtcgattccttatcggttccttattccagcatcgtatccagcgtacaatggtatggagatgagttgatcgtcaacagcggcatgcataccgaattctatgtgtatgatgaagagggcacgatgatcgcctcttacgcatataacgatgaggaagacagcatcttcctgggataccgcatctataaatacagcttcaacgatttctggtttgcctgaatgaccgtgcatgacgcacggtttttttataccagctgctgcaaagcatagagtcctgcctgcaaagcgccagccagcaccatgaccaggatcggactgcatcgctttttcctcagcagccagagacagcccaaaaagagcgcgatcccttcgatgcgcacagcatcaagacgcaatgcgctgtcctgaaagatgaccgggatgagcatggccaggcccgctgtcgcaatcaaggcgatcaccgcgggacgcaatgtgcccagcacggtgcggatcacgctgagatctcggtatttcaaataaaagtatgccaacagagtcacgatgatgcaggaaggcaggacacagcccagcgttgccgttacggcgccggcgatcccatcgatcttcaggccgacgaacgtcgcgctgttgatggcgatcggtcccggcgtcatctgcgagatggtgatgagatggttgaattcatccgggctgagccagtgatgcagcgagacgatctgattctgaatgagcggcaatgccgcatatccgccgccgaagctgaaggcgccgatgatgacgaagctgatgaacagcgaaacgaggatcatgcgctcaccttctttcttccggcgatgctgcggatcaccccgatcacgatgcaggcaaagatgatgatcaccacattgacgccgaagaactggttgagcgcaaaggcagcgatcagcaccgtgatatccaatgcattgtgttcccgaacgacaccggcgctcatgtcccataccacagcggcgatgagcgcagcgaccccggcctgcatgccgtcaagaacagtgctgacccagatattgtcggcaaacgcatcatagaacagcgagatcagcgagaggatgagaaaaggcggaaggatggtgccggcgacgctgacgagcacgcctgggatcttcgccagcttgtagccgacgacaatggccccattgaccgcgatcggccccggcgcagactgagcaatggcagtcatgtccagcatttcctcctcttcgatccagtgatatcgatccacgaagcgctctttcatcaacgtaacgatgacataccctccgccgaaggtaaacgcgctcagcatgaaggtagaggaaaacagtttccaaagccttcctttttccatatacattcccccttgtccctttcattatacggcgggatattctataatgaaaatagtattatcaaatgatgttcataatgattttataataggaggtccgatgaatcttcgttctttagccatcttcacggctgtctgtgaagagaaaagcatgactgccgcagcccgccggctgcacttagctcagccttccgtatcgcttgccatacgggaactggaaaccgaatatgactgtgtcttttttgagcggctgtccaagcggctctatctgaccgaagcaggacagcgcttctatgcctatgcccaacgcatcctggcccttcaggaggagatggatgtctgctttcatgagcggacatacgaaaggcagctgcgaatcggctccagcatcaccatcgcatccaccgtgctcttcccgcttctgcatgacttctgccagcagcacccggtagtgcagctgcacaccaaggtgctgagcacctatacggtggaaagcgccgtcttggacaatcagctcgatctggcactgatcgaagggacgccgcgcaatgacgcgctcaccgtcatccccctgtgtgaagaccagatggcgctggtctgcgccccagaccatccgttagccaaacaaggcgaaaccgaccttgccgcactacaagatctgccattcctcacccgggaggaaaacagcgcgacccgcagcatcaccgaaagcctgttcacactgcaccaccttaagctgcgcccggcagtggaatccgtcagtaaccacgcgctcatcgaagcgctgcgaagcgggatgggcgtctccatcctgccgcgccgcctgctcattccctatctgaatgcgcatgagctgtgcgagatcacgctgaaggatcagccgctcaaccgcgaatggtacctgatccatcactcccgcaaggcgcttactgcaccgatgcaggaattcatccgcttcttacaacagacaacatggtaaaaaaacagaggcttatgtgaaagcccctgttttcgtcttagtgtttgaaatgacggataccggtgtagaccatggcgatgccgtattcgttgcatacgtcaatggacagctgatccttgatggatccgcccggctggatgatggcggtcacgcctgccttgacggcttcttctaccgtatccggcatcgggaagaacgcatcggacgccatgacggagcccttggacttttcgccggcttcttcgatggcgatcttcgctgcgccgacgcggttcatctgtcctgcgccgacaccgatcgtcatgttgtccttcgccaggacgatggcgttggatttcacgtgcttgacgaccttccaggcgaacagcagctgctcgatctcttcatcggtcggcttgcggttcgtcacacagcgcagatcatctgccgtgatctgcttcgtatccatatcctgaacaagcaggccgtccatgacattggtcaccttgtacttggctgtcggttccagcgcagtgtccagcgtcatcaggcggatgttctttttcttggagaggatctcaaacgcttccggctcgaagccaggcgcgatgatgatctccaggaagatcttggacagcttctctgccagcgcgacgctcaccggagcgttcagtgccacgatgccgccgaagatggagaccggatcggcttcatatgccttgtcccaggcagcctcgatggtatcgccgatccctacgccgcaaggattcatgtgcttgacaccgactgcggctggctgtccttcgaaatccttcaggatctcgatggccgcattgccgtcctggatgttgttatacgaaagctctttgccatgcagctgcgtagcgttggccagtgaatactgcggatgcatgttcttgtagaacgccgcgctctgatgcgggttttctccataacgcagatcctgcaccttatcataagtgatcgtgaagctttccggatatttctctcccgtttttgcggtcagatattccgcgatcatcgcatcatagcgggcagtgtggcggaagacctttgcggccaggaattcccgggtaaccgggcaagtctcgccgttttcctgcagttccttcaatacggcatcataatcgttcggatcacagatgaccgggatggacttatagttctttgcggcgcttctcagcatgctcgggccgccgatatcgatgttctcgatgacttcctcatgcgtgacgcccggcttctgcacggtctccttgaacggatacaggtttacacagaccaggtcgatcagctcgatgcccagctccttgagctgtgccatatggctctcgttatcgcgtacgcccagcagcgcgccgtgcaccttcggatgcagcgtcttcacgcggccgtccatgatctccgggaagccggtcacatcagagatggagatggtcggaatgccggcagcgtccagcgcttttttcgttccgcccgtggagatgatctcatagccgagatcatgcagaccgcggacaaagtccaccagtccgctcttatcagatacactgaccaaagcacgtttcatgatttaccctcctcgatttcttcacagatctgtttcacgacttgcggaaacagctcatattccagcgcatgcacatgtgtctccagcgtttccaatgaccatgccggatcgatggcaagctttttctgcgcgatgatgtctccggtgtcgatgccctcatcgacataatgcacggtgacgccggtataaggcactttcgcctcataggcgtcccggatgccgtgcgcgcccgggaaagccggcagataagccggatggatgttgatgatgcggcgcggataatgcgtcagcagctcctcgccgatgaagcgcatatacccggccaggatgatcagctgcacgcctttttcctccaggtgacggcggatctcctgctcatattctttcttgcctgcatacgctttgggattcacatagatatgatcgatgcccaggcgatcggcacgttcccttgccttggcgttttccttatcgacgacaagcagttcgcagaccgcgttggggatcgttccatcctgcatccgcagcaccaggttttcaaagttcgttccgcttccggaagcgaagatggccgtctttaccatttcaggtccacgcttcctgatgccgtgacttcaccgatgacataggaaggctcatcgatctctgccagcagcgagcgcacggtctccacatcggccttgtctactgcgaggatgaagccgatgcccatattgaagacgttgcacatttcctgcggcgcgatgttgccggtagaagcgatcagctcgaagatcggcttggacgggaaggcgttcatgtcgatggtcacgccctgtccttccttgagcatgcgcggcacgttctcatagaagccgccgccggtgatgtggctcatgcccttgatgtccactttgcccagcagatgcttgatggccttcacatagatcttggtcggggtgagcagctcctcgcccagcgtctttccatcaaacgcgtcatagcgctcatgcaggtcgagcttggcgtccttgagcagcaccttgcggatcagggagaagccgttggaatggcagccggagctgggcaggccgatgagcacattgccttcggcgatcttctgcccatccagcagattgcatttgtctacggcgccgacacagaagccggcgatatcatagtggctgacgtcatacatatccggcatctcagccgtctctccaccgatcagggcacattccgcctgcacgcagccgtccgcgacgcccttgacgatctgttcgatcacctgcgggtggttcttgcccaccgcgatgtagtcgaggaagaacattggcgcagcgccctggacgagcacatcattgacacacatcgccaccgcatcgatgccgatggtgtcatgcttgtctgcttcaaatgcgatcatcagcttggtgccgacgccgtcggtgccgctgacgagcacaggttccttgaacccgtagcgggaaaggtcgaacatgccgccgaacgcgccgatggaatcgatcgcgcccatcgtcttcgtgcgcgcaacatgacttttgatcagtcgtacggattcataaccggcttccagatcgacgccggcttctctgtatttatcactcatgtcatcttctcctgtctatcatttctgacggaaatagttgatgccgttggcaaagatgttctgctccttatttccgtcaatgttctggaacagtccttcctcatagcgttcgctgtggcccatcttgcccaggatgcgtccatccggcgaggtgatgccctcgatggcatagctggatccgttgatgttccattcgccgttcatcgtcggatcgccatcctcatccacatactgcgtagccacctggccgttttcaaacagcgccttggccatctcttcgctcaccacgaacttgccttcgccatggctcatggcgatgctgtggcactcgcccggcgtgaagccggccagccacggcgacttgttggaggtgatcttcgtcttcgccatgtgggaaacgtggcggttgatgtcattacggaacagcgtcggtgaatcggcgttcaagctgctgatatctccataaggcagcaggccggacttgatcagcgcctggaagccgttgcagatgcccaggatcaggccatcgttggccagcagcgtctgcacggccgcattgacctgcgggttgctgaggacattggcgatgaacttgccgctgccatccggttcgtctccgctggagaaaccgccaacgaccatcaggatctgcgccgaggcgatcttttcgctcagctccttcaggctgcgctcgatgctttccacattcaggttattgaagacgtaagtctcgacgatggcgcccgcacgctcaaactgctgcgccgtatcgtattcgcagttctgacctgggaacaccggaatgatgactttcggatgctcgatcgtctgctttggcttcagcggctgttcgctcacatattccggcgtcgtgatctttttcttctcttcatcgacgcgtaccggataaacggcctcataacgctcgcgccatgcgcggatcgccgcgtcgatggacaccttctcgtcattgaggatgatgtccttttcctctgtggtgatgcccagcagggtgaaggcatcatccaggatgctctcgttcgcctcgacgacgatgcttcccggcatcaggtcatagaaggacgcctcgcttctgcaggcagcgccgatatggttgccgaagctcatcttgcagacggcttccgcgatgccgccgaattttaccgtggaggcagatacgatcgtgcccttgcggatcagctcgcgcaccttgtcgaagttgctcttcagttcggtgtaatccggggtgtgatccgcatgcggatgatgcgcgatcacataaatatagtttccggctttcttgaattccggtgagatgatctgttcgctcttcgccgtcgtcaccgcaaaggtgatcagcgtcggcgggacatggagctgattgaaggttccgctcatggagtcctttccgccgatggacggtgtctcaaaggccagctgcgcttcgatcagaccgagcagggcctgcatcggcttgccccacttctgcggatcatcgtgcagacgctcgaagtattcctgattgctcagacggcaggtgcggtaatccccgcccatcgcgctcacgcgcgccagcgcttcaacgacagaataggacgcgcccagatacggggagaagcgggcaatatcgggatcatagccatgcgtcatgatcgagcaagtgttcgtaaagccgaacaccggcagcttctgcacgctgccttcggtctccgtcagctgatattttccgccaaagggcatcagcacggtcgactttccgatagaggcgtcaaacatttcggccataccgatctggcaggccacattcggcttgcgcaggttgtccaggatgttggaggataccggagcgaacgggtcatgatcccgctctccttctgcgatctccacgtcctgcacgccgcgcacaccattggtatccaggaaggcgcgggacatgtccacgatcttttcgccctggaaatacatgaccagacgcggctcctcggtcacttccgccacgatgcaggcatccaggttttcctcataggcacactggcggaacgcctcgaaatcgttcttctcgatgagcacggccatgcgttcctgtgattcagagatggccagctcggtgccgctgagcccggcatatttgaccggcacactgtccaggttgatgttcagcccgtctgccagttcgcctacggcgacgctgacgccgccggcaccgaagtcattggccttcttgatcatgcgggtcgccttcggattacggaacagacgctgcagcttgcgctcgatcggcgcgtttcctttctgcacctcagaggagcatttggtcagtgaggtatcattatgttccttggaagagccggtcgcgccgcctacgccgtcacggccagtcgcaccgccgatcagcacgacgatgtcgcccggacatggtttttcccgcttgacgtttgccttcggggcagcgccgaccacagcgcccacttccatgcgcttggcgacatagccctcatcatagatctccttcacataggtcgtcgctaagccgatctgatttccataagaggaatacccggctgcggcacccttggagatgcggctctgcggcagcttgtgctccatcgtctcgctgatgtccttcgtgatgtcgcccgcgccggtgatgcgcatcgcctgatagacgtagctgcgtccggaaagcggatcgcggatcgcgccgccaagacaggtagcagcaccaccgaagggctcaatctcggtcgggtggttatgcgtctcattcttgaacatgagcagccagtcttcttctttgccgtccacatcgaccttcacttcgatcgagcaggcgttgatctcatcgctgatctccagatcatcgagcttgccatgcttgcgcaggtattttccgccgatggtcgccatgtccatgagcgtcatgaccttgcggtttccatgcacttcctcgcgcagcttcagataagtctcataagcgcgctgtatcgtctcctgcagttctccggccttgatggtcacattctgcaggatggtctcaaaggtcgtatggcggcagtggtctgaccagtatgtatcaaggaccttcagctcggtcatcgtcagatcgcgctgctcctcatcgcggaaatacttctgcacgtgcttcaggtcagccagggtcatggccagcccttccttgacgcgcagcgcttccagcgccgcttcatcgaagccgatgaacccttcgatgaccggcaccggctcgatctccacgtcttcttcattggcgagcacgctgagatccttctcgcgcatctccaccgggttgatcagataatgcttgactgcctccagctgcgcatcgctgacttccccttccaggatgacgatatgtccgctcttgatcacgacatcgctcttattgttgagcagcatcaggcactgctgagcgctgtcggcacgctgatcatactgtcccggcaggcactcataagccacatatgtcttgccttccagatccagcgcgtcgtcgacctcatcggtcacgatctctgagagcaccctgcgccggagcagatcgatgtcatgcgcatctgcattgaagacatcgtaagtgttgtagagggtcacgccgctgagtccgttcaggttcaggctggtcttcagctcatgtcccagtgaatccgcctctacgcggtacgcttcctttttcttgacaaaaatgcgtgtgttcattctcttctccccttatttatccaagtaggaattggcgagcaccttttccgcctgcgccttcttgaagtcgatgactttctgcatgacagccggatcggccagaccgatcatctgcacggccaggatcgctgcgttcttggcgcctgccttgccgatagcggtggtcgctaccgggatgccgcctggcatctgtacgatagacaacagggaatccagcccgcccagcgcgcttgtctgcatcgggacaccgatgaccggcagcggggtgctgctggcgatgacgcccgccagatgcgccgcgcctccggctcccgcgatgaacacgcggatgccgttgtccatcgcttcttctgccagtttcagcgtttcgttcggcgtgcggtgcgcgctcagcacacggacgacgtaaggaatgtcaaattccttcagcatgtcgatggctgcctccatcgtcggaagatcagacgtgcttcccatgacgatgcagacctgtggttttcctgtttcgctcataacatttcctccttcaaaaaataaagtgcatgtcaaaaccaacatgcacgacgaaaacaattcagctgtgatattaatatagtgcatctacctaagaccataagtaaaccctcctataaaaatataaaagacacccgcccgcggaaatctcccgcaatttcatctgaaatccctgtgtaacgctcgtcgcggtcaggcaggctcgctgtccgtgaatatcatacatgagtttcccttttcctgcaaggcttttttgctgtacggaaaaaaagagatttctgatcaggtccggaaatctcctttgtatatcgttcactctcattcatcacgaccagtgagaccgcagacaattcaggcagcggccgtgatcgaaaatgatcctcaagatcagccgctttgcaggccgtcattcacttatgaccttaataatactcaagcgaatatggcaggctgttgaccacattcaccgctgtaccaaacaggcatgcgcacgccacgaccatcagcgcgcagagcaccgtgccgacgattccgcagacgaaacctgcagtagccagaccgttcgggccgttcttacggaccttgttgccaagtatgatggcgatgatgccgcaagccaggccgatcacgccgccgatgacgctgaaaaaataacatacgatagaaacgatgccgagcaccagtgaagcgacggctcttccatgatcatcttgattcattcgttttcccctccttgtctttattctgacacagatatgtatcgcgtgcaaccaaaatcaccatcatcgtgcctgcgcgtgccgccataccttgatggccagcatttgcgcaccgatgcccaaaggaacataaagcagcggcaggagcgcgagcaatccaggcaaaaactgctcaccgatccagatgatatcagcgcagcgggcaaacttcagcggctgaaacacagagaggacgatctgccaggccgaatagccattgcttgccatgaaccacagggatcctgccaaaaacaaaacggtccatgtctttgcgcttgagagaaagtgtgaataaaaatgcgtaaaaaaggccgacttaaaaacaagtagtaaaaaat

SEQ ID NO: 3605 - DNA, 7784 bp, Unknown
  16S sequences of unknown bacteria
cgtcgcctgcctcgttgatctggacgatgccaaggcactcggccggatacagcggcacgttgcgcatgaacttgcctgagcccgtcgtcaagaagtacgcgcctttgaggttgtccgcctggacgcccatctcgacccacggacgcgagaactcgaagtcgtccttgcacgcctcgacgtccttctcggtcatgcggtaggtcaggttgccgccgtttgcctcgtgccagccctgctcgaagccgtccatgcacatgcgctcgaagcgctcgatgcattctgctgtgaatacgctcatgtgtccttccccttttttcgaacgtaaaaacggcagggcaccgcacgaccggcggcaccctgcccatcttgaatctagtcgcggttgatgagaacgcgctcctcgtagtctttgacgactggccacacgccgtcgtcggtcgggacgccctggcgcctgcagtactcgtcccagaccagcgtccacggcatggtcttgaactgctcgaacaccatcatgcgctcggagtcctggtaggtgtcctgcagcttcttcagacggtcccacggctggagcagctcgaagagcagcgccttctccatagtacgcgtgccgacggcccaggcgccgatgcggttgatggccgcatcgaagaagtcgaggccgatgacggtgcgctcccagccgccggggcacgcgacaatctgcgccgcgaggttcttgatgtcgtcgttgaggacgatgacgtggtcggaatcccagtgcatcgggcgcgtgacgtgcagcggaacgtacgggaagaactgcagcaggctcggcagcttgtcggagacgtcctcggtggggttgaaatggcccgtgtcgagcagcacgcagaagttgccgcccttcttggccgcgtaggaaacgtagaagtcctggttgccgacggtaaagccctcgaggccgacgccgaagaccttctgctccatcgcgtcgatgacgtgcggggtctcgaaggagtagatctcgtccagcgattccttcaggcgggcgcgcatgccgtacttgtcgccggcgatgtccttgaggccgtcggggatccagaagttgttgaggaccatgtcgtcgagctcctcgccgatgcgctcggcgatacggcggcatgcctggccatggcgaatccagaagtcacgcgtctccttttcgggggaggtgacggacaggccgtggttcatcttggggtggctgaagaaggtcgggttgaagtcgatgccgtagcccttctcctttgcccactcgacccacggctcgaagtgcttgtactcgatctggtcgcggtcgacccaggggttctcgtcggtgaagatggcgtaggacgcgtgcaggttgatgcgcttcttgcccgggatgagcgtcatcgccttctcgaagtcggcggtgagctccttgaagttgcgcgcgcggcccaggtagttgcccgtggtcatgatgccgccggatgcggcgttgtcgtcgccctggtcaaagccgacgacgtcatcgccctgccagcagttgaccgaaatcgccttgcctgccagcttgtcgagcacggcgtcggtgtcgatgccctgcttggcgtaggcctccttggcgtactcgtagacgttttccatgttgcactcgctttctgttccagccggcgttttgtcgccggcacgtttgacgtgcagtgttgcaagcccggcgcaaggggatgcgccacgccgcactgtattcagaccggctattcgaccggcagaatctcctcgatgctaaacgacgccctgacggagtcgcgcgcctcctgcaggctcgcgaactcgcccgttgccaaaaactggacgatgaggttgccgatgctcgtgccctcgatgggacccgcaaacaccgggacgccgcaggcgtttgccgtcatctgattgagcaggccgtcttggcagccgccgccgacgatgttgatcgacgtgtacgtgcggccggtcagcgcgctcaggtccgcgatggccgcggcgtagcagctggtcaggctctcgtacacgcagcgcataatctgccccggcgtctcgggaacgggctggcccgtctcctcgcaggcgagcctgatctcgtcgatcatcgactgcggcgcgagaaagcggtcgtcgttgacgttcacgtaggcgtggaagtcttccgcctggcgcgcagcggcgacgaggtcgccgaagccgatttcgggctcgccgtccccacgcagcgcatgcgcgcttttggccgcgccctcgacgtagctcacgccgttgaactcgcggcgaatggactggttcatccacaggcccatgatgtttttcaagaagcggaagcggtacgcgtagccgccttcgttcgtgaagttctgcaggcgcgccgcctcggtggtgatggggccctcgttctcgacgccgagcagactccaggtgccagagctgatgtagaccgcgtcgtcgtcgcgcgccggcaccgccagaaaggccgagccggtgtcgtgcgttgccggcagcacaacctgcgcgtcaaagccgacgcgacgctgcacctcgggcagcaggccaccgagcaccgcccccggcatctgcggcgtggcaaacaggcgcgacgggatgccgaacatctcgagcaggcccgcgtcccagtccttcgtgcgagcgttgagcatgttcgtggtggtcgcgttcgtgtactcgttgaccgccacgcccgtgagcaggtagttgaagtagtcgggaatcatcaaaaaacgcgcggcgcgctcgagctgctcgggatgctcgcccttgagcgcgatcagctggtagagcgtattgaacgcctgacgctggatgccgcaggagtgatagagggagctgggctcgagctgctcgtcgacgcgctcgggggtgccctgggtgcgctcgtcgcggtatgcgacggcatcgcccacgagcctgccctctgcgtcgagcaagacgaagtcgacgccccaggtgtcgatgccgatagtcgaggggaccttgcccgcgtccctgcaagcctcgaggcccgcaagaatgctctcccacagcatctcgacgtcccagcagtcatgccctgcgctgcgcagttgcttgttgtcgaagcggtagagctcctcgaggaccatacgcccgtcctcgacgtgcccgagcacgtggcgcccgctcgacgcgccgatatctatggccagatggtaatcaggcatcgatggctcctatgcgtttgtctcggaatctttgatctgcacgacgtacatgacgttcgtgccggcatgcgcctcgcccgcgacggcagaggtctcggggctcgtctgggcatcgcccgcggtgaagacggcgaggtcgcccggcttgacgaggccgcgcgcgagcacctgctcctgcgcgttggctatggtctgctgcatggcgacgcgtgccggaagcccgccgctcatgggagtcacgccccagaacagctgcatgcggcgcatgacctgctcggagggcgcgacggcgtagatcggcacgcgcgggcgcagcttggagacagcgcgcgccgtgcggccggtgctcgtcgggcagacgatgcaaccggcattgacggcatgcgcggtctggacggccgcccgagcgaccatcggcgagaccggcacgggctcttcggcgccggcggcgtctgggccaggctgccgggccgcgttggcggcagagccagccaggtagcgctcggtctgcgccgcgatgctcaccatcatgcgcacggtcgtgcccgggtacttgccgagcgcggtctcgctcgacagcatgagcgcgtcgacgccatcgtagacggcgcttgcgacgtcggccacgtcagagcgcgtcgcacgcggctcgccgatcatggattcgagcatctggcctgcgacgatgacgggcacgcgccgctcgttgcacaggcgcacgatctgcttttggatatggggcacgcgctcggtgtccatctcgacgccgaggtcaccacgcgcgatgacgacgccgtcgcaggcatcgacgatcgcggcgatgttgtcgacggcacgctcgttctcaatcttggcgatgagcccgatgccggcgccgccgtttccgtcgagaaacgcgcgcacgacggcgaggtccgcggcgtctcgcacggcggggacagccacgaagtcgacgccctgctcgatgccgaacaaaaggtcgcgctcatcgtgctctgacatgatgggcaggtcgatctgcgtgccggggaagttcatgcccttgtgctcgcgcaggatgccgctgttctgcaccgtgcagacgatgtcgctcccgcgcgtctcgtcgaccgccagctcgatgaggccgttgtctatgaggatggaggtacccgggcgcatatagcccgcaaggccggcgcaggtctgttgcacaaggcggctcgtgcccgcgaccggggcttccgtgagcgtaatctgcttgcccgcctgcaggcgcacgggggctccgtcgacgagcgcgccggtgcggatgcgcgggccgcgcaggtcgagcatgatcgcggtcgaggcgttgagctcgcggcgcaccttcttgatgcggttaatgcgcgcgagatgctcgttttggctgccgtggctgaagttgaggcgggcgatgtccatgccctcggcgatcaggttcctgagcgtgagttcgctgtcggaagccggacccatcgtgcagacgattttggtccgcttggattgctgtactcccattgcacctcgaatatcttgactcgcattgctgcttgcgtcgccacattgtagccgcaatagaagcattttcctatggacttttttcgcccgccccttgacgaaaggaggcgggccctctgtcgcagcgacagggaacccgccctctgtttgcgtatgtgggtgcggggaggcacgcctctacggcaggaggcgttctgcgatctgcacggcgttgagcgcggcgcccttgcggatctggtccatgacgaaccacatcgcgaggccgttctcgacggtgcggtcgatgcgcacgcggccgacgtacacgtcgtcggtgccctgtttgaggccgggcattgggtagacgaagttcgcgcagtcgtcctcgagcgtgacgccgtccgtagccgccaggacttccttggccttctcggggctgatcggcccgttgaactcgacgttcacggactcggcatggcagcgcagcacggggacgcgcacgcaggtcggggcgacctcgatgctgtcgtctccgaagatcttcttggtctcgacgaccatcttccactcttctttgtagtaatcgtcctcgaccggcacgtcgatgtgcgggatgacgttgaaggcgatctggtcggagaacgcctcgatcgtcagcggctcgcccgcgaggaactgcctggtctggttgtagagctcattcatcgccttcatgccggcgccggatgcggcctggtacgtgctcacgacgatgcgcttgatgccgccggcagcgtctgccagcgccttgagcgggacgaccatctcgatggtggagcagttggggttggcgatcacgccggaatgccacgcgaggtcgtgcgcgttgacctcggggacgaccagcgggacgtctttttcctggcgaaacgcgctggagttgtcgatcatgacgcagccggcgtcgacgactgcctggcggaactgcctggagacgcccgcgcccgcgctgaacagggagatgtcgacgccctcgaagctttccggggccatctcctcgacggtgagctcgccacctttgaacgggagcgtggtgcccgcggagcgcgcggaggccagggccttgaccttggatgccgggaaatccctctgctcgagcaccttgagcatctcacagccgacgacaccggtggcaccggcaacggcgacgacaggatttgcgggcatttctttgttccaaggcatagcggccccctcgcggacgttgtggtcagacttgtgaatgcacgatagcactaccgccgccaaaagcatcggtgcgggcaaatatgctccgcggaaacggcggggctggcgagtggacggacggggtgtcccttcgtaccaaagtggcacgatacccacggcccctcgtgccatttgtaccagttagagggacatggcgcgggcgagcttggagagcggttgcggcgtgaggtgcgccgtgtcctggatgtcgagggcaaagtcgttgaacgcgtcgagcgagccgcccttgtgctcgagctccatctcgcggaattcctgctcgcgcccctcgcggcgcaagaccccctcgtcaaaggcgagctccgcctcaaacgcgtccgctgcgccctgcgcgcccaccgcgaggccgaacgcacggcggtcgaactcggtctcacagttgaccttgagctcctttcccgcgagcatctcgcagacgtcgcggggagcgcccacctcggggagcaaccccagcgccttccggatgtcgtcgcaggcgacctcgtattcctcgcgcgtcgccctgccatcgctcacctcgacctcgagcttgagcgagcacacgctgacgccgttttccgcgcgcttgcgcagaccgccgcgcagggcgaacacgtcgccgtcgaccgtgtcgtagtaggtcgcgtgcatgctgatgttctcgacgccgcggatatacggcgagagcttctcagccgcatcgagcgccgcaagcccgcccgcatccgtcaggtcccacttgtactcgacttccacggtgcgcctcctactctccagatgcagccgcttgacctgcgacgataccgctcgcccacgcccagtggaggttgtagccgccgcacttcgcgtcgacgtcgagcgcctcgccgcacgcatagacgcctggggtcaccagcgactcgagcgtgtccgcatcgaactccgatatcgccgcgcctccgcgcgtgacctgcgcgtgctttgcgtcgcccacgcccgcgacctcgatgcggaaatcgttgcagaccatcgccaccttggcgagcatgtcgcgctccacctgcgcggacggcttcacgtccgccatgcgcaagatggcgtcggcaacgcgcgactggaacatgccacacaaaagctcctggtagctgggcacctgccccgtacgcgattcgcccacgaggatgtccaggtgctgctcgagcagcgagagcgtctcgtcttcgttgaggccgggcagaaagtcgagcgaaatcaggtcctgcggctgcgcgtagcgcgacatgtcgaagatgacgacgcccgaaagcccgtaatcgcgaaagagcacctcgccgtattcgctcgcaaagggctcgcccaccgtcgtgccgatcgcatacacgttgacctgcacgcgcgcgcggatccccgacagccctcgaatcggctttctgtcggttgccagcgagcacaagatgggatggaacggctcgatgacgtgcccgctttttccgagcaggccgctgccgccgcccgtcgcgacgatgtagcggtccgcatcgacttcatccaagctggagatgggatggttgcactcgaccgtgacgccgaggcgctcgacggcgagcctgagcacgtcgagcacgctcgtcgcggtgttggtgagcgggtagacgcgcccctcgcgttcctcgaaggtgagaagccccaggtgcgcaaaccagttgcggatctcctgcgggccgtacttgctcaaagtgcccgccacgaagtacggggcgttgtagtcctcggggacgatcgtcgtgttggtgaggttgcagcggccgttgcccgtggcgagaa

SEQ ID NO: 3606 - DNA, 12545 bp, Unknown
  16S sequences of unknown bacteria
aagcacaaaacatgcaatagtcttgaatgaaattttgactttgtcaatactctgagcggttgtggggacgccgtccccacaaccgctctttctcttattacgcttgtgctctttgcgcgtcaatttgccaatgcctattgtgccagataggtgttgtaatagtagtcgctgtagatctggagatattcttcatagcccaagccatcgagcgtgttgaagaagttttcgaggttctcatcgttgatctccagatccccggaaacgaacagagcgtattgctcttccacgtaagtgttgatcggcgtggcaagctcgttgcagcgctcgttggtttccgcgtcgaagaagcgcagatccggatagccgtccaccagatagggcaacacatgctcttcttcatcgtggttatagacgggcgggttgtattcgcgcgtcgcctcttcaaacatgtcgtagcccaagcccaggtatccgccaatgatgccttgcacgcgcagattctgataatcgccgaaggaattgtaagtgccgttttctatttcggcgcaagtccattcatagcggccttcctcattgagggtagcggtgtagccgctttccaggccatagaggatatcggtttcttccgcgctggggccgtagtgcatcaggatatagttgtcgtaatcgaagtgccagtcgagccacttcatcaggcgttccaccttggcgggatcgcacgtagcgctgatggagaaggactggttgttcacggcgctgtaggaacgatagacctgcgaggtgggattccaatccgaggtgaggaaatagcagctcgtccagtcatcgggattgatcacgccggatgtgttctggctaaagccggtgaggtcgttcgccttcaaggcggcggtttcatcgcctgccacctggtcggcaaagaggttcgggctgaaatagcccttttcgtaatagtcatgcacgaccttcaggtattcggggaacacttcgcggtcgccatatacgaaggtgggttcgccgttgcgcatggcgatggtcgtcagagaagccgcggcgtgcgtgataaagccgaacgcgttcatgataaagcggggactatctcccaggtcgcccgccatgggaaccacgtcttcgccgcgcgctttgaaggccgccatcacttcggagaactcatccagcgttttgggcacttcgaggcccgcctcgtccagccacttctggttgatgtagaacgtcatgcaggagttgtttgcgttgttgaaggaacccagcgaatagatcgcgccgttggaggcggtcagcatcgcgcggtaggtggggttcgagtccaggatgcgcgtgaggttgggcatgatttccggcgtgatatacggcgccaggtcgatgagcagcccgctggtttcgccgaattccacctgctgcgcggaggacatgaacatctggtagaacacatccggcatatcgccgctggcgaaggcgatggacttatagtcgctggcggaggtgacctgggttacggtgaaattgatgccgaactgttcgcggcaataatcccaccaccaaatatcgtccgcgttgccctggttggagcgctggtataccacaatggaaacatcgataacgtcttcttcggcgaacgccgcgcacaggctagagagcaacacgagcgacaaaagaatgctaagcagcttcttcataatgcaatgcatctcctttttcatagatggtgtcggtcatggtggctgccaggtgctgcgctatccctttagggatccgatcataaccccctttacaaagtatttttgcacaaatgggtagagcacaagcataggtgcgcaagcgatgaaaatgatggcgtatttcatggtatacaccataaatgcctgatgttgcagcatctcaatttcttcttgcgacatcatgccgtaatccagcgattgcgtttggttcaggatcagaatctggcgcagccgcagctgcaagggccattttttctgatcggtgatgtagataaacgcggtgtaccaactgccccacgtgcccaccgcggcgtacagcgccataacggcgatgatggcgccggagagcggtagcgcgatttttagaaaggtttgccattcagtcgccccgtcgatataggcggattcgaacaattcgttgggaatgctggtttgaaaataggtgcgcgtgatgatcaggttggaatagccaatgcccatgcccaggatcataatccagcgggaattcaccaggcccagattgcggttgagaatatagctgggaatcaggccgccgctcaggaacatggtgatgaaaaaataccaggtgatgacaacgcggccgggcagctgctttttggaaagcgtgtatgccgcaggaatcgtgagcaagagcacatatattgtgtgggccacggtatacaacaccgtgttcgcgtaagaaagccagatatcccggttttcgaaaacgttttgatacgcttcaaaggatatggttttcggccacaggtaaattccgcccagcgccgcttcctcgggcgtggcgatggagacgatgatgatgtaccacatggggtaaatcatggtgagcgttatgagcgccacaacaaaaacgttgatcacatcgaacacgacgtcgccccgcgtgcggcgaatggcatggtgctttggtttgcccagcgctttgcgtctcgttatggtcatggtttccgctcccttctaccacagcgcgatgtcggacactttgcgcgcgatggtgtttgtgagaatgatcaggatcaggttgataaacgtgttgaacaggccgatggcagcggaataatcccagtaggccgtggttccacccgcgcccagcgtgcgctcgtacacgtaggtggaaatcacgcggctggcggacaagttcaaatccgtttgcagcaggaacaccttttcaaagccaacgcccataatggagccaacgcgcaaaatcagcataatcaccaccgtcggcaggatggtgggaatgttgatgtgcaccactacatcccagcggctggcgccatcgatgcgcgcggcttctatcaaatcgggcgaaacgttggaaaggttggcgaggtaaataatcgtgccccagccgatgccctgccacacgcccgaccacacatacaggtgatcgaaatatttcgccttgtacatgaagggaacgggttccccgcccaaggcgacaatcgcgttgttcacaatcccaccgtccacattgaagaacatgtgaaccattgcgcacacaaccaccgtggaaatgaagtgcggcatatagctgatcatttgcaccgtttttttgaacttatggttcgtaagctcgttgatcatcagcgcaaagatgatggagcaggggaacgtcgcgaaggaatataggctgatccggatggtattccacaggatcggctcgaagtatgggtcgcggaagaaagccataaaatgttcgagaccggcccagtcgctgccgagaatgccgtcgatcaccttataatccttaaacgcgatcaccacgccatacaggggtatgtaatgccagataaaggtggtgattatgggcggcaatacaaacagatatagctgccaaaaccgccgcatcaacctgcgtgtgttggcccattgctttttgcgcaacgcacgggccggggaacctgcataggtccttatcatcggtctatcccctcctgaccaatttgtcgatgggttgcatggcgcgcggccggaatcgccgcttggaaattttgggtgcaagaaaccaagcctccggcacgcgccggaaagcgaaaccgaaccatgggtaagaaaaatccaacggctgcgccgcgcgcagccgcaaaccatcttataggggagcggatatggcccgcgcgtgctcgcggtgggaaaaacacagcgcaatttcccggttgaccggcgaccaatccgtggcgtacaggctgaaagcgtccttgcgctgcggaacgcttccgcgcatggttttgtggtacatatggttggcaaacaggccgcgcaccgtcacttcgcagccggtttcgacattttccaggcgcgcgtcgccctgttttatggccaactcgccgcccgcagtggtgtcgagaatgacttgactggtttccagacgcgtgcccgcgggcacgacaaattccagcttaaagggcacgtgcggcgtgttgtccacgcgaatgcgcatggtcaggccgttttcctggtcttcaacatccagcgtataatccaaatcgcagggattgagcacaggtctttgagaatggtccatttggaaccaatccgaactggcgggcggcgtggggaaaaggcccttgtattccccatgggcccggaatgtcatgcggtagcccgtttcggtttttgcaattttggtgggcgcgaattgcgccacggcgaaaaaggaagaacacatgcgcgcggtcatagtagctttgccaaatttcacgtgcaaaaaatcgggattgttcgccagtagcgtatagctgaaatcgcccttgcgaacgcgcaaaatgttggaattgggataaaacgcgtggtacgatgtaggaagcgcgacgccggatagatccacgtccagcgctttgagttgcggtttttccagatacagccacagcggcgcgggtacgccccgcccctccatgacggacgagcggaacatctcttcggcaaatttgagatatttcaaattgccaaatttttcgcctgcccataggtataaataataccacagatgcccgggatatacccgttcttcccctttgtcctgccggcgggaattgcgcgtgaaaatggcgccgtccccgtcgcaatactggaaagtgagttccaaattccgctgggcgtattcctccaactggggcagggtgccttcttccgccatcaccagcatggaattgacgttgatggggttgtagcatcccatggagcgctcggtgaattctccgtattcgtcgcaatcaatcccttcggaaagatagccgtccaccttttctctgagttccttccagccaaaaatgttgtggcacatcagcagcgcggcgcattccacccagcgatggttgggcgtgtggaagccgccgtttaggcagcccttggcgagcagggccagggctttgagcatgtggtcgcgcgcggcgcattcctccgccgtgccttgcatatagcgaacaaagtttttgtagccccggcaaaaagcttggatttcaaaggtagcgggggtgtaaaaattggtcgcgagaaaatccagcgttccatttgggtggcaaacgcgcaaaagcatatcgcaggcttcgtgaatgtaggagaggagacttgcatcgcgaaaataacggctttcttggcaggaatacacggtgcagcacgcgccaatcagcccaggaccgctgcccggctcaatgagataggtcatatcgtccagggccccgcaataccggttggcaacatcggtgcagcgccgggttagcatgcgggatacgccggcatccatagcggatacgattagaggataatgcgctttcacaagctcgctctccttccataacagcagggtgggtacttgtaatgcacacataacttaacttggacggcaaagattgatgataaagctcactttagttgtattatatatcggaaggaaaataatgtcaatagtttatgtttatttttacgtaaattacaaaatgtatatataaaatcgatataaataatagcatataaacaaaatattataaaaaatagtaaaatcgatagggcgaaagaacgatttttcgatgccgatttgggaaaattgtggcgctgctatgcgtagaaacgcagccgtgtggatttggaaaaccgcaaccctttatatatccttgggggcttcaaagagctgaggccgggcaaaggttctccccccttgcccggcccattcatgccgtcgcgttgcttttttcttttcccagctgccctagttgctccttgacggcggcctcgatggcggcgcggtcggcggtgaagccgcgcttttcgagctcggcgatcacgtaatcgagcttttccgcgcccttgcccgcgccgtaaagctgctccgccgcgtacaccagcgtcttgaccgtggccgcgagcagcgattgctgctccgccgtggtgcgcgccttgatccacgggatcagcttatatgtcaccagcgccgccagcagcgcgaggattgcctcaaagatgggcgtcaaatcgatcataacattccctcctatttctcaatcaaatacgtttgtagcgccgcgcgggcgtccttgagcttgtccacgctgttgcccgtgatttcgtggtccagtagggccagcagcgcgcgggcgaaagcgcggttttcctcttccaggtcggtgagccgccggtagtccttttccaacttgcggtcgtgctcgtccgcctgcgccttgagctttttgtacggcgaaaacaggttcgcgatcaccttcactccgcccgcgatcaccgccactccgccgaaaatggccagcgcggtttcccaggttacagaaagattttccatcggtcagcgtacctccgcgtatttgtcgctcacccaggcggtgccgtcgccgatggcgatgcaatgccagccgtttcgcgccgtggcgatgtgcggataggcatcgcccttatgtacgacggtgaggatgccgtaccccgtggccgggcctttgcgcgcgttgacgctgccgcccgtgatcaggaccatgggcacgctttcctccggcgtttccgcctcctcgtctccggcctcgccctccatctccgagagcgcggccatcagcgccgcgtgcgtcaggctgccgtattccccgtcgggcaagagcgcgtggtcgcgctggaacgcctgcaccgcggtttccgcgccgaattccccgtccgccccgcattccggcagagcgtagcccagagatagcagcagcgtttgtagctccttcacgtccgcgcccgcgcagcccttcttgagtagacgctcgcccagcgcgccgcctgcgtcgccaccgtccgcctgcccgtctaccacccagcggatggccatgaaataccgcctgcggctgtccgcccggctccggcagtattcgcgcatatttttcacgcgcggccccgtgccgctgccgtgcccgcagatctgcccgttgccgatgtacatttccacgtggcccacgtccagcgcgtgccccgtgttgcccttgaaatacaggcagtccccgggcagcagctggctttcatcgggatagtagccctccgtctcatggacgatcttgccctttgcccggttcttgatttgcgcgttggtgttgctgccgatatccacgcccgccgcggccagaatcgccgcccgtgcggcgctggaacaatccgaatagcccgcctggctcgtattgcccacctcgttgtccgggtagccccagaaatactttcgtttgctgccctgcgtgtagccgttgagccccgcgcggctttgcatcagccgcgcggcctgctcgcccatcgtttgccaaagttccataggattccctccttacactgcttcccacgcctgcgcgtattcggcgggggaaaagttcgtgtcctgtaggcatttgtacatttgcccgtccgtccagatcatgtattctcccattttgtatcgatcttcggaaccaagtggttgcacccacggccgcgccgtttcgggcgtggtgccatggtattgcatccacagggcttgtgtattctccggtgtccaatttacgttggctgtactatcatgcgcctgtatacaacgatagggaatggcattgtattcgcgaacgtcacccacttcataaacgcccggaacccatatccgtgcgagaatatggatattgtttaatgccgccacatcctctttcgcggaatcaacgacgcgatccattgcgctacgatatttcaaaagaagttctttttgcgcctcactcatccacatttgtaattcccccttctaatatcgctatagcttccgagactgcacgattatctccaataggcaaaggcacctgcacgccatccacgttgcgcgtccacgccgcgccattgtagtagtcgccaatctccatgcccagaggcgtggcttccagcagcgtagcccccaacgccgcttccatctccgctacctgttccggcgcgcagacgatcaaattcaccacaaagttttcctgtattaccgcatattttgcgttcatgtcgcgtcctccttcttccagcgaatgtatagcacaccctgatagccgctgccgcccatgccgaacattattacactactcacgtagcttccgccacctccgccagcggagccataaaacgtagcgttcccgccattgttcatcgaagccgcagagttcgaagccaatccgccgccaccaccgcctttttctccgccgctaccaccatacactgggccactggataccgtagtgttgtttccgccgtttgcgccattgctgccgccgcctccgccgctaaatcgtggaaatccactccatattccggccccaccgccaccgcccgcacaatgcgcgttggttaggccaaacgcggatggaattgtgctgactcccatacctgtgcctggcgattggcttgtgccgccagagccaccgccacttgcgccgttgccgccattggccccagaaccattgccgcccgcattggctacggtgctacctagcgaggttgcgcccgccgccgcgccgacgacgcatgctacattgcccgatagttgcacattcgcgctagcgatatagccgccaccgccaccgcccgcgccttgcacagtttgcgaggtatcgccgccattgccaccaccgccgcacagccacacatccacgtcgatggcgcggttcacagtcaacgtgccactgccggttatggtaagcatggtgtatgccacgccgccgatgcttagctcgctttcggcatatgtgcccgtatacgtataggcaaatggctgcgccgcgctgtaaaatagccgcgccaggccgcctgcgccaatgtagcctttaaccactttgcgggccaggccgtcaacacctatatacatgcctgctactttgtgggcggtttcgcccgagccaatatacactccgttactcatacaccagatacatctccccactcgccagcgcgctttcgccgggcgtcaaatccgccgtgcccgcgcggatgctgcgcacctgggcggtctccagtgcggccgccgccgtggcatcggccttcacctgtccagccagcgtaccggctgcgatcatgctggccggatgggcggaagggtgtacgtagttgttcgccccggcttctatccccgccagcttgtccttctcactggtcgtgtagtcgttggtggataatcctttgccgctttcggcattcaccttgcccgcgagggcggtctcaagcccggtcacatcactttgtgtatgcgtatgttccgccgcggcttttccggccagcgcatccgttaatcccacaatatcttcttgttcatgggtgtgctccgtcgaggcctttccggcaagcgcgttggatagcccagcaatatctacctgctcatgggtatgctccaccgcggctttcccggacaaggcggctgtcagcccggcaatatcgccctgttcatgggtatgctctgccgctgccgcgcctacctcctgggctgtataggttggctttgtgttactcagcgcccacgcgggcacgctgggcacgtccgacgccttggcgtaataacccggcagttgcccgcccaatttttctgcgtcgtccacgatgccatcgccgtcggcgtcatacgtcgcggccagcatgtcgcccgtgccgctgccgtccgcgccgtcgttgatggtggccgtgtgcgtaccctcggcgtccacgatggtgatggtggtgattttgccggatttgctcacggagatggtgggggacacgccgtcgtcgcccttgggcccgctggggccggttgcgccttgcgggccttgcaaaccttgtggcccggtttctccccgcggcccggttgcgccggtgggccccgcggcccccgtaggcccttgcggcccctgcggccccgtgacgttcacgctggcagggttggcaaggcccttatcgttcgtccaagacaatatgccttccgcgctcacgctcggagtgaaggtcgcgccgcgcagctcgccgctggccacttcctgtttcatggcggcgaattcggcggcgcgcgcctcctccgcatcttcgcgatcctcttccgcctctgcgcgcgcggcctcggcggtttcgcgcgcctcttcctgcgccaccgcgccgaggatcgcttcggttttcgccaaaatttcagccagagcggcttcggcctccagcaattcgggcagcgccaccgattcgatttccgcgttcacgtgcaaggattcgctcacgatcgcgtggaaaatgtccgaattccacaccagggtttcgccatcgaagatttccacttgcgcgccaaaaagtccggcttcctgcgtcgcgcccgcctccacagtccacgcccacccttccgcctctcgcgccaacggcgttttcagcggcagggaaaaatccagcttgagataggcgagttggtctgcggcgatttccggcagggcgaacaccaacttgcgcacgccgcggtctccccgcgcgcccaaatagatgtccccttctgccagcacgcgccctgcaaagcgatgcttgaaagtttccatagaatctttcacctcctgcctatagcatagcagaaggaaaaggggatttctactctattttcgaacattttttcgattattacaaaattcccgctgcgcgcgcttttccccttgcctgcgccgccgcaaaacggtataatgaaagaaaagaagggaggaatttttatgctataccgcacgatacccggccttgcgcgcaaggcgtccgccatcatcttgggcagcggcggactgggaacgggagaacggctggagcatacctttgccacgctggacgcttatgtcgccattggcggcaactggatcgacgccgcacgcatctatggcaacccgcccggcgatgtggaaaaggccattggcgaatggctgcgcgcgcgcggctgccgcgatcaaatcatcctcgccaccaagggcgcgcatccgccgtttcaggatatgcacgcgggccggctggatcgcgccagcattcaaagcgatctggccgccagcctggaagcgctgggcgtggaaaatgtggatgtgtattatctgcaccgggacgatgaatcgcgcccggtgggcgaaattttggaaacgctcaacggatttgtggaagaagggcgcgtgaagctgctgggcgcgtccaattggaaaacggcgcgcctgcgcgaggcaaacgcctacgcggccgcgcacgggttgaaggggtttgccgccaaccagcccaaatggagcctggcgcgctgcctgctggaaaccgacgacacgctggtgcaaatggatggcgaaatggcgcgctggcaccgggaaacgggcgcggtttgcacgccttacacttcgcaagccaagggctattttatgaaattgcaagcggggacgctttccgaaaaggcgcgcgagcgctatgatgcgccggaaaaccgcgcgatctatgaaaagctcctcgcgctttcccagcaaacggggcacagcatcggcgctttgcaactggcgtatctcaccagccagccgtttcccacgctgcccattgtgggcgtttcgagcctggaacaggtgcgcgcgctggaagaggccggaaacgtggccctcacgcaggcgcagattgacggtttgcgcacgatggaataggttaagcacaaaacgcggcaaaagcaaacgaggggggctgcctctttaggattctcttagaattcttttgaggcagcccccaaaccatgggctggctttggattcgcttatgtcgcccttggcaaagcaaaaatgcaagaaacaaaattcgatcctgcatttttgaagatagcggccgggtttataaacgagtagcccgctttgcattttgcaaagcgggcttggagtggatttgcttacagctgcgggccggcagccaccagggacttgccgtgcgcgttgctttcgtacttggcgaagttcttctggaagcgggaagccagatccttggccttggcgtcccaatccgcgggattggcgtaggtatcgcgcgggtcgaggatcttgggatcgacaccgggcagctcggtgggcacttcgaagttgaagtacgggatggtcttggtgggcgaattcttgatggagccatccaagatcgcatcgatgatgccgcgggtatccttgatggagatgcgcttgccagtgccgttccagccggtgttcaccaggtaggccttggcgccgctggccttcatgcgcttcaccagttcctcagcgtacttggtgggatgcagctcgaggaaggcctggccgaagcaggcggagaaggtcggggtgggctcggtgatgccgc

SEQ ID NO: 3607 - DNA, 7516 bp, Unknown
  16S sequences of unknown bacteria
aaatacttttgagtgtaaagaaaaaagataccgaaaaagtttttgcaatttgtccaaatgtatgttataatatgtctgaggaagatgtaagcgcggcgcaaagcggtccggcagcggagattcctaaggaacattcaaacgcatccaaaaagcgtgagcctatttccgcatacactccgtatacttccaaaaaagcgggcgccgagggactgcttgccgtgctcgattggtgcaaaaggcgcatcggcgtctttctcgggggcgcgctgttcgtcgccgcgacgctcgcggcaaacaatttcgttttcaagatcgaggtgacgggcgcggaaacctatcgcagggaagttctcgtcgcgctcgaagagaacggcatcaggacgttttctctctatcccaaggacagggaagaagaggtggccgccaagattctctccctcaaagacgtcagctattgttcggtggaaaaatcgggcatgaccgtgaaagtggatgtgcgcctttccgccttttcggagccttcccccgaggaaggggatatgcttgcgaaacattcgggcaccatcgtccaatccgccgttcttcgcggtacgcccctcaaaaacgccggggacgaggtggaggcgggcgaaacgctcgtgggggcgtatctgctttccgaaagcggggaaaggacccccgtcacggccatcgcgcgcgttaccctctcctgcgtttacgacgaaatcgtcgccgcggattccgaagaacgggcgctcgccgaagggtatctcgccatagacggggaaattgcggaaaagacctgcgagcaaacggacggcggctttcgcgtgagaatcgtctatacggtcacggaaacgatcaacttctgacctcgcgttccgccgcgatttttcacgaagagtttaaaacctgtttaaacgtcgaaagagcgaggggcttgcggcgtccgctttttcgcagaggaaaaacgcgcggcggaaataaggaagggagaaaatcttttccttcttccgtcgaaaatcagcaagaaagatccgcccgaagccttgcgcgggcgcttcggtcaaaggagttatttacggcacacatcaaaaagacaatcgacacgaaatcggtggacaagctttcccgcattctgggaacgttcgacgaaaatctcacgcttttatcgcgggagcttaacctcgtcacctatgtggacggcgtcaagatacagctggaaggagaggaaaaggacgtcgcgtgcggagaagaagtgctcgcagagcttttgaaattcgcgggcagcggcgaaagcgtggacagaagccgtatcgtgtattgcatcgaactcgccaaagagggcagagtgggggatatcgccgccgtcctcgaaggggtggtggcagtcacttcccgcggcaaacagatcaaatgcaagacggtgggacaaaagcagtacgtggacgccgtcaagaacaatacggtggtattcggcgtcggacccgccggcacgggcaagacgtatctcgccgtgtgccttgccgtggcggcgttcaagagcaagcaggtggaaaagatcattctcacccgccccgccgtggaagcgggggaaaagctcggctttctgcccggggatttgcagacgaaggtggatccataccttcgccccttgtacgacgccttgcaggaaatgctgggcatggaaacgtataccaaactgatggaaaagggagtcatcgaggtggcgccgctcgcctatatgcgcggcaggaccctctcgaatgcgtttatcattctcgacgaggcgcagaacaccaccaaggaacagatgaagatgtttttgacccgtatgggcgaaggcagcaagacggtggtgacgggcgatgtcacgcagatagatctgcccgaaggcaaaaagagcgggcttatccacgcggtgagtattttaaagaatatagagggcatacagatatgccgtctgacggataaggacgtagtgcggcatccgatggtcatgcggatcatccgcgcttacgaaacggacgccgaaaaggcgcgccgcgcagcggaatccaaagcggcaaaagagaggaacgaaggatgaatatacgggaaggcgaattgatttggacgaaaaaagaggtcgtcaagagcgtacttttgtttatgctcaattttttcgtgatgattttgattgtgggagcgctgcttttaggaaataagatgggcagcttttccgaaacgataaaagccaaccgcaccaattatctttatatcgtgttctgtatcctcctccttgtatggattttgtacttttactttttcttcgaggacaggcggatgcttaccagcggaaggagcatcgcgctggcgtttacagtgctcgatttatgtcttgtcgtttcctttctgttcggaaaaatagacatctatgcccgccccgtggcgttgtgcgcgctgctcgtgttcattctcgtcggcaggcgcgacgcgattttcatgaacatgatctgcgccattctcctgtttatcatcgacacgttcggggacggcgcggtgacgccgacgagcatctattcctccttcatcatcgctttcactgcgggcatgatcgctattttcttcggcaataaggccaagacccgcttccaggtggtgggaatcggactgatcatcgtcatccccgtcgatttcatcatctttcttttggaaatttcgggactggcgggcggaagctctgttgtcacggggaccgtcacgggctgggagcacgtgctcacgcagatgggctacgggcttttggggggcatcatgtcggcgattctctttctcgcgctgctgcccgtgttcgaatacgtattcaactgtctgacggtgttccgtcttagggaactgacaagctcggacgccaagcttttgaaaaaactcaaagaggaagctcccggcacgttcaatcactcgatgatggtggcgcagcttgcggaggcgtgcgcggcggcgctcggggaagacgtggacttcacgcgcgcggcggctctttatcacgacgtgggaaaactgcatcagcccgaatatttcacggaaaatcagggcgaatacaatctccacgacgaactgacgcccgagctttccgcggacatcatccgctcgcatacccaggacggatacgagctcatccgcgcccatcatctgccgcagtttttggcggacgtggctttgcagcatcacggcaccatgcccattcgttatttctatgccaaagcgctgaaaatgacggacggggagctgaatatagaggacttttcctatcccggacccaagcccaagacgaagatcgcggcgatcatcatgatcgcggacgcttccgaagcggtggtgcgctcgatgcagaaacgcacgcccgaggacgtggaaaaggcgattcgcggcatcatcgaagagcgcatggatctggaacagttctccgactgcgacatcaccatggcggatttgaccacgatccgccgcacgctggtgagcgctttgacgggcgtgtatcaccaccgcgtcaagtacccgtccatcaaatataagcacacggacggcaaaacgacgggtgaaaacgaatgaaacacaattttcgtatctattcggaaagcggggagtttcccgaggaaaacgcgaaggcgctcgaaaaggcgatggacgggttcgtggattcggatattccgctcgccgtggaatttattttcaccgacgaggaggaaatacgccgtttgaaccgcgaaacgcggaatacggacaaggtgacggacgtcctcagttttcccgcgctcgactccatcaagggcaaggctttgaaaaagagggatttccctttggagatcgacgacgagggaaaccttttgataggctccgtggcggtctgcgtgaagcgcgccgaggaacaggcggaagaatacgggcactcgtatcagcgggaactgcattatctcctcgtccacggcatcatgcactgtttgggctacgaccatctcacggacgaggaacgggcggagatgcgcgagcgggaggagtttattctcgcaaaactcggcatttcgcgggaaaattgagtctgtccgaaaagaagggcggcggggcgagcgccgttttgcccgccgtagagtaaggataaggacggcgcagaggactcgcccgaagcggcgtttcctcacttgaaatacgggcgatagctgtttcgccgcagggtgcggaacggaaaaaggaagcatatgagaagcggatatatagcggtaatcggcagagcaaacgccggaaaaagcactttgataaacgtaatggtgggcgaaaaggtttctatcgtttcgcccaagccccagacgacgcgggacaggattttaggcgtcctgacggaagagaacggtcagatcgtgtttgtggacacgcccggcatctataaggcgcacaacgccttgacggatatgatgatgcggacgacggacacttccgcgaaatcggtggattttattctgtacgttctcgacggacacgaaggggtacgggaggaggactttgcgctgttgagaaaatataaggcgctgggaatcccgatggccgttgcgtatacgaaaatcgacatcatgcctcgggagaacattccccccgacatggcgaagtttgccgattccgatatagatctcgacgtgtttcccgtttccgcaaggaaggggacgaacgtcaaaaagctcaaagaatttcttttttcccaaatgcccgaaggggaaaaagtttttcagcaggaaatcgtttccgacaggagcgagcgtttcatgatcgccgaaatcatgcgcgaaaaaattttgctgaaatacgacaaagaaattcctcacggcgtggcgatcgtcatcaacaccttttcgcaaggggacaacggcgtgtatgagatcaatctcgatatcgtctgcgagaagccgaatcataaggcgatccttatcggcaagcagggcagggcgatcaaagaggtttcctcttttgcccgtcaggatatggagaaatttctcggcgccaaagtttttttgaccacttacgtcaaggtgaaggaggattggcgggacaggccttcccttttgaaggagtatggctacgaggagtaccgcgaaaactgatttttttcgttcgcctctgccctgccctcgttcttccgtataaaagtatttgtttttccgcaccctaagcaatgggattatcccgcggggaggaaaacgaatgcacgacagaaacggtgaaaacggcgcggctcgcttggcgtgggaaatgtttgaaaagacggggaatatcagttattatatgctgtatcaggaactcaaacgggattcgaaaggccgttaaaccgctcttcttttgaaagaaaaggggcggaagacgcttttcgttccgctcgtaagcgcacaaaagcctttaaaagaggaattgcaaaagcgtcttttcgctcgtgccgcgtgagataagggacggaaaaaagcggagattttgcggctgtttttgcgttgccttcaaagcgcgtggaaaactttattccatgcgggtaaaaaaaatcggtttttcgttgaagacgaaacggggagagaacgttattccccatggatgagaagccattttttgccttgcacgagggcgaggaaaaggcttgtccggctcgtccaagaggcgtcttgcgcggaacgcgggaaaaaactgccgcttcgcaggaaacggaaaaaaggcgacttcccataagcaaacccccgcttatttgcggaagcgaaaagaggaaaactttttccgctcggcttcgaaaaacataggttttgcctcgtttgcagcgcgagaaaatccgtttcctccgagaaagggaagacttcttgtttttcgtttaaagccgaggcgcgggaaggcgtcctttgtcaagaagacggccggcagcttttttcactcggcgcggcgcaggaaaaatcacaaaatcccgcccttgggcaagaggcgcgcccttctctttaaaagggaagagagaacgtctgctttggaaaaacttttctttcgggcaaagaaagggaagaaggaatcgggaaaaacggagaagaaagcatggaatttaaaacggacgcgcttgttttacgtgcggcggattataaagagaatgacaagcttctcactctgttcaccccttcccgcgggaagctgacggcgggaatccgcggcgtcagaaagccgaaggcgaaactctctttcgcggcgcaacccttctgtttcgcagagtatgtgctcgcggagaaggggggcaggtatacggttatctccgcttacctgtacgacggattctttccgctgcgctcggacatcgtgcgctattacgcggcgtgcgcggtcctcgaaattgcggattccctgctcatggaggacggagagagtcaggctttgttcatcgcggcggtggaggcgctcaaaaatttcagcctcaccgacggcgacgcgggggagatccttctttcctttgcgatcacggcgctgcacgagtcgggatatatgctggatttggacggctgcggcgtctgcggcggcgaagtgaaggggagcgtatttttcgattttgccgcgggttacttcacctgcgcctcctgcgccttgggcgtgcgggcgagcgaagctacttacgaggtcctgcgcaaatgcgcgggactcacttacgacgaagagaagattcagggcggacaaaaacgcgctcttcgtctgatcagaacataccttgccgaaaagacggaggaagaatatccgtgcttcggcgaatttatccgtttgtacgagtaacggcatacgctttttctttctgcgctttgaacggtatttttcaagcctcgcaccaagctgcgatttcgggtgttcgaaacgtacttttcaaagaaaacggaaatattccgttttagttctttcaacagatttccgtagggaatgaagaatcggaaacgttggaaaatcaagcgcgagcgcgggaaaatgcaaaagccgtgaggaaaataagacgaaatcgggcgcttttttcggcggaaagcgccgccgtacggacggaaagacggggaataaagagaaatgcggcgccccgccgcgcaaatatcatatcatggaaaataaaataaacgaaaacacgcaaaaacaaaagaaggagcaggaaaagccgatggtgacaagagccgaaaaggcaaacagaatgagagcgattctccgcgagcttctcggggaaagaacgtacagatggaacgagcttctcgattcttccgccaaagcatatgcggacaagtatccgggagagatcgaggatatgaacgatttgaaaggcaaaatgggctccgtactgagcctgatggaggacgcgggcgaaatgcacttcgaagcgaatatttgctcgctcgtccgccccgaaaacgacgaaaacgaaaaacagaccgaagagaaaaacccgtccgccgaagaaaggagcgaaaagcccgatacggcgggaaaggaatccaagcccgcc

SEQ ID NO: 3608 - DNA, 21168 bp, Unknown
  16S sequences of unknown bacteria
ttatgaccgcgggagatacatcctcgcgcggggtgtgacgggctgtgccttccggcttgctttcggttttcacctttatgaccattcctttcggtatctatggttaatgattccggttttgcgttctgagcatacactgaacaagccgggttcccacggaaaaagtcctggatttatgggctttttccgtgggcgcggtcctgaatcagtgtttctcaggcggcagtgtcatgccgcccctttcgccgcggcatgacacacggccgttttcagagtgactttatcgtatccatcacatacttcgcgaactcgtcgcaggtagcgccggtgtcgcgcccggtgatgacgtatttcttctcctcgaacatacagatgtcgagcgctctctcgagcttgtccgcctcggtctgacggccgatgtgggagagaagcatgactgtcgcgcgaagcatcgagcagggatccgcgaacttcgcgcgcccctccttgaccattctcggagcggagccgtggatcgcctcgaacatcgcgtacttcttaccgatattcgcgctgccagcagtgccgacaccgccctggaactcagccgcctcatcggtgatgatatcaccgtagaggttcggaagaacgaacaccttgaaatcggtgcggcgcttcttgtcgacgagctttgcggtcatgatatcgatgaaccactcgtcggtcgtgatctccggatactccttcgcgatctcctcgcagagacggaggaactttccgtcggtcgtctttatgatattcgccttggtgacgatagacacgcggtccttgtggttctttctcgcgtactcatacgcaaggcgcgcgatgcggttcgtgccctctgtggtggtgacgcagaagtcgacggcgaggtcgtcggtgacattcacgccctggcttccgacggcgtaggagccctcggtgttctcacggaagaaagtccagtcgatgcccttgtccggaaccttgaccgggcggacattcgcgaagaggtcgagagccttgcgcatcgcgacgttcgcggactcgatgttcggccacggatcgccggcgcgcggagtggtggtcgggcccttgaggatgacgtcgcagctcttcagctcttccatgacgtcgtccggaatagccttcatgcaggcgacacggttctcgatcgtgagaccgtcgatgaccttgaacttcaccttgccggacttcacctcatcggcgaggaggtattcgaggacgtcctgcgacgccttggtgatgaccggtccgatgccgtcgccgccgcagatgccgatcgtgatgaccgggagcttatcgtagtcgacgacgtcctttgacgcgtttatcctctcgacacgctcgagctgagagcgcaggaccttttcgaatccggcgagagcggctttgatgttttcttcgtaatttgccattttcaagactccatttatctgaattttaatttatcaaaatcaacggtatccgggtctcctccggcgtcagccccgcgtgcacggctctgaacggcgacggatcgtactcgtagccgagacttacgtttgttttcgcgacagcgaggaaatcgccgatgaagctctctgtcagcggatgcggaacgccgccgccgaagatatgggagctcatcacctcatcgtgcggaatgagcgtgtatatatccccgttttcggcgtcaaagagttcacagaactcctccgcttttccatgtctcacaaaaaggctcatggcgcgcccctcgaccgacggcggacagacaagcatacccttcagctcttcgctcatatacctgaatgtcgtgtcggtgagcccatgatcggcggtgacgatgatcagtgtgtcgtcaagcccctccgcgagacgtttcacctcactgtcgatcatccgcagatgctcccgtacgcgctcatgaccggtgccgaggtcgtgcatatcatagtccggctgaggatcgtagccgtatatgtagtgacgtccctgcgcggcgcatatctcacggatcatgcggcacagctccggtatgccgccggagcgcgccgatctgccgtccggcagcgtatctcccgaaaacggtgaaattcttagtgccgtgacgtccggcgacgcctcatgtatccgttcacacagacttctgtatccgagaaacctgccggcaacgttgtaatccgccgcgggctcgccgtccgatctgttcgtgaagacctcgacgatcttccctccgagagcgccgaacctgagcgaccatccgagccagccatgctccgccggtgacagcccgctgtcgaccgtcgttgccgccgccgcggtggtcggcgggaagacagttccgatgatcgccgccatgtgccgtctcagaaacgaatcctccgggagatgtccgcgtacgaccgcgtctcccatcccgtcaaacagaagcagaacgacattccgcggacaatcggcgagcctgccgtcaagcagcggaagtgttttatgtgatatttccgctccgtaataccgcagaagagatgacgtgacgccgagaagtgattcctgatctgtcattatattcattcctttcgcggagtattccacattgccaacagacttttccacatggcgatatggcggcttatgtcatgaattgcggaattttctgaatttttcattctccgacccgaaaaacggccgcgttttccacaggctgttcaaaacccctgtggatgttcagcaatcgttccgcccgctcgcgaacgcgttgagcgacgtgtccgcgcgctttccggcgagatactcgtaatatccctgagcgccgatcatcgccgcgttgtcgccgcagagacttctcggcggaacgcagaagcgcactccgcgctcatcgcagaacttcccgatcgctcccctgagatgcgaattcgcagcgacgccgcccgcgagcacgaactgtcggcagccggtctgatcaaacgccatgccgagctttttcagcaccgacgagacgaccgtcttcgtgaaggacgcggcgatgtcctcgcggctgtacacgacgcccttctgttcgcagttgtggatatgatttatgacggctgtcttgagcccgctgaaggagaaatcaaggttgtcgccgacgaccgccgcggacgggaactttatcgcgtccgggtcgcctatcgacgcgagcctgtccatctcggcgccgcctggatacggcagccccatcacgcgcccgaccttgtcgaacgcctcgccaatggcgtcgtcacgcgtgcagcctatcgtctcaaatgtagtataatcataagcgcgcatgaggcttgtatgcccgccggacgcgacaagcgccacgaacggcggctcgagatccggatacgcgaaatagttagccgcgatatgcccgcggatatgattcaccggaacaagcggcagatcattcgcgaaagcgagtgacttcgcgaaactcaccccgacaagcagagcgcctatcagccccggcgtgttcgtcacggcgaccgcgtcgatgtccggaagagtgactcccgccctctcaagcgcctcatacgtgatcccggttatcgcgtcgcagtgcgcgcgcccggcgatctccggaacgacgccgccgtaaagacggtgcgtgtcgacctgcgacgctattatgtcggagcgtatgatccgcttgccgtcaacaaactcgcagacggcggcggcagtctcgtcgcaggagctttcaaaggataaaatcagcatttatcgactgatcctttcatggttttcgtgatcttacagttttgaggcggttttgaaagacggtttgtccggctttcaaaattcacgaccttatatcgtgaaagcctcaaaactgtttggtctgaaaatttattttcagacttactgctgtccgtccgggcagcagagcgtgtcgccgttcccgccgcagcagagactcataagaacggcgtcctctctcgggtgagagtagaagttccgccgtctgccgtctatcacgaagccctcgcgctcatacagggctctcgcccccgcgttcgactccctgacctcgaggaacagtctcgtgacccctggcgtcctcttcagcccgcgtatcagacctgacgcaatcccgcgccgcctgtagcccgccgtgaccgcgatattcgtgatgtctccgtcgccgaacgacacgagcatacccgcgtacccgacgacctgcccgtcttcctcagcgacggcgcagaccgcggaatccccggaaaggaaatccgcgaacccgctctcactccagggctcggaaaagcactccgcgtcaatcgcggcgagcgccggtatgtcgtccgtcccggcgagacgtattctgaatgtctccataacaatgttcgtcccgttttcacctcggcagatagtcgagaagcacgtcgccgacgtcgacgcaggtcttcgtcgtgcggtcgtagatataattgtttccgtccccgccctcgatgtacatgaggttgtaatacagtcccgggtacttgtcagacgcgaacttcagcttgtagctatcgccctcctgaacaagcgagaccggctcgccctcggtgaacgccttcacaacggcgtctatatcgtccttgtcgtcgaccgtgccgagcgagacggttatgaccttctcctggcatatatacatccggtcggcgtcaaaacccgtaatgtcgtccggtagcgtggtatcctcggagtgccatacgccgccgatgccctcgtactgctccgagagccactcggtcggctcaagtccgtcaatctcgtataggtcgagcttcagcttcttgcaggtcgcgtagacctcttcgccggtcctctcgggctcgtagcagaggggggcggacacatatgtcacgccgttcttcttatcgacgagcttcccgtcctgctcggtcaggctcagcgtacaggaagtcagaaacaccgctggaataatcagcgccgcgatgagcgccgctttatgtctcatcagtatccgaacctcccgccgaggctgtcgtcgtcggtgatccagctctcgacgtcaacaatcctgtatatctcacgcgttgtacggattatgacccgctcgatacccgcgtttatgatctgtctcttgcacatcatgcacgagttggtgtcaggcacgagcagaccggttttcgagtcgatacacgccatgtagagcgtcgagccgagcatctgctcacgtgacgccgctatgatcgcgttcgcctccgagtgaaccgaacggcacatctcataccgttccccgcgcgggatattcagcttgtccctgagacactcgccgaggtcggagcagtttatccttccgcgcggcgcgccgttgtagccggtcgagattatgacgtcgttcttgacgattatagcgccgtatttctttctgaggcaggtgctgcgctcggcgaccgtctcggcgatatcaaggtaataattgtgctttgtgacacgttcctttgcaggcattgcgaggactcctttcatgtcttttttccgatctcccgggtctttatcagagtttcttcacgaaatcgatgaggaacttcttaaactcctcgccgacctccggatggttcaccgcctcggtgacgttcgccttgaggaacccgagcttcgagccgaaatcaaagcgctctccgtcgaagtcaacggcggtcataccgcctcggttcgcgaggactcgcatcgcgtcggtcagctggatctccccgcccgcgcccggagcggtattctcgagtatctcaaatatatccggcgtgagcagcacacgaccgagtatcgacaggttcgtgtagacctcctccggcttcggcttctcgatcatgtctgtgacgttgtacgtcccgtcgtcgttcctgtccgccttcagcgagcagtatttgtatacgagctcccacggcaccggcttcacgccgcagacaggctttccgtgcttctcgtaagcctcggacagctgcccgcagaccggcttgtccgagattatcacgtcgtctccgtagaggatgaagaacggctcgtcggcgatgaagtttttcgccgtgaggacggcgtgaccgagacccttcgtctccttctgtctcaggaaatagacgttggcgatcgagcatatgcggcgcatctcctcgatcttgtcgaattttccggcggcggtgagcttctgctcgtattcaaccgagtaatcgaaataattctcgatggcgtcctttccgcgtccggtgataatgaggatgtcctcggcgccggaagcggcggcctcctctacaaggacggatatcgccggacggtcgacgaccgggagcatttctttcggaacagtgcgggatatcggcagcattctggtgccgagccctgcggcgggtattaccgcttttcgtattttctgcatcggcttcggttcctttctacgcagcttggcaatctgtgatgtcggcgcggcacgtgacgcacgacgcctataataaattattatatcgcttttttattaagaaatcaaggggttcggcataaattcatcaaaaatttaacgaacgcccctcccgggcgatgctcccggctgaaaacaaatcatgaataatagccgcgacccattgaaatcccggcgcggctgagctataatagaatcgatctgaattcaacagggggcggatggcatggcgaaaaagcgaagaacaatcgatattatcggcgcatttgtcatagcgctcggcgtcgccatgctgctctatccgaccatcagcaacatgataacgaaaatgtgcgccgcccgtgagatcacggcctacggcgtcttcgcggacgacggcagatacacagaggaacgcgctctcgccgacagatataaccgcgcggtgatgtccggatccccggcgctcgttcccgagagcgacagcgggaaggcgctccgcgagcttctcgactcgcttgacggcgatatgctcgggtacgtctcgataccggcaatagacgaggagctgccggtctaccccggcacctccgaggactcgctccagtcaggaaccggctggtgggtcggaacgtcgctcccgtcaaatgacgccgggaactgcgtcataaccgcgcactcggggcttctgaaagcgagcttcttcacgaatctcgaccggctcaccatcggtgacacgttcacgatcaggatgttcggcgcgagctatgtctacacggtcgacctcatcgacataaccgccccggatgacacggaattcctgaccgtcccggacggaaaaagccacgcgacactctacacctgcacgcccgtcggagagaacacgcatcgcctgatagtgcgcgggacactcatggaaaaccccggaaacgagaccgatacggcaatcagagcggatgacaacacgaccggaagacttatcgtcggtatgtcgaccctcgcgttcattatcgttctcggcatctggatgacggcgataatcgtcagggcgaagaaggacaggaaagcgcgctgtcataagcggtaacgaaatacaatcgccgcccggaatatcaatcggatattccgggcggctttttttcgtattctttctcagttcagcttatcgaacttctccattaccttctccatcttagtaagtgtcgcagtctcaattgacgcaagtgtcgagaagcccttctggcactcggtctcggacgagagtatgccgcgcaccctgtcgatcggtgtcccgagctcctgtccgtatatgtacgcgaggtcgaacttgacgcttccgacgatgatgtcgagcatacgtgaggtatcgtcgtcacgcgagtacttggtcttgagcgcgatctcaaaataagccggggtgaccgtgcggtaggtctccgccgccatcgcctcgagcaccgcggaagccgcttcggctttccggcaggtcgacggaatcgcgaacacggagcttccgtcgtggcagaacacgctgtattccgactggttctcgttgagcttcggcataggtatgatgccgtagtccgacttcatgtcgcgtagataatcggtcgcggaaagcatccacgtcgtgaagatcgtctgatcggtgatcatagtcttcattatgtcctcattgttgtactcgagcctgagcgtgttgttatcctcaaagagcagcttgtgcatcttctcgatatagagcgccgcgcggtcggatgtgcctccgaacgtgaagctcccgtccttgttttcctcaacaagatgtatcccgctgccgccgaggaaggagtcggagccgagcgtcttcgcgcccgtgaaataatgcccgaagcggtcgccctcgtcaagcgtgctgtttccgttgaggtcattgtacacgccggagcagtaagttatcatctgatcaagagtccacttcccggcgtcgacagtcgcgtagagcgtcggctcatccggatacagttcatcgaacagatgcttgttatagaacatcgcgaaggacccggaaatcatcgtctgcgagagctcgccgatcgcgagataattccgcccgttattctcggttatgtcgaggaacgactgattccaccacggctgatcgaaatccagatacttcatcgtgttaaggtcgaggaacagaccgtcgaatatcagcggaaccgtattatagagcgcgttcgctatgatatcgtaatcgtccgagtcagccatgaccgactggcgtatcttgtccccgaagccgttgtgcctcgtgttctcgctctgataaatgaactcgagctgaaccccgagacggtcgctgaccttcatgttccggttatataccgcgtcggagactatgtcgcccgtcgcctcgtcactgtagaattctatcgccgtgtcggtgtcgccgtttctcgagactattcttatcgtttcaccaccgaggtcgaggtcggcgggcagcgaatccttcgcggcggcgcggccggtctcctccgactcggaggcagcggtgctctcggtgtcgttcgtcgtatcatcggttctttcatgccggtcatccacagccttaccgcatgagatcgcgccaactgctgtcaatgagagcattgagagcataacagcaattgagattatcctttttctgatttcattcataagatatattcccctgaccattttaataatatcgacccgcttacgcagaacaggcaaattccataaaatattataccatgaggaagtcatcattgtcaatagacaatattgaccgatttcattggacaattttgatttgcaaaaagaaaaaaagaagaccggcgtgagtcagtcttctttcggctattctgagttatgtcatcttccgttaccacgcggatcgtttgtacggcgctgtgactgttccggtctgcctgacggacgctgaccgtttgacggacgatttcctccggacgttcccggtctattcggtctctgatagttcacgccgccgttacggggcgccgcgccgggtctgtttccgccagaccttccgtgccggttcggggtaccctgacgcccgcggatattcttcggcttcttcgggagcgcgaggtacacgagaaccccgacgtatccgaccgccatcgccgctgcaatggcgaggatgaccttgaactgcgtcgtccgcgcgagactcttcagcacgtcgaagacatagagaatattactcctgctgacactgttgcgcgtgacaagatcatatgtgccgagactctgtcccttgtaggtgacaactatgtttcctccgacctctccctcgtcgaccggcgccgtgaagtactccttcgtcagtgtcggcgtcatcgtgacctcggtcgcgaggtctgttctcaaaggtatgaacagctcaatatcctgcgacgggaacagcgtcacgtaatcgacccttcccgacaatctcacaggcatctcgcatatcatgtccgacgtcgtcagtatcttgacgtatccccactcagcgagagcccatttcagcatcgacgccgcctcggtgaacgaatatatatacttctcgtccgcctccgcgccgagcactatggagatgtatgtaataccgtccttcgccgccgacgtcgcgatacagtatcccgcctcctcggtatagcccgcgttgagtcctctcggaaccgaccagatatacttgtactgcatgttcgtcgcgaagtaatagttcttgttatatatggtgcgccgtccgcgcaggttcgtcggctctatgacgagcacttccatcgacgttatctcggtgatcgtctcgtagctgcacgcgtacgccgcgatcttcgccgtgtcctcggcggtcgtcttcatcgacgggtgatgtatgccggtcggattcatatagaatgtgcgatccgcgccgatctccttcgccttgtcgttcatcatggagacaaacgcttcaatgctcccggcgacctctatagccaagatattcgtcgcgtcgttcgcgttgccgatgagcatcgcggagagaagctgacgcgccgtcagaacctcgtcgcgtcgtatctttatatggtttccctgcacctttgagagcgcctcgcgcgtcgccgtgatctcgcggtcaaggtcggtgccgagcgcctccatgacgagtatcgctgtcataagcttcacggtcgacgccggatacatctgctcgtccgcgttcttcgtgtacatgaaatagtcgttctcaacgttgtagagcgccgccgccttcgcgtgggttacgtccggcgcgggaacctcgtcgtcctcgtcgtccgccgcgcgcacatacatgagcggcgacactatcagagtgagaagagtcatcacggcgaggaacatcgagattttctttttcatctggtccctccgaatcatttatccgagaaatattccttcgtcgacacaatgtcgcgcctgatctgcgccttcaggctgtcgatgtccggaaacttcatctcgtcgcgcagacgcttgtggaacgacaccttgatatccttgccgtacagccagccgttgtagttgattatatgcgtctcgcagtttatcacgtgcctgtcgttttttatggtcggtctcgtgccgacgttcgacacaccgaggaagatatccccgccgatatcgaccgtgcaggcgtatatcccgctcttcgggatgatatgcccctccgggaaattctggtttatcgtcggtatcccgatcgttcgcccgagctgctttccgtggacaaccggaaaatcgatgaagaacggccgtccgagcatatccgcagccttatccatctctcccgcgctgataaacagccttatcgcggtcgacgaaacgagacgcccgtccctgtagacaggcgggacgatgatacatccgccatcacccatcagctcgcggagcgtgtccgaatccccgagtcccatctttccgaaccggaaattgaacccgcagacggcggctttcacgttcgccttctctttcagcagctcgttcacaaaccgctccggcgaatagtccctgacacgcgaaaaatcctcgagcagcgcgaaatccacgccgagcgaggctataagcgagagcttttcatggagcgtcgttatgacgccgccgctctttcccggaagggtcggcgcgtcctcgcggaaggtccacaccgcggaacgcagcccatgcgagcgcgcgaactccacggcacgcgtaataagcgccgcgtgcccgacgtgcactccgtcaaagctcccgagcgcgaccgcgagtcccccctccggaaccgccgcggtcataagtggagggctgacgccgtcactgtccgtgagacctttaccctccgcttcccttaacttatgaagatcataaacatccattggcatcctgtcgcgacatcagacgccgaggtagttcctgacgagagcgttaagcagctcgtcgcggtcgatacgacggatcagactgcgcgcgtttttgtaattcgtgatataggtcggatcctcagagaggatataacctacgatctggttgatggggttgtagcccttctcgcggagagcttcgtaaatggcggcaagcgtgcgcttcatttcctcttccttctcgtcgcggacggtgaaggttatggtcttcgacttgtcggagagcgcctcggcttccttgtcctgtatcgacatcggcattctgatcagtcctttcgcaatttcgttatgttttttcccgatggatatatgatacaccatcgggagattttttgcaagaggatttcccaatttgtaagactaatgtaatgttggtcgacaaacgtctgtcagcgctttccatgccgcgcggagtcgtttttcgacgctcccggacgacctccgccttttttcttcggctgacccccggacttctttccgccgtttccgcctttggtgaattccttctcgccgaaattcttcttcgtgaaatccatcttcgcggagttcccgcgcttcggctttctttctccgtccgttccggcgtatttgtcgctcttctgccgtccgggcttctcgtgcgtccggctcgaacgccctgaaacgtccctcgacggcgccgcgcggtcgtgcccgttctcgggtctcacaagacactccggaccatatccgataagatcctcccgcccgcagagacgcaaagccttcctgactatcggcacgttctcgggtctgctccactggagaagcgcgcgctgcatatgcttctcctcgtagtcgtgcgcacagtagacgggcttcatcgtgagcgggtcaagaccggtgtagtacatgacggtggacgccgtgcctggcgtcgggtaataatcctgcacctgctccggcgaatatccccaggtcttgaggtacaccgcgagctccaccgcgtcgacgagacggctccccgggtggctcgacatgagatacggcacgaggtactgctccttgccgaagctcttcgtcagctcgaaatacctcttcctgaacttctcgaacacctcgatcggcggcttgcccatgcaggcgagaacatggttcgtgcagtgttccggcgcgaccttcagctgtccgctgacatggtcgtgtacgagcttcttgaaaaagctctcgtccgggtcggcgagcatatagtcaaagcgtattcccgagcgtatgaataccttcttgacgcccggaaggctctcgacccgccgcaggagctcgatatactcagagtggtcggcgataagattcttgcacggcgtcggcgcgagacacttcctgttcgagcagacaccgctctcgagctgcttcttgcacgccgggtagcggaagttcgcggtcggaccgcctatgtcatttatatatcccttgaaattcggcgactcagtgataatcttcgcctcacgcaccaccgactctatagagcgtgagcgcaccgtccgcccctgatggaacgcgagcgcacagaaattgcaggctccgaagcatccgcggttatgcgttatcgacatctcgacctcggcgatcgcgggcactccgccgtccttgtcatagcacgggtgcgggcggcgcatatacgggagcgcgtagacggcgtcgagttcctctctctcgagcggcggcatcggagggttctgaacgagcattttgttgtcgtagtactcgacgagcgcctttccggttatcgcgtcggtattgcggtactgcacgccgaacgcctcggcgtagagacgcttatccgtcttcagctcatcgtagtcccacgcaccggcgacctcgtagtgcggcttcgcgtcgcgggaggtgagataaaccgtaccgcggacatcctgtatcttctttaccggaacgcccttgtcaagaagcgccgcgatccgccggagaatgttctcgcccatgccgtaagtcaggatatcggcgcgggagtcgacaagaatcgacctgcgcaccttgtcgtcccagtaatcatagtgcgcgaagcgcctcagcgacgcctcaagcccgccgaggattatcggaacgtcgccgtaagcctcgcgtatgcggttgcagtagactatgaccgcgcggtcggggcgtctgcccatcaccccgccgggcgaatagtaatcatatgagcggcgctttttcgacgccgtatagtgcgcgaccatcgagtcgatgtttccggcggagacaaggaaaccgagtctcgggcgcccgaactcgcggaacgcgtcgcaggacttataatccggctgcgcgagaaaagccacgcggaaaccctccgcctcgagcacgcgtgttattatagccgcgccgaagctcggatggtcaacatacgcgtcgccgcagacatacacgaagtccggtctgtcccagccgcgcgcctccatgtcggcgcgggatatcgggagaaagccgtcggcggaatttgctgtcgtttttttatcgttcatttctatcaatacgcggtatatcgtcccggatattccggagagcccgcgcgatcctgtcagattatttctcacggagtatatttcccggagcataaattattataccacaaaagcttcgccgtgtctaccccgccggagcccgaattgcgaaattttctgtaaaaagagcaatattgcagaatcgttcacatttatctgttataatggtctcagagtgaaaccgggaggagattcagcatgaaaaaacatatcatgacaattctcatcgtgattctgtcattcacgacaatccttttcgccgtactctggcaggtcgcggcgcatgacagatccgacataaggctcatggcgaaagccggagccggcgaggcggcagaatgcttcgcggagtttcagaagagcggcgacgagaccgacttcatccgcggcgtctccgcgctgagaacattctcgacggcttacacgctgatgacggagggaacggtcagatatcccgaccatgtgatgatcgagaggctcatcggagcgcttatctcgtcccccgcgtccgcaaaggagcatatccgcgacctgaccgggatcatggagctcctctcaaagaacccggtggacataacggctctcacacgcctgtcggagctgcaaaccgcccttacgcactgaaaaagaagccctccgcgtgatactgtgacattcacgcggagggcatctttttccggatgcccggaagaacacagatccgggcgattactcgtcgcagatctcgacctcatctgattcatcggcggagaacgggtcatactcctcgtactttttcatcagagcttccttgcgctccttcagatcctcggaggaatcgacaagaagcagtccgagaccggtcacgccgctcgcgagagcgacggcgagaagcgcctttctgaggctcttcttctcgatgcagagcataaggaaaagaagtatgaacgacgccgcctgtatgcagagcgtcagtccgacatagaattttgtctttttcatgatcatagcctccgtttcattaattgccgggaacagcccggaatcagcggctcccgctgattactgctgatccttcttgcccgccatcatcttgaggtaggcgttgatgaagccgtcgatatcaccatccatgacggcggagatgtttccgtcctcgtatccggtgcggttgtctttcacgagcgtatagggcatgaacacataagagcgtatctggctgccccactcgatgttgttcttgacgccctggatatcctcgatgcgcgcgaggttctcgcgctcctttatctccatcagcttcgacttcagcatcttgagcgccgtctccttgttctggagctgcgagcgctcggtctggcagccgacgacgattccggtcgggatatgcgttatccttatcgcggaatcagtcttgttgatgtgctgtccgcccgcgccggaagagcggtgtgcggtgatctcgatgtcctcgtcgcggatctcgatcttgccgtcgtcctcgaactcaggcatgacctccaccgacgcgaaggacgtgtgccggcgtcccgacgcgtcgaacggcgacacccttacaagtctgtgaactcccgcctcgctcttgaggtagccataagcgttcgtcccctctaccatgatggtcgcgctctttatgcccgcttcctcgccgtcgagccagtcgacgagcttcacgttgtatccgtgcttctcgccccatctcgtgtacatacggtaaagcatcagcgcccagtcctgagcctcggttccgcccgcgcccgggtggaaggagacaatcgcgttgttgcggtcatactcaccggagagaagcacctctatgcgctggcgctcctcttccttctcgatctcgtggagctcggtctcgacctccggaacaacgctctcgtcgttctcctcgatgcccatctcggcgagggttatcgcgtcctcgagcttgttcttcagcgcctcgaactcggacaccgtgtcctttttctgtttgatcttctggagaaccttgctcgatctctcggcgtcgttccagaaatccgggtcagaggtgaccttttcgtcctcctcgatttccttcttcagctgatcgatcctgagcgcgctcgcgagctcgtcaatgtcggcgcgcatattcgtcagcttatattttgcgtcttcaagctgtattatcaattattcttcctccaaagcgccgccgacacggcggcgcctgctatttttttcggaaactctcagtatcgtgcccggataggcacaatcagacagccgtcacgccggcttgacttcctccatgatgaacgcctcgaggatgtcgccctccttgatgtcgttgaagcgctcgagtccgataccgcactcgaagccctgcgcgacctccttcgcgtcgtccttgaaacgcttgagcgacgaaatcttgtcttcgaagataacgacgccgtcgcggatgactctgatctgcgcgtttctcgtgaccttgccgtcctgcacataggaaccggcgatcgttccgacgttcggaacgtgaatcgtctggcgcacctcggcgtgaccgagcagggtctccttgaacttcggcgcaagcatacccttcatagccgcctcgacttcctcgatgcactcgtagatgatgcggtaggtgcgtatctcgacgccctgacgctcagccgagtcgagagcgctcttgtccggacggacattgaagccgatgatgatagcgttcgacgccgcggcgagcatgacgtcgccctcggtgatgccgccgacaccggtgtggatgatattcacgcggacttcctcgttcgtgagcttctgaagcgactgcttgacagcctccgcggaaccgccgacatccgccttgacgatgatgttgagatccttgacgccctcggagatctgcgcgaagaggtcattgaggtttgccttcgcgttcgccttgaactgctcttccttggtcttttcacggcgctgctcggcaagctctctcgccatgcgctcgtcctcgaccgcggcaaactcgtctccggactccggaacctcggcgagaccgatgacctcgaccggcacggacggaccggcggactttatgcttctgcccttatcgtcggtcatagccctgacgcgtccgacagccgtaccggcgattatgatatcgcctatattcagcgtgccgttctggacaagcagcgtcgcgaccggaccgcgtcccttatcgagcttcgcctcgatgacgagacccttcgcgcggcggttcggattggccttcagctccttcatgtccgcgacaagaagcaggttctcgagaagctcctcgattccctgtcccgtgagcgcggagacaggcacgcagatgacgtcgccgccccactcctcaggcacaagatcatatttggtcagttcctgttttacgttgtcgggattagcgcccggcttatccatcttgtttatcgcgacaacgatgtcgatgcccgccgccttcgcgtggtttatcgcctcgaccgtctgcggcatgataccgtcgtccgccgcgacgacgagtatcgcgatatctgtcgacttcgcgccgcgcgcgcgcatggcggtgaacgcctcatgaccgggtgtgtcaaggaaagtgatatcacggtcatgcacgcggacacgatacgcgccgatcgcctgagtgattcctcccgcctctccggcggtgacgttcgtgtgtcttatcttgtcgagaagcgatgtcttgccgtggtcgacgtgacccatgacgcagacgacggggcttctcggaacgagatcctccgccttgtcctccgagtcgtcgaacagcttctcctcgatggtgacgacaacctcacgcgtaaccttcgcgccgagctcgtcggcgacgagatacgcggtgtcaaaatcgatcgtctggttgacggtcgccatgacgccgagggtcatcagcttctttatgacttctccggcggtcatcttgagtctcgacgcgagctcgccgaccgtgatctcgtcaggaacggtaatctgaagcggctgcttctttgccttctcaacgccctgcttacggagcttttccatagccacgcgctctttttcacgctgggactggtaatcgcgggtattctgcttcttgagcttctgcttctctccgcgcgcgtccttggatgcctcggggacaatattctcgagacgctcgtcgtacttctcgagatcgaccgaggaggtacgggtatcgacgatgcggctctcagtatccttcggaccgttctttccgcgggtgtaggtgtggaccggaggcggcttcggagtgttcctctgattcatgccgcggcctccggaatccttgtccttgtcgcggaatccgccgcccatgttctgtgagcggtttccgccctgcccgccaaagccctgacggttatcgtttctctgcccgtcgcggttcccgaactgtctgtcgccggaaggacggtcggaacggtttccggactgtccctgacggttgtcggtacgcccgccgttctgtgccggacggttctgtccgttctgcggacgcggagcgccgtcacggttctgcccctggcgctgtccgtcctgacgcggacggtcggatcgattctcagggcggttctgcccctgtccgccctgacgcgcgccatcctgacgctgtccgtcgcggttctgtccctgacgtctgtcctgattctgctgatttctgtcgtttctgtcgcggttgtcggctcttcccggcttctgctgatcgccccggcgcgcttcctgcggctcggtcttctgctccggctttgtctccggcttcggttccgtctttgcttctgtcttcatctctgtcttcacttcgggcttcacttcttcctgtttctcgggtgttgtctttgtctctgttttcgtagtctcggcggtcttctccccggacttcggcttctcggcgtccttttcgggctttaccgccgtctcgggcttcggctcgggcttttcttcgggcttcggctccgctttgaccccggctttcgattccggcttcggctcagctttgggctctgctttcggcttttccgcctttggcttcgctgccggtttcggcgggtctatcgttatcttcttgtcaaggtaatccccgattccgctcatctgattgcgggaggtgagctcgttcatcacaagattgaactcatcctcgttcagcgtcgccgagtgcgacttgccctcgatgccgttctccgctaaaagatcgagtatatccttattcctcatcccgagatccttcgcgagactgctgatccgggtctgattcttctgattagctgccatatatattgttcatcctttcggtacggttgatatcgatatcttttcggatccgatcatctcactgatcgtctgtcagagccgcgattccgttcgcgaagttcatgtctgtcacgccgacgaccgccgcagcgcccggtttcccgatgcggtgcccgatctctgccgagcttattccggtcaggacaacgtcggtctcgtaatagcttcccgcgtcgatgatacgcttcttcgtgttctcggaagcgtccccggcgacgaccacgataatgacgctcccgcgccggactccgtctctcgtcaggtcggtccccgcgatgagctttctcgccctcgccgcgaagccgagcagggacaggagtttctcttcctttcccgtcttcagcttatgcgtgacgaccggtctttcgcgcctgtcgtctgtcctttcggtcttattttcggaaaaatcattcattttcggcaagctccttttcaagcgtatcgtatacctcgtcgggtatctcaacctcgagactgcgctcgatcctcttcgcgcgccgcgcctttctcaggcactcggcacatctgcacacatatgctccacgtccggacttgcgcccggtgaggtcgagcgaaaccgctccgtccggcgcgcgcactatccgcgccagcgtctgcttcggcttcgactcgccgcacccgaggcactttctctcgggaagtttcttcttcggtcttgccgcgttgttttcctgcaaaataaaatctcctccggtaatctctgacactgcccggcgcggtcagtcgatatccgccgtaccgggatcagtcgccgggagacggcagagccgccttttcccgtccttgtcttttcaaatccttttcatgacagagcctcatcgctcagacttcgtcgtcgccgacagtcccgtcggtcgtctcttccactccggtctgcaccgtcgccgcctcctcgggatgagcctccttatgcgccgcctgcgcctcgatctcggcgtcctcctcgtcctctctctcctgctccttctcggcagcctcgaggaacgcgcgcttcttcgcttcctcctcttcgagagccgctctcgtttttatgtcgatcttgtagccggtgagtctcgccgcgagacgtgcgttctgaccctccttgccgatcgcgagcgagagctgatcggcgtcgacgacgacgcggcaggacttctcgctgtcgatgatgacctccttgacggtcgcgggcgacagagccgcgctgatatactcgaccgggtcctcgctgtacttgatgacgtcaatcttctcacctcggagctcggagacgatgctctggatacgcatacccttgtttccgatgcaggcgccgatcgggtcgacgttcgcgtcgcggctcatgaccgccatcttagttctcgagcccgcctcacgggtgatgctcatgataacgacgacgccctgctgtatctccggaatc

SEQ ID NO: 3609 - DNA, 5808 bp, Unknown
  16S sequences of unknown bacteria
gtcccggaatgtctccctccggaatcatatgagagtcaatataggcaatcgggaagcccaccttgcgcagccgatccagctgatacttgtattcggtaataatctcatccagatccggctttgccgctgccagctccagcacatcctggtaaaaaacgccccggtgatcgatcagacttttcactttctccttcggcgctaccggtccccatacgacccgatcccattctgcattgatcacactgtgcataccaaacgtgacatccttactggatgcaagcatttccgctgcttcctccagatatggtgcacatgccatcacagatacattttttacaattcccttttttgacacttcataaatcgcctggttcgccgaatggctggacccaaaatcatctgctcttgtaattaaagctttatctaacatagtattcctcttttctatccccgttgacaaagcggaagcatcctccctgccaactgctcagcactgcgcacatctgaatcaggaaatgcttactctgccttcatacagatgtgggcaaggttcttaccggatcaggaacagctctgcttccatctcaccggaaagtgcaatacttttcacaagttccccgtttcccgggacataatagcaggctgtatcttcattgactgcgatctccagcacaccacggtctgccagaatcgtcatattcctgatttccagaatgtcaagacggttcataaaggtaaatgccagctttttcttttcggcatcccattcaatccgttcgccgcagatccacagtgcgaaagacgtatcctcggaaaaagtcagctgcagcagcattgctccgtcctcttcccagcaaaattccatcggttccttctgaaccgtccgccgccataatggaatcttctgctgcagcagctcccggcacagcggttcggataagacatattcactgccttcttttagaagctgcatctctctcggagcacccatcaggccgcgatgattgtaatacggctgcgtatgtccgcgcaaaaacgggatctggagtacacgtccatccagattggcgaccgtctgtgccgcatagaccttctcgcttccgtaaaatcttcttcccggctgtgtcgcggtgaactgcatgccgtcaaattctcccaccaggtaaaatccgtccggtgtccagaacagccatttttcttcaccggtgctttgtactctcagccggacaagatccggacattcccatgcctccggaatcaccagactctgcgtctgcctccagtccttcatattgtctgagacaaaaattccgaattcatgcccatcgagaaataataccataaaccagtgcttttgtccaaacctgtataccttcggatcccggttttcaaaaatctgatttggcagtatctcacccagtgtctgaaaatgtgttccatcctcgctccacgcgattttctgacacatcttcttcccgcggctccatacgctgcgatttccggcacaggtataatagaccaccagtgcatcctccggaacttccggcagctccccctcatgcaaaacggcacttccggtaaaagccggtccgtctgcctccgggagcagtgcctcctccaattgctgccagtgcagcagatcgctgctcactgcatgcccccagctcatattgttccactgaataccaaacggattgtgctgaaaatacagatgatagcttccctgataccagcacgctccgcagacatcattcatccatccgcttttcggcgcaaaatgaatccatggctgaaatggctctgtatttggcaggagctcatccgactgcagaaacggaaccggccggtcctcctcatgcacaagcgtcagtaccgaacccttccatcgttctaccggaagctccgcataaaagtccggtgctccggatccataatccacaaaaaggcccgcctggaactgcagcactgcggtcagttcctggtaaagccacacatttttttcaactgcatcttttctgatcggtatccgaagataatttttttcaattaaaacccgctgattcatgcgtttttctccttgcatcttcgtattatctctgccaaataaacagctttgctgtatgcagaaaagggcaatgcatttttactaaattgctgcattgccctttttcttacttatacattcatcaggattttactgctcctgcaacaacacctgcaataatatacttctgcagcgcgatatataagataatgatcggaataatcgacatcacaaggcctgccagaagcagatccatctgattcgaataagtgccctggaacagcgccatcgctaccggaagggtatataccttcttgtcggtcagtatcaggctcggcagcaggtaatcgttccacaaagacagggcatacaagatgaccagtgtcgccgtcgtcggcttcagcagcggaaatacgatggagaaatacgtccggaacggacctgcaccatcaatgtgcgccgcctcctccagtgccagaggaacacttcccttgataaagccatgatacatgaataccgccattgagacagaaaagcccagatgcatgaaaatcagcgtatatctgtgattcagcagacggaacatgccgccataaatggagatcagtgggatcatgactacctggaacggaatgaccatcgagaacatcattaaaaggaacaggagtttattgatcttccagtcttttcttacaaagatgtaagcgcacatggaagaaaacagaataatcagaaggacactgatacctgttaccagaaaagagttcttaaatacattcaggaaatccagtctctggaaggctgtgatgtagttgtcaatcgtgaatcccttcttaccaccgaagctgagcggcagctttgtaatatcacgcttatccttaaaggagttcagcacgatcatgaaaaacggaaacatataaaacaggaacagcaataccgcaaccaccgtacggataatcggccttaccttgctggactctacacttcttccctcatccattacgcttctacctccttccgcttattcataacagcctgagaaactgcaataatcgccgtaaacaggaacaggatgaccgcctcggtctgacccggtccgtaggactttgtcacaaatgctttgttgtatacgtacattgccgccataacggtagaaccgaacgggccgccctcagtcagggcaaggttcaggtcataaaccatgaagcagcgggtaattgtcaggaacagacagatcgtaaaggaggaacgcatcagcgggatgacaatgtttcttgtcacctggttctccgtacatccgtcgatcttggcagcctcgcgcagatctgcagatacactcgtcagtcctgcgatgtagatcagcatcatgtaaccagacagctgccataccgttacgatgatcagggcgataaatgcgggtaccggggaggacagccaggacttggataaaaatccgatgcctgcgttcttaccgatataaaccagaatggtcttgaaaatgaactgccagatatagccaagtacgattcctccgatcaggttcggaacgaagaagcctgcacggaagaacttttttccgcggagctttccggtaaccagcagtgccagaagaaatgctacgacattgaccagaaccacagacacaaccacatagatcaatgtcagtccgagtgcctgccagaagccggtatccttaaatacctcagcgtagttcgcaagtcctacaaacggctttgacttggaaaggccgtcccagctcgtaaatgtcagataaaatccgtataaaaacgggataataactactgccatgaaggcgaagactgccggtcctgcaaaggccagaaacagtcctgtattttttaaagactcatttttcttattcataattccctctcttaatcgaagaatagctgccgccgacgccaccgccgacagcagctatcatcagccgttcaagctctgtatgtccattgaatcggttcggaattattttgcaagtccggtccagtaatcctgaatctctgtcgcaaaggtggcgcggtcggtctcacctgcgaagtacttctgcatgtaagcaccaacggtctgccagtgatctcccgggtaggagtacggtacgttgatgactttgccttccttcacgtagttctgaacgctctgtgccagcatgttggtaacatccttgtcgatattcgtgaatgccgggatcagggaacactgctcgatcaggacgctctggccttcctcagactcaacaagccagttcaggaaatcctttgctgctgcctgctgctgctcatcattgcactccttgtcgatcatgacttgctttgttgcgctgccgcagatggagctgtttactgcttcgttctcagaggtctcattctgcattaccggcatgataccgatctctgtaccgtcttcaatataggaagaaatctctgcccatgcccagttaccattgaaataaatagctatttcaccttctgcaaggtctgcgcagttcgtagcgtagtccgctgcgagcgggtcatccttattgatattgtactgagccagaaggtcgaaggtatccatcagcgctgtgaatctctggttggacatcaaatctacgttgccagccttcaggtcatcgatgaacttggaagtcgtctccatcgtgccgtcctgctcctcatatacctgtgtgaggtaatgtcctgcaagagcccagtcctccatgttcagtgctgccggatactccatgccgttctcaacgagcttctccagcagagctgccagatcatccatgttcgttacagaagacggatcccactcttcgccgagggtctcctcgatcgcagtcttattgtagatcaggccacggccctcgatgcagaacgggaagctgtaaagcttgccatctacagatacgccgtaggtctcaccaccgtttgctgcccaggactcattgcttaagtctgcgccatactcctcgcaaatatcagccacgtcctgtacatcgcccatgatcagggtcggtgcattgttcgctgcatatctggctgcgatctcctgagacggtgatccgctgtcactgattgtgtaaatatccagtgatgctccggtcagctcgccccactcagctgctgcatctaccaggtaatcctggatctcactctttgtgttcagcattgtgatggaaaccccatcgtagcttcctgcctcgtatgcagaagcgttcacgcccataaggccaaccatcatgctcagtgccattgctgttgaaactgcttttttcatgttcatcctcctatttttctctgtcgcttgttttgttgaaatgagttattttatgccgttcttttgaatcgtttcatttctttttttgcaacatttattgtgattacagaatagcacagtcttttcttgatttcaatgcacatatatgtacaatatcgcctcctgcttttgtgcacttttaacctgttttcgttttctgtttcgtattccgattttgaacgttcattttcattctttcttttttcattgtgaatattcatttttttgaattttctgaattgaacaaacagaagattcattttaaccgaatcaaacaagtcccctgcttcaactacgcaaagcaataagcggtgggttgggacttgcttgtatcagaagtggtgcaggccactcctgatccgctgtgaagcagcattcggttatgacatatcataaggaggagcccgattgcgggaggattccttatgatcctgcaagtagcg

SEQ ID NO: 3610 - DNA, 3565 bp, Unknown
  16S sequences of unknown bacteria
gaagcagctactcggttatgagcaagtagcgaagcggattgcgaatatccgcttttatacattcttatatgttccttgcttcccttacttatcatctacttataatcaatataaatccggtctttccgtgtaaacacttccgcctcgatctgatagagctcctttaccagctccgagctgatcagtgtctccggctgtccatcgcagagatttcttccgtccttcagcacatagacccggtcgcagaaacgcgccgccaggctcaggtcatgcagtgccgtcagcaccgtttttccggaattcttcaatagagacagagtcttgatctggctgccgatatccagatggttcgttggctcatccagaataatcatctccgtttcctgcgccagtgctctggcgatcagcacgcgctgcttctctcctccggaaagcgtcaggaagctgcgctccagaaattcatccatgccaaccatgccaagcgactgcttcacaatctcccggtcctcatcgtttgccgcctccatcattttcttgcgcggatagcgtcccatctgcacgacttctcctaccgtaaagtcaaagtttgcttcactctcctgtgcaacaaccgccagacgttctgccatcttccggttcgacattttaatgaggctctttccatccagtagaatctctccggaggtcggggtaagcatacggtatatatttttcagcagcgtcgactttccgctgccgttcggaccgatcactccgacaaactcccccggatggacctgcagggatacgccgcgcagaatctttgtctgctttgtcttgtattctatattttctaccttcagcatttccctactccttctttccaaatgcatacttccgcacccgaatcatccacaggaaaatcggcgccccgatcatcgctgtaataattccgatcggaatctcacccggagcatcaaacatcctcgcgccgacatccacccagaccagaaaaatagctccgatcaacgttgataccggaatcacctttttatgatccgctccgatcattgatcgcacgatatgtgggatgacaagcccgacaaatccaatgcttcctgtcaccgcgacggccattcccgtcagggctgcagataaaaacaccgtaattttccgcactaaattgacatttacaccgagtgtcaccgcgctgctctcgcccatcagaagcgcattcatcgcgctggacattgcatacatgcacaaaaatcccggaatcagtgtcactaccaccggaatcagctcttcccactgcgcgctcgccacacttccgagtgtccaaaacgtcacttcccggattttggagtcatccggagccttgtagacgataaaattcgaaaatgcggtaaacatcgccgccactgcggttccgaccagcaccagcttgatcggtgccacttcttttccgcttttcgccatatagtagacgatcagaatcgccgccattgatcccgcgaacgcgccgccctctaccgcataggagccgagaaacgacagcacgccggtcacgatcgcaagggtcgcaccaaaggtcgcaccggatgaaatgccgagcacatacgggctggccagcggattcttcgtaaacgactgcatcgccacaccggacaacgtcaggctcgctcctaccatcgctcccatcagaacacgcggcacacgcagatgccagacaatattctgagtactcattttgatttccgagacatcccccattcccgtaatccgattccatacaattttccagaccgtatcaaacggaatgctcactggtccgatccccgttgccagaatcatggtaaggaccagaataacacacaggaccatgcaggtgattcccacatggtccttcatctttttacaaagagatttcatgccgctacgaaattttattcaaagcactccggatggaacgcttctgcaaacttttcaatcgtatccgctacgcgggtgctggcaaacacttccggaagggtgatgacaaggaaattctcatttttaattgctgtgacatctgagagtgcctcattgtccttcagagactggatcttctcatccgcggtcgtctcgccgtaatcgttgataacaatgatgtccggatcagcctctacgacagcttcccaactgacggtattccatgtcttttccagatcctcaaagacattgacgccgcctgcatgacggatcagcttggatgtaaagttgtcgcccggtgtataagcgccaccgtccatatcgcagtcaaaattgaataccttaatcggatcagctccctcgatcttggactctacttccgcgatctttgtcttcataccgtctaccacttcatttgccttatcctctacctggaaaattcttccgaggttgtagaagtcctgatatacatcctctacatcacagccaagcttgtagccctcgatcgaagacagggacataattccatagctgcttaaggtatcatgtgtcgcaatcgcggtatccttatcgctgaatgcagagcttcttccataaataaaatccggatccagatccagtacaacctccagagacggatagcctgtgtcctccgaaatcttcggcttggactcatactcatcgcggtactgctccggaagctgtgcattgttgtagcaggtgccgatgatcttatcgccaagtccaagtgccatcagctcctcaccggtattcgggttcgtactgatgacgcgctccggaacgtgtgtaaaggtaacctcctgatcatcctttgtcaccagtgtaaacggaaatgcagaagcttcggtctgtgcctctgtctgcgcctcggtctcggtctccgtctcagccgcaaatacattcatcggtgccatcagcattgctccggtcagcagcattgctatccatcttgttctctttttcatttgtgtacctccataacacataaaataatattgtccggaagcccatgaaaggcatccttgcggagcatttttgctttacagaatacaatttcctgtaaaacaaaaaaacccgctccacaggtgcaggtcaacagaccgctctgatagatgcggcgaatctgcgtcgatgctttgaatggaagcttctgatcgcacaaaacaggcaggtatcctggctcgcagatctgcacctttccggccttctcacggctctcccgcaatggcatattcggatcagctccctgctcacagtgacctcatcgctcaggcttttacctgattccctcttttatacttcatctaccggatcaaagcaaatatagcaatctgcttcgatcctacaagaaatatacacctgtcttgttcatttttaacaaacagcagtatatcatactccgccgcaattggcaaccctgtttttacaaattccctctcattttcttttttgtctgactacttgtcaatcggatattcgcaatccatccctgcaggtgtgctgacagggcctggctttgctacttgcaggatcataaggaatcctcccgcaagcgggtccctccttatgatatgtcataaccgaatgctgcttc

SEQ ID NO: 3611 - DNA, 5626 bp, Unknown
  16S sequences of unknown bacteria
gcgcgtgttcaacctggaaacggtgctatccgatggcggcgcgccgctgcccaaggcgggccccaacctgcgcgcgccagccgagtgcgccgcgggcctgcgcgcgctcgcgcccagcgccatttgcctggcgaacaaccacgccatggactttggcgcgccgggcctgcgcgccacccagaaagcgctatcgggcctaaacacctttggcgcgggggaaaccctcgcccaggcgagccaagcgcaaatcctgggcgacgcggcgatttacgcctgcgcggagcgggaattcggcatagcggacattgccgcgcccggcacaaatccctttgacccgctggaaagtttcgacgccgtcgcggcgctgcgcgcgcagggccatcgcgtgatcgtgctctaccacggcgggctggaaaaataccgctatccctcgcccaacctgcggcgtgtgtgccgcaaattcgtggaaaagggcgcggatctggtgctctgccagcacagccacagcgtgggctgccgggaggcataccaggggaaaaccatcgtgtacggccagggcaacttgctctttgcccgctatagcgacgagcactggaacacgggcctgctcatcggcgtggatacccgcgatatgcgtcccgtctttgtgccgctcgagcggcgcgagggcggcgtgcgcgtctccacagatgcaagcatcctggagggttttgaggcgcgctcgcgggagatcgcgcgcgagggctttgtggaagaggcgttcgcccagcgcgccgcgcgggcggattatgaaaagaagctctttggccggctgggccgctatgtgcgcaaactgggcctgtgcgaacgactgatggacgaaccatcggcggcgggcgtggtgaatctgctggagtgcgacgcgcaccgcgaattggccgcgcaaatgctgcggcagaaatatttgaagggatagcgcggggcatttgctggcagaatttgaccggcgcgccgcaggagtatacccccgcgcggcgaagcctcggattctggagccatatgccacgcaattggcggaggaaaaccattattggctttgcgaagtgccggattttgtttggatacgggcggcgaattgaccgcgcaaatgggaaatattgagaaaagcggcgcggcacacaggcatggctgggagggaaaacaggtgaaaaacagcatcctgaaattcctaaagcgcatcgcgctcgcggcggttgccatctgcctgctgctttgcctattcctgaccggcattctggtatacggctctgcgaggcgctatgtcataaaaaaagatacggtccacgcgttttatgcgcaatatgccgcgtttgtggaagcgtcggaagaggatagcggcgggggcattttcagtgacatattgaatttcaatagagaaggcgacctgccccaagaaatccaggagatgggattcgaatccgtatattttgacgatggcgtcgcatattttacccataaagatgcaagcgtatggacgggttcctttggaattctgcgcaccgccgacacaaaaaacgttccttcctggtatatcctcgaaccaatcgagagagagtggtattattggcgcatgtcatagggagatggctagcagccgtgcagaaaacggatttggatgggccttgtgcggcgcgaaacgaaagggggggcgatgggtgaagaaggcgctcagaacggggattttcgtgatttgcctgctgctgctcgcgtattggcgcttttttgtcagcatggattttctgccgcgcggggagcggattctggtttcggaatcgccaggcggcaaccagatccatctgtatctctgcaatggcggcgcgaccacgagctatgccatccgcggggaagccgtcaccgaccggggcgtgaaaaacatttattggcaatacgatgaaacgcgcgccgatgtgcgctggctatcggacgaagtggtgagcatcaacggcgtggtgctgaacatttatgaggatgtatacgactaccggcgcaattcgcgctgaatggcgggaaaaaccatatgaaacaatatacaatgaaagcagcaagcaaatcagggattctgttcgaaaatcaggaagaaaccctattcatcgattttcaagaatgcgcacaaagctcaccggttggccacaactgcattggagaacgcgacattacaaagcgcttgttcgtgttttttacgcggcatggcaaaaccagcgttgttgtaggacgcttgccaaattggaaactctttgcttcatacaacagcagagcattcgaaaaaatacagaacgcgataaaaaatagcgggtattccacgtatgatttatcgtagtttgataatatcgaatgagacagtcgtatgtgaattcctgttcgcaataagaattcttatatgacgctatacgatataaatatgcatcgttctactcaatccagcaaataaggccgcccatttcggttcgagcgaaccaaaatggacggcctttgtgtacacatctcctagcggatgtccaccaaagaatagccttcgatcttttccaggatgcgctcggcctcgtctccctcggcgacatagggctgataatcgttttccttcgcgttgccgctcacgcggatgggaatcacggtgaaatcgtcctccaggatcgcgccggtgtggtccacggtgaaatgcacctggaagagcatcgcgtccatatccgtggggcggatgttgccgccgaagcacaggttgcccacgctgaacaccacgggcacgccctcatattcggccacgccgctcaccacatggggatggtggccgaccaccacatccgcgccggcctcgatggcggcctcggcgaatttgcgctgcgtggaagtggaagtatagcgcagctcttcgccccagtggaaggtggcgacgagaatatcgcattcctcgcgcagctgcgcgaccatttcgcgcacctcgctgggctcataatcccattcggtgaggccgatcaggccgatttttacgcccttgacctccatcacctgcgtctgcgcatagccatagggcacgatgcccacggcctccaccgcggcgagggtatcctcatagccctcttcctgaaaatcgcgcgcgtggttgttggccatgtgcacggcttccacgctggcggcggaaaggatctgcgcgttgcccggatcgccccggaaattgaactggcggcccccgcgcttatcgtccgaagtggtcagcggcccttccagattgacgatggtaagatcatccgcctcaaagatgggcttgaggttggccaggaaatagtcgtatccatattcttccacaaaagactggaagcgcgtgttgttcttgttcacatcgcccgccagcgtgcaatcgccgccaaaggtgatggtgatctcctgcggctcgggcacgggcgtagccgtgggcgaaggcgtggcggtcggctcgggcgaaggcgtcaaaaccggcgcggtcgccgtggcggcttcgggcgtgaattcgggcgcgagcacctgggagcgcgcctcgccgggcacagcctcgtccaccatgccgcccatgggccacaacagcaccgtaaacaaaacaagcgccgccacacccatgcgcctgagcgtgcgccgcgcgcgctgtttccttcccctacgctttgccatgcaaacctcctgccatttcgcttgttcccattatagcgcgcggcgcgggcaaaggcaaattatgggcgggtttgtgagattgtcttcatagtattgcaacatcttgcaacaaagctccgtccttcgctggcgcgccacaattttttcgcttgcaaccgcggtggagttgcgatataatgaaggcgaggtgttgcaagtgccaaatacgaaattgacccgccagcgctggaaagaccatatgtattacggcaaatggatttatatcgtgctggccatcgtggcggtgttcgtcacagatctattgtattccaccacggaataccgcccgccggatgaaagaaaggttaccgtgcaatttgtgagttcttccgccagcatggcggaaaccgtggagcagaccaccgaacaaatcctctccgccgttttgcccatggacgaaacgctggagcgggtggagttcttcgcgctgaatttttccggcgacgatagcgattattacggcgcgcagaagttctttgtggagctagccgcgggcgaaaacgatgtctacgtgggcagccgcgcggtgctaaattccatcatcgaccagggcgcggccatcccgctggatgaatacattgactctggcctgatcaccgtgccggaaggcgcgcagctttatgagcgccgcgagccgattttcgatgagcagggcaacgaactgggcacgggcgaaacgcgcatctatggcttcagcacggatcccctggtgcaaatgcccgcgcaaacttacatgagcaacgagggcaactatttcatcatcacttccatgagccccaacccggaaacttcggccctggccatgcaggagctttacgcgctgtggagccagccgctgccggagccctcgccttctgcggacgcttccgccgcggcggaagaggcggctagcacgcccgcgccgtctagcgaagcttccccctccctctcgccggaggcggaggagggcgcgcaatgatcacgcaggatgtgaagaaccccaagctgcagggcttgggcggcctcatcatcgtattgtgcatcctgctggcgattttcctggccgtgatcctttccgcgctggcgcgcccgctggtgggcgcgctggcttcttcgctgttcgtgtggctggtgggcggctgcgtggcgctctatgtcacgcggcgtttcgtggtcaaattccgctatagcatggacgcgcgccgcctgcgcgtggagcgcgtgtatggcgagcgggcgcgctttatgctggaatttccgctggacggccttttgaagatgggcgcgccagaagaaatccaggccgcctatccctccgccccgcgcgccaacgccacccacaaggatgtgaaaaccgcgcccgtggccgtggcctataagctggaaggaaaaatccgcgtcctgctgcttcagcctgacgagcgcatccacaagcgcctgctcgacgcgctgaaaaacgacggcaaaacagccgccaagtcgaaataaatatagaaggagccaatttttgccaaattcaagggaaagcgcgagagggacggagcctcgtgcgactcttgaggaaaaggcaaccccacagtcagcttcgctgacacagagaattgacaaagtattggaagaatgaggcttaaatcagaaatgacggcgtgtacgtcatttctggcattttttgcagagcaaatgcttgcatttgcggtaaaaatgcattcccgtcccggtcgctggccgcaaatctttgatttgcaagcgaccgggtaatcctcgttgacaaaccaaaggtttgtcaacgatcaaagtcagcttcgctgacagcattcctcaattcgcaatggtcgctccgctgcgctcacaagttcgcttgcggctctcccttgctcattgggcttacttcgcgctgcttcgcgcacagcgcgcgcgcttcgtgcgcccc

SEQ ID NO: 3612 - DNA, 18084 bp, Unknown
  16S sequences of unknown bacteria
tggtatgaaaaaggcctggaatgggcagttacgcagggaatttccgacggtacaaatccggatcagagtgtctcccgggaacagttagtgaccatgctctggcgtgcgtccggcagtccggaaaattccggaagtctgggcagctttacagatgcagacagcgtatcctcttatgcggctgatgcaatgagctgggcgatttcgaaaggactgattaccggaactgacaaaaatgaactgattccgggaagtgacgcaaccagagcacaggtagcgacgattatgatgcgttactgcgctatgcttctggactgatttcaacaaaatcttccggtaaattatctgtgaggagacgagagcttcgtctcctcactaaaaaatctgatacggatatctcgtaggtatgacgagaaaaagaattttatagagtgcagtgaaaataagagtaaaacagatcattatgacagtttgatacgcggtacggatttatttttttatatttaattacttgcaaaagaaaagattatgcgtcggtaacgattggaaggaaaggatgggaacatgaggacgagagaaggattttcgaaaaagagaatggccgttcttacggctttaggcctctgcgcggcgatgctgtttacacaggtcttctgttatgcggcatataattcggttccgacgaagcagtacccgaaggtgacgggtgtggaggtcgtagagagtacagcggagaatgcagatggcgaagcgtggcaggcggaagtacatatcaaattttcgaacaatgtgggcgcgatcgatgaggaacaggagagaaatgcggtaaatgaaaccgaccctgattatatgatcggagtaaatgagaggaatctgacgaaattccatctgatcgatccggtgacagagaaagagattgcggaggaagactgggaggtttctcctcaccccgatgctgaaaagcatacggatgaatcaaaatatttttatatatacgtaaaaaatcttgatgaaagtaaagattatcaagttaaaatagatgaagatttgttcgcgaatatgggaaacagcctgggcgctccctatatcgtaacttttaatttgggaagcaaaacgggcaattatgaaacggagggagatctgccggcggacgagcatgtacaggctcctctcacattagatctggcaaatatagaaaatggtgagaaggatgtgccagtgggcaagaagatcaatatgagattttcatttaatgtggcaggcgatgaagtctttgagtataacaagaagcagatttccatcgtcaagtcggcggacgagtctcagagcgtagaaatcgaagttcttccgggaggggagttacaggagcttacagtgatcccggcagaaaatctggaatacggcacggaatataaattagtcattaacaaagaatttatggcgagaaacgggatcgcattatccagccctatcaatatttacttcaccaccgtggaaaaccccgatggtttcggtaatgaaggaggaggcggttccggctcgggtgatgtgacagaaaaaccggaagaaactcagggagagctgaccatcgcaagtatgaaaaacggctctgtcgcagtagatcctcaggaaccgaaggcgggagaaaaggtgctgattaccgtgacgccggatgagggttatttgttgaagtctcttagagtgacagatgaagagggcggtgaaatcgaactcaccgaagattccaatggcaaatataatttcataatgccggaagggaaagcgaaactggaagtcgtatttgaagaggacaagccggtcgaaaactattattctgatatcgcatcaaactgggcggcagaggatatcaatctgctggctgatctgggtgtggtgacgggaaaacctgacggaacgtttcggccggacagtcagattacgagagccgagatcgtagcgattctcgtgaggctgtacgatctgaacagcgatgatatggtcctttttgacgacacaaaagatcactgggcgagcgggtacatttcgattgcggcgtctctgggatacgtcaacggttttgatgcgaagcatttcggaccggacgatcagctgacgagagaacagatggcggtcatgacggcgagaatcgcagagcttcaggaagatacttccggcggaaatccggtgcctttcaccgataaagaccgtatttcatcctgggctttgagtgcggttacttctgtatttcagaatggagtgataagcggctatccggacagaactttccgcccttcggctaaaatcacccgtgccgaagcctgtcatatgatcgtaaatctgataaatctgcagcaggaggcagcgtgatcggcgtagccggggaggataccggaaaaagaagacggagaaggaggggttctatccttctcttcgtcgttctgactgccgcccttctgtgtccctccgctttcgcggcaggagacggcagcggaggaggcggcggagcggtgattcctctgtatatggactggtcctatcctgccgacggtgcttccggagtcagcgttgctccggtgatccagtgcaagttcagccacaatgtggcgcagtacaatgtggcggatcggaacaaaacgctaataacgctgaaaaaagcggacggaacgaatgtagatatcacggtttttgtcgctgacgcgcagctgcagttcgacaaacggcagtttctgtacgtttctccggtaaagcctctcagctatggtacaaaatatattctgacgcttcacgaggggattcaggcgaaaaacaatatggctaccgatgaagagcagaccgtgacatttaccacagagtacggcagatcttcttttaatgcgccgctggtaacgcctcctgcggacaatgatccgaaagctgcgggttccggcagcggtacagatgcagaagctgcggcaaccggcagtgccggcgggcaagccggaaacaacggtgagaccggagcagagagtagcgcctccgcagccggagatgaggaaaatggcatttccggagaagagaatgattcggatgaaaatgcggccggaggggaaggagaaagcagcgggcaggcagacaagtcctcagattcgtcttcaggggaaaatatccgatcgtttttttcctcttcggagtttcggggatttctgctgatacttctccttctgctgacaggagctgtcggcgggctaatttctgccgcatggatgaagaaaagactgcgtccggatggaattctgaaaactcgccgaaaggcattggctgacgcaatctgtgacggagcaggcagcataaaaaaggaaatttcaggaaaaacggcagatgaatatggcggaaagagacagaggacagcaaaacatctgtctctctttctgatcacagcggtgactgcaaacgttatcctgtctgcggtggcgccggtttcgcatgcgtctgttcccgagggatttacggtgcggctgaagatcggcgataaaattgtctctgaaaagacatataccgactctcagctcagggcgatgaaacagactcgtcagatatattccggcatcaatgaagaagggtatccctgtgccatcgcggcagaaggaattctgctgaacgatctggcaaaaacgcagggcgtagatccttcggaaatcgagagtatcagtattcacggagccggaaactggacgagaaatatgacaaataactacctgtacggtgttaaaagataccgctatcctcatctgtcggaggcttaccgcatcgaaaacgggatggagtctttggagagcggcaaaaatcagggctcttctcctgaaacgaaaaatcagtctccatccgccggtcaaaacgccggagcatccggcagcggagcggattctgatggctctggccggacagatgcggcagattccccggatcagcaggggcagagcggcaatacagcgggtgacagcggatccaaaggggaatctgatacgaatccggtggaattaaagaaaaaaaatccggagagtgttgcgcctatgctggctcttcgctcaaatgcctcgcagctgagggatgatgtatcctattcgtctctctctgctatcgagggatatcgtttctgtttcggccagctgaatccttccgacggttcttatctgatgtacggctacaatctgcaggcaatcgatatcaaggtgactgcggcgggagagtttgcggaaaagatgggcatgaaggataccgaaggaaataagaagatgacttccggcggggctgattctgcggggagcgcggaggtagagggaccgtataccgatccttttacgggagcggtgacagatcatcttcctgatgaactgacggttcaggtaggttacttcggtacagagtattatacgataaaaaaattcacgtttgatgaaattgcgtcgatgcctctgacacgccaggcctattcttccgtctcttccgatggaacaaacggaattctgactgcgatgggggtacgcctggtggatctgatcacggcttcgggcatcgatatggattcggtggagaagatcggtttttaccagggcgctgaagaaggttgtcccggcgtcaccgcgtcgaaggcttatcttatcgacatgaaccggtattattatccgaatcttaccgcggcttggaattatacgacgggaggaaaaggagcggcgcgcagtgcggtgcgcgtcgacactgtgatcgcgctgaaggattactgggatgaaaaatccaccgtgccggattttttccggatggacggcacacaccggtaccatctggtctatggacagacttccgtaaaatccaacaatctggataagtctctcctgtggatcgacacgataaaggttcaattgtacggttcgccgtccgatgaaaactgggtggatgagtatctcggcaaggtcgtgggaagcggcgaaggcaatggtgcggggatcggaggaagcggcgccggcagctccgcttctgaatcagaaccggacgggacatccggcgaagcggcagagacggaaccagagaaattcaaaaaaaatgacaattctttggaaaagatcgacgccgccgggaagcatgtttatgagattgcgggaggttccgtatcttacagtctcggcagtgaaagaaaggattaccgcatctatatcgccgcgatcttcggagccgcctttttattaggcggcggcgccagtttttacgcttatcggcggcggatgaggtgaagggagaaaatatgacagattttttaaaagattcattacatacggtatctcagtggctgctgatcccgaccatggcgattctgcttcttctgattctcggcaccgtggcctgcatcggcgggattatcatggaggcggtgagggaacgttccgtcgtcaaagaaaacgtgacaaatctgatcttgaatatccacgggaagaatccgtctgatatccggtcgatgatcggagaaagccggatttatacccgccataaagatgcgtttttcacgattctcgataatcgggacaagccggaagaactgttgatcgcagcggcgaggaagatgatttcagatgaggaatccaggtttgagaagagggcgtcgctcacagagatggcttctcgcatcgcgccgatgttcggcctcatgggaactctgattcctctcgggcccggcctgatggctctggggcaaggggataccatgtctctggcggattctcttctgatcgcttttgacacgacggtagcaggtctcgtaacggcggcagtgtgctatgttatcgcaaagatcagaaggcgctggtacgacgattatatggtttctctggaaactctgatggatgcggtgctggaggaggtttcttccggagagaggaaggcggaaaaaccggatcaggatgcctctgcagagatgcaggagacggaaaaagcctgcgtaaagaagacggcggacacggagagaaaggatgcggtacaggatgaagatcagctcgatgaagtataatcttcggagaaagaaagtgcaccaggatgaaaaccctctggagatgatggcaaatctgatggacgttatgctggtctttgcctgcggtctgatgctggctctcatcgtcaactggaatgtggatctcggcggtcaggaagtggattatgtcagcgagcaggagattacggagacgcagcttaacgaaaataaatcggaatccgagatcgatgaaaatcaggattacaaaaaaatgggaaccgtttatcaggatccggagaccggcaggatgtacatggtgacagacggggaatgagacgaaattttttcggttctgtgcggaccgccggaataaaaaccggcgccgcggttttcaaaaatgtcagagagaaatggagagatgaaaaattatttaatcagtatagatgataccgatgatgtgacaaaacgtgtgagtaccggacagatcgcagaaatcatcggccggcgtctgacggaggcaggcggaaaagtaggagacggcatctccaggcatcagctgctgctcagtgatgagatcgcctatacttcgcacaacagttccatgtgtatcgatgtggaattcgaggaggcggacagcggtgaaatcgcatcgatctgcgaagaagtaatccggcagaatatggcccgggtgtcggacccggggtttgcggtatgctgtctcgaccgtctttccgatccggatcgtctgatcgaattcggctttgaagccaagaggaaagtgaagaaaaaggatgaggcgtatgcgctggcttcggggattgagggcgtcattttgaaagagctgggcggaaccggaggcggcgtcatcggcgctttggccggtatcggactgcggctgagccgcagcgacggatctcttcggggaaagacggggagcgaattttccggggaatttatgagagccggcgagatctgcaggcgtttcggcgcagaactcgtcatcacaagagacggtgcggttctgggagaagcggtacccgtacggatcgataaattcataaaactgatgtattttgacggacataagtgctgcatcgtccgacgggaagaggatgggacatatgtgacaatccatcagcatcaggagagagaaaagtttatggaaattacagggcaggcggtatgcgccgattttgtaccggacaatgatgaagaggaattcggcataccgcagggagcacagtcctgttttaactgtctgtaccgcagatggctggactgcggttttcgctgtatgaaagcggaggaataaaatgggaatcactgtaaaacaccgtggagcagttgatggtctgacaggagcggagcgggatatcatagggcggtcatatgacgtgactgtcatcgggggaggtattctgggagctatggcggcctggaggctctcccggtatgacctccggattcttctgatcgacagagcttatgatctgggagagggcgcggcgaaagccaacagcggcattctctacccgggctttcagccgagaggcggcagtctgaaggggatttcctgcgtccggggcggagcgatgtacgatgcgatctgcagcgatctcgagataccgatgaagcgcatcggctctctgtacgtcacttttcatgaggaaggcgacgaggagatgatgaaaaaatatcaaagaggtctggaaaacagaactccgggtatggaaattctgtccggaacggaagcgaggcgaatggaacctctgctgagcaaacgagtcagaaaggctctctatgcgccgaccacaggtatcatatcgccatttgcgcttatcacgtcgctggcagaagccgccgcgcagaacggcgtcagatttcttttcggctgtgaagcgaaagatgttctgctgccggaaagccgggtaccggattccggtacggcggggagggagcggaaagaaaaccgcggcgatacggaagaaccggcgcgggtcgtgacatcgaaagggacgattaccacccgctttatcgtcaatactgcgggagacaacgcggcgcggatagaaagctgtgtgcgtccgcagaatctcgtgatccggccgcgccgggggcagttttacatcttcgataagcaggaaggcgcggagctttctcatgtgatttatcaggtgcaggaaaacgatgaaaagggtactctgatcgctcctacggtggagggaaatctgatcgcgggaccgacatcggaaaatgtgagttcttatgagaatacggacacgaccagagcgggtctggatcatgtggaacgggtagcaaaaaaaattcttcctgatttggatatgggaaaggtcattacgaattttgcgggaatccgggcgaatatcacgaatgtggacaaagaacagaaggattttgtgatccgcgtcagcggaaggcgtatggtcagcgctctcggcataaaaaatccggggatgacggcggcgccttatctcgtggaaaggatgacagatcttctccgggacgaggggctggagacccgggagcggcaggactttcagccgaggctgaagcggaaaaagccttttctgcagtgtacgcctcaggagcagagacagatgctgaaggaagatccccggtatgccagggtgatatgcagatgtgaggaaatcacagaaggagatattcttcgtgttcttcgctctcctctgcctccgaagagtctcaacggttttaaaaaacgtctgaggacggggatgggacggtgccagggcgctttctgcacgtcgagaattctggagatcgtgtgcagagaaacggggtgcagaccggaagaatttatgaaaagtacaaagggaagccctctggtaaagggcaggttgaagtgatggaaaagacttatgatctggcgatcgccggcggcggcccggcgggtatggccgccgccgtgcaggcgcggaaagagggcgtggagaggatcattctcctcgagcggaactcccgtctgggagggattcttcctcagtgtattcacgacggattcggtctggaggaattcggccgtacgatgaccggaccggaatacgctctggaatggataaaaagagtggaagaagccggaatcgaatatcatacggataccgcagttttcgatgcggcggcggtttcccgacgggagacgccgcaggaaagatcttcggaaacagcgcctgcgggatatcgtctgaagatttcttcaccgtcctgcggtgtggaatccgtattctgccgtgctctggttctcgcatcgggatgcagagagcgcacgcggggccagctgaggattccgggaggccggccggcgggggtctataccgccggcgctgttcaatatatgatgaatgttcagaattatctgccgggaaggagcgctgtcgtactcggttccggcgatatcgggctcatcatggcccggcggatgaaatgggaaggcatcgatgtgaagatggttctcggtgagcgggccagcggtctgctgcgaaattatatccagtgtataaaagactgggatattccgatccgtttttcccataccgtagtgcagattcacggcagaaagcgcatcaccggtgtcactgtcgctccggtagcgaaagacggctcgccggatctggagggttctcagtacatacggtgcgatctgcttgtggtagcggcgggtctgattccagagacagaactgtggaaaaaaatatatttttcggagggaaaggttccctgtgaaataaaatccgaggatgaaatttccactcagcggtcaggggtgttcgtctgcggaaacgtggtgaggcaatacgatacggcggacgaggtttccgcatcaggcagaagagccggtcggtcggcggcgcggtatttggaaaaattcagggagtttacttcaggttttgattatgatgccggcaggaatcgaagccttttgcaggcagaagacacggaggttttgccggatctttccgggaggcagaagccgctgcgcgagctgaaggaagagggcggaaagattccgaaacatgttatgacggagaaggatctcgactatctgtcgtccggttcttcgacagaagagagcagtgcaaagattgtgtactgtatctgctgtccccggggctgccgaatgaaagtccgggacaaaagtgaaatttcagcagggggcggcggtgaaatcagcggtttcggatgtgagacaggaaaagcttatgctctgcaggagacgacggcgccgaagcggatcgtgacggcgacggtggcggtgcggggaagagagaatcttctccttccggtaaagacgaacgttgcggtggagaaatgcgacgtggaacgtattctgaaaatgtgcagaagaataaaagcggttcttcccgtatcggcgggggacgtcataaagagcgatctgctgggacgcgggaggaacgagggaggcgcaggaggaacgggtctgcgctcatcagaggacagcgctttcgaagagggcaatttcaccgcccgtactggcaaatgcggcagcagagtgcgaagggagcgtgtggacctcatcgcctgtatggatatagatgaagccgctgccgcggagatctgcccgaaacactgcggtacatggagcggcggagatttttaaaactgcggtttcagaggagatgtctcagaaagaacacccggggagaggatgatccgaggcagggactgcctctgacataagaaggattggaatccgtggagaaagagatgttatgaaaaaaatttggattatactgttcatacttctgccgccggcggctgtctttatcgggctgttcgcagggagatatgagttaggcctgacagaggtgacaggcgcgctgatggaatttgtccgctccggtgtcatgtcgattgcaggaggggaaggcgccgcaggcgtgtccgcggattccggcgtcagtgcggaatgctacgctgtggtgacggaactacgtcttccccgcctgattgcggctgcttttgtcggcgcggcgctttccgccagcggtgcggcatatcagggtgtttttcgcaatccgctggtgagtcccggacttcttggagtcagcgccggagcgggattcggtgcggcgctggcgattcttctcttcggaggaggatcggcgtcctattttttcgcttttgctttcggcgtcggcgcagtgcttctgagttactggattgccggtatttacaaatcggttccagcgatcatgctggtactgggaggaacgatcgtgacctcggtgtttaacgctctcgtttcgctgctgaaatatgtggcggacacggacagtcaactgccggctatcgtctactggcttatgggaagtctggcttctgtaggctggaacagtatctgggcgataattccggtgggcatcggtctcgtcgtgctggtctgctgcggctggcggatcaatgtgctctccatgggagaaagagaagcccgtacgctgggcgtcgatgtcagatcggtgaagcgcattgtcatcgcaggggctacgctgactaccgccggagctgtgtgcatgtgcggcgtcgtaggatgggtaggtctggttatcccgcatatctcgcggatgatcgcgggacacgataaccggcggctgattcccgtatcgatttctatcggcgcggcgtttatggtgatcatcgatactgtcagcagatctcttacagcttccgagcttcctctcagtattcttacctctctgatcggcgctccgtttttcgtgcttttgctgaagcggacgaaagggggaggatggcagtgagagagaagccgtacagatgtcggagacatgccgaaggaatctccggtcagcggagagaaaaaacggaacggattcacccggcggaaagcagggagccactgatcgaggcggaggctgtttctctgtcttacgacggaggggagccgcttctgaacgatatccatttcaaaatcgagccggaaaccctgtattgtctcatgggagccaacggatgcggaaagagtacgctgatcaactgtattctggggatgcacgaaccggacagaggcgagattcggatcggcggcagaccggtttccgaataccggcctaaggaactggcaaagagagtcgcttttgtaccgcaggttcacgagcggacttttccttatacggtggagcaggtggtgctgatgggacgaaatgcgtacagcagggccctgtcggggccggaggccagcgaccggaagatggtaaaagaggtgctggagcgcaccggtatcgcgcatctgtcgcagcgtccgtatactcgtatcagcggaggagagatgcagctggtgatgctggccagagctctggtacagcatacgtcggtcattatcatggatgaaccttcggctcacctggatttccgcaatgaactgatttttctggaaaatgcggcacggctgatacgggagcagtccgcgtcggtcatcatggctacccattcgccgaatcagccgtttttctttgagcgggcggggattcgcgtaaaagtgctggccgtctgcggaaggactctttcttttgaaggcgctccgtcagaggtgctgacggagaaaaatatcgctgaaatttaccaggtgaaatccagactgttatgtgagaatgcgccggagacaggcgaaatacgtcagattgtaccgctgaaaaccatttaaatcgccggggagcggagagaagggcgtttgcaggacaggagagaaagaaaaaggaggcgcgaagtgatatgagatatgagaaaaagggacgatacctttcggcggtcgtctcgattttgctgatctggtcagcgctgttttctctggccggctgcggcggtacgaaaagcgctgcgggaaatgaaggccgtgcggattcgcaggaaaacggttttttaaaagtgggttacagcgcggatttctcggaggattcgattcccgatccgatggcgggttcttcggaggggatgctgacgatacgggactgtgcgggcagagagacggagatccctgcggatccggaaagaattgcggtgctcgattcttttgcgggcgaagcggcggtgatgatcggcgcgggggaacggatggtcacctgtcccaacggtgtaaagagtgacagccttctgtgtgaaatctgtccgtctctcaaagatgtatccgtcgtcatgtcggggggatcgtttaatgcggaagctcttctgactctctccccggacgttattatcatcaaagaagggattctctcttctgaggaagaaaaagctaagctggacaagctggggattccgtatctggtgtcggcatacgggaatatggcggaacagatgtatgctatccgcatgatcggtgcagcggccggcgggcaatatcgtgaaaacgcggaaaaaataatcgcttattattgtgacgtcattcgcagggtttgtgtcgctgcagaaaaaattccggaggctgagcgaaaaacagtatatcattccatcaacgaggcggtgaggacggacggtgagaacagtctcggcaacgattggatctcatgcgccggtgcggaaaatgtttcggcgcagcatacggaatctctgcaggcggacggcggagattattatgccggtatcgagcagattttcgtctgggatcccgatgtggtgatctgcaatgaggcggagacaaaaaagtatcttctttcggacggcaaatggtccggtctgcgggcggtaaaagaaaaacagatttataatatccccgtaggcgccacccggtgggggcaaaggggcagtctggagactttttttgctatgatctggctcggcgtcacgatttatcccgaatattatgcagacttcgatctgaaaaaagaggtgacgcaattttacgatgagattctgggactgaagatcgacgacggcacttatgataaaatgctgtccggcagcggaatccgaaatgccagcgatgcgtcgggcgggtgagaaacaaaaaaatgaaggcagcgattcgtaccggaagacaccgccgcagaatgtcaggttctgcggcggtgtttttattaggaaacgccggatcgtatagatacaatcacagattccattctcttgcagaagccgaaaagctgtggaagaaacggatgattatgataaaatagatatagtatcggcggaaggccggagcgtgcgtaaggacgcagaaacggccatgtgagcgacaatgaagtcataaatatggaaacagatggaaattacaggatgagacaatatcgaacagtgcttgcagcatcagggagaaaacggacggttatatgaagaatatggtcagagaaaaaggcgtgtgggaaggtaaaccgaggagacgggacatacggatgatcgctctcgatctggacggaaccgcgctgaataaggagatgaaagtgacggaacggaccgcagaagctttagaggaagcggcccggcgcggcattcaggtaatcatcgccaccggcaggacgtatcatacgctgccggagcagctttttgaaatcgacggattgaagtacgccgtgacatcaaacggcgctgtgataaacgaactgaagacgggcaaagtcatttacagaaactgtatcccggctgctgcggtggaacaggcggctgagattctgaaagggcggttcagctgcagtgatccggcgatttgcagtgagaacggcggctgcggggagcctgcgaaagccttttcagaaatcagtgtagaagtttttacagaggggaacgcatatctggaaaaggcagagctggacgatatcagaaaaaacggttcttcctaccgaaatgctctctatgtatccaccacgagaaaacctgcggaggggattttggattttatgctggcgcacagggaccggatcgaaaatatctgcctgaattttccggatgtatctctgcggccgttctggaaacagcggctgagcgttcttccggaagcgacgctgaccacgtctcttccctataatctggaaatcggaggaacgactgtcagcaaggcggaagcgctgcgttttctcatgaaagagatgggtataaaacccgcgcagctcatggcctgcggggacagtcagaacgacgcagcgatgattcggctggcgggtctggggatcgtgatgaaaaactcctccgatgagatgaaagagattgcggattatgtgacagacagcaatgagacggaaggagcggcgaaagccatcgaaaaattcattttataacgatttttccggagattcgctttttctgcggaatcttcggaagtgcgacggactgtaaggtattaattttgcggcgggccggtatatgcagggtgcgaggaagagacgggaggtcaatatgaaaagagaactggaatatttcagaatcggcggatcctggggaggaaatcagagctggttttttgacttcatgatgcgcatcggaggctgcggtgcggtgacggcctgcgattgctgtatttatttcgccaggtatcgcgggatggaaaatctgtatccggcaaatgcacggaaggtgacgcggcgggatttcatacgttttgccaaagttatgaagccttatctgcgtccgagaaagggcggcatcgatacgctggagctgtatattgacggtttttgcgaatatctccgcagtgtcggcgaggagagaatttccatgcaggggctttcgggaaactgcagttatagagaggcggccagggcggtgcggaagcagatcgagagcggactgccggtaccctgtctcacgcttcgccacagcgatcctcagatggaggactacgtgtggcactggtttttgctgacgggttacgattgtgcggattccgacggcagagacggggagagtactgatgcgtccgaagcgcgaaacaggcagacgaaaacgacggaaagcagatcccgcggagaatattcgacggaaacagttttttcagcgatgaaggtaaaagcggtgacttacggcgaataccgctggatcgacttcgaaagactctgggataccgggtttgcgaaaagaggcggtcttattctgttcgacgcgccgccggtttaaagataagagttcacaggtctgcggcgcgcagaagcggcatatattcataacatagtgctgatgtccaccgctcaggcaaggaggcggacagtgtttccgggtttctgcgggattcgtcatctcccgtgtaaatccgtgtcaatctgcctttctgccggcccgtaaatccgcgggctgaaaatttcggtgaaaggacaatatcaggtgtgcaagaaatggggtggattatgaatatatacattgtaaatccgggagatactgtcagcagtatcgcggcggtgacaggagcggcggaagaggaactcgtctatatcaatcagatcgcctatccttatctgctggcgccggggcaggcgcttttgctgccgcctctggaagggggatccgcagatgccgacgggagagcggctgtcatggcaggttatgcgtatccttttatcgatgaagcgaccctcgcagagacgctgaattatctcacgtcaatctatgtattttcttacggattccgggccgacggtacgctggtggctccgcagatagatgacaccagaatgattcagcgggctttggacagaggtgtccggccgatcctgacactgacgccttttgatacggaaggccgatttaacaatctgctgattacgtcgctgcttcacaatccgccggccagagaaaatctgattcaaaatcttctgaatactgtagtgcagaaacagtttgccggtgtagacgtggatttcgagtatattatagcctcggaccgggatctgttcaccgctttcgtcgcggagctccgggggcgaatgaatgagtccggacgtacggtttctgtggcgctggctccgaagacgtcggacgatcagccgggacttctctatgagggaaaagattacgccggactgggcgccgcagcggacagcgtgcttctgatgacctatgaatggggccacgcctacagccctccgatggcggtggctcctgtggatcaggtgcgccgcgtggtggaatatgctgtctcgaggatcgatccggccaagatcaatctgggaattccaaattacgggtatgactggacgctgccgttttcagaaggggctccccgggcccggaccatcggaaacatcgaggctgtgcagcaggcggtggaaaagggcgcggaaatttattttgacgaaaccgctcaggctccttactatttttacgtggaagacggcgtgactcacgaagtctggtttgaagatgtgagaagcatttcctccaaatttgctctgatcgaagagttcggtctgctgggagcggggtactggcagctgatgcggctctttcgggcgaactggatcctggcggcggagacctttcacatcgaaggttcgtcaatgtgagacgaggaggggcggcatgtctgctcctccggattctgtcataattctcagaaatttcagtttttctgaagctgcgagagtctgcggcggttccttcccggaactgcggttttcgcgaaaaattccttttccgatttcggcccggctgttgacgcaggtccttttgaatgttattctacctgtggtttaccggttatgcggagtctgccgatcgttcgatctttcggcatagaaccgcggtcttgagcggcttgcgggaataactccggcgccggaaaaataatatgaaaacgattgtataagaggagagatgatgttcagcttcacttgctaactactatttacagaacggaaaagaacgcgcagtctgactgctgtataaaacggagggttcatgctgcggaaaaatcgcttccccattctgaccggagaacttgtcagaggtttcggtgatttaaaattccgcagagcttcgttttgcggggagagatccgggtgagacgccggcgcgccgcttttctgttgtgtagatgagcagggaagctgttttttgccgctcttcgcacatttcgcaggcagtttatttccggtttttcagat

SEQ ID NO: 3613 - DNA, 32759 bp, Unknown
  16S sequences of unknown bacteria
gtcttattatatcacttctggcagtatcgcgcctacttttctgtgcggtattgccctaatttcctttaaatatatttctcatcgctaaagttatgctatactttcctaaaaaggaaggtgatagcgtgtcagaatccaaattgcgcgacttatcgacggattttgcggtcaaggcgataaagttaacggaaacgatccacgggcatcggtctatcgttaatcagcttgagcgctccgcaacctccatcggtgcgaatattcgggaagcgaactatgcgcacggaaaagcggacttcattgcaaagctgcaaatcgcgctcaaagagtgttatgaaacggagtattggatagagatatttgtgaaatccgatattttgggcagagaggcggcgcgggagctgtataccttatgcggcaccatccgaagaatgctgatttcttccatcaacaccgccaaagaaccgaaagcctaaacgattttcacgaatcccacattttgtaagacttataaaaatttatgaataaagcggcgaagtcggcgggaaaggttgattttttggcggtccggtggtatgatgagtaccggaccgctttatttatagaagaaagggtgagcgcatgaaaagctccattacggtcatttgcgggcattacggctgcggaaagaccaatctcgtgctgaatttggcagcagaggcggcgcagcgcggcagacgcagcgttgttgtcgatatggacgtcgtgaacccgtatttccgctcgtcggattattccgcgctgctcaaaaaactcggcgtggagctcatcgcgccggtgttcgcgaacacaacgctcgatacccctgtgctgccgccggagatcttctccatctttaatatggagaacgccgatatttttatcgatgcgggcggtgacgacgtgggcgctacggcgctcgggcagctgcatcggcaaatcgagactgccgggtacgagatgctgtacgtcgtaaaccggtaccgtgtgctttccacaaagccggaagaaacgcttccgctccttcgggagatcgaaacggcatcgcacctgaaagcgacggcaatcgtgaacaattcaaacctcgctgtgcagaccgatatgcagacggtgcttaatgctgtgccgtttgcgaaaaaagccgcagaattatgccatctgccgcttctctattccaccgtgccggattttgcggtggaaaacacgctgcccgagggatttaaagcggtaaagcgatatgtacgtttcgtctgggaggacgaaaccgagtaggataaaggaggaaaccgaatggcaaggatcattgtagacgaaaaagtatgtaaaggctgctccatgtgcattcacgcgtgtccgaaaaagatcatcgcgctcgcgaaggatcgtttgaacgcgaagggctatcaccccgcagagctgaccgatgaggcagcgtgcgtgggctgtgcggcatgcgcgaccatgtgcccggattcggcgatcacggtggaacgctgagagaggagttaaaaactatggcagaaaaagttttgatgaagggcaacgaagccctggccgaagccgctattcaggcgggatgtcatcatttcttcggctatcccatcacaccgcaaacagagcttgcggcttatatggcaaagcgtatgccgaagatcggcggtacatatttgcaggctgaatcggagattgcggcggtcaatatggtgttgggtgcggctgcggccggcgtgcgcgccatgacgtcttcaagctcgcccggcatcagccttaagggcgagggcatttcctatatggcaggctccgacttgccggcgctcatcatcaacgtgcagcgcggcggcccgggcctcggcggcattcagccctcacagtccgattactggcaggcgacgaaagccctcggccacggtgacttccagattctcgttttcgcgccgtctacggtgcaggaaatggtcgacctcgtctccgacgcattcgataaagccgacgaataccgtatgcccgcgatgatccttgcagacggcatgctgggccagatgatggagccggtggagctgccggagcacaaagacagaaagcttcccgaaaagccgtgggcagcctgcggtcacgaaaataaaagagagcacaacatcatcaactccctttaccttacgccgaacgcccttgaagaccttgtgcgtgcccgctacgagcgctataagatcgtcgaagaaaaagagcagcgtgcggaggaatatcgcacggaggacgcggatgtcatcgtcgtcgcttacggcgcatcgagccgtgtggcgcgcagcgccgtgaataaggcgcgcgaagccggcaagaaggtcggtttaattcgtcccatcacgctgtggccgttcccgaaggacgcgatcaagcgcgcggcagaccacgccaaagagctgctcgttgtggagatgagcatgggccagatggtagacgatgtgcgtcttgcggcagagtgccgtgtgccggtgcacttctacggccgtaccggcggtgtgattcctaccccgaaggaaattctgggcgagatcgataaacttttgaaataaggcgaaaggatagaatcaaatggcagttgtatttaaaaagccgtctacgctaacagacgcgccgctgcattattgccccggctgcacgcacggcatcattcaccgccttgttgcggaagcgatagaagagctcggcatcgacggcaaaacggtcggcgtggcctcggtcggctgctccgttatgtgctacgattatttcacctgcgatatggtgcaggcgccgcacggcagagcccaagcggtcgcaacgggcatcaagcgcgcaaagccggaggacgttgtgttcacctatcagggcgacggcgaccttgcggccatcggtacggcggagaccgtccacgcggcaacgcgcggcgaaaacatcaccgttatctttgtaaacaatgcaatttacggcatgacaggcggccagatggcgccgacatccctgccgaatcaggtcacgcagaccaccccgtacggccgtgatgtcaacacggcaggttacccggtgcgcatctgcgaaatgctctccacactggacggcgtggcgcttgcacagcgcgtgaccgtcgataacgtgaagaatgtcaatatcgccaaaaaggcgatcaaaaaggcgttccagaaccagatcgagggcaaaggctactccattgtagaggtgctttccacctgcccgacgaactggggcatgtcgccggttgaggcgcttgattggctcgaaaagaacatggttccgtactacccgctcggcgtgtataaagacggcacaaagggggacaggctgaaatgaaagacttgaacatcgtttttgccggtttcggcggtcagggcattttgttcgccggtaaagttgtggcgtatgcaggcctcatcgagggcagggagctctcttggctgccgtcctacggtccggaaatgcgcggcggcaccgcgaattgcagcatttgtctctccgatgaacccatcggctcgccgcttgtgacgaacccgaacgtgctcatcgccatgaaccgcccgtcactcgataagttcgtgaacgaggtcgagcccggcggcacgatcttactcgacagcagcctcatcgacgagcgtgtagagcgcgacgacgtgaccgttttctatgtcccggcatcaaaactggcggaggaaaacgggctgaaaggccttgcgaacatcatcttggtcggcaagctgcgcaaggagcttgcgttctgcacggaagaaacgctcgataaagcgctgcaaaagtgtattcccgcaagaaaagcggatatgctcggtttcaatagaaaagccttggagatcggcaaagcgcagtaaaattgaatttatataaaaagaacggcgcaggcttaaaatctgcgccgttcctttaaatggagagccaaggaggcggtctttatgaaaattctggcgtttacgggcgcgggcatcagcaagcagagcaacattccgacatttatggagcgacccgacgtgcgcgaaaagctgttccgcacgttcgcggagcatcaccacgaggagtataacgaggtcattcgcgaattgaaagcgaatatgaacggcgcggagccgaacgacgcacattttgcactggcggaatacaaggtgccggtcatcacgatgaacattgacgggctgcataaaaaagcgggcagcgacgcactggagctgcacggcggcctgccggaggacgacgaaatggacaaggcgtgggcgctttataataagcccgtgctgtacggtgaccccgcgccgaactatgtgaaagcatacgaaaggacggctgaattaaagcccggcgacgtgttccttgtcatcggctgttcgtaccacaccgccatcgcgtgtgacctgcgggacgtagcaaagcacgccggtgcaaaggtcattgagattcaggaagacgccgcgcataatgtacggaaagtgttggaagaattgacaagaaagaactgaacagagatagaaaaagcgcgtaggctgtgaaacctgcgcgctgcttttatttgtcgaaataaacggttcaaatttgtgctgtgcgcttctctgcctgtcgtttttgaatcgccttggcggcaaagtaggtgaggagggcggcaatggtgccgaggaggatgccggcgaggacatcggtagggtagtggacaaaaagaaaaatgcgggagaacgcaatgagcactgccggaatgtacgcgaaccagccgacttttttgtggcggagcgtcaaaataagcgctgcggcaaagcttgacgatgtgtggcccgaggggaacgaataggacgtggggcgcgcgatgagcatcgggaaattcgtgaacacgttgcacgggcgtaggcggcagatgatgtttttcagcgtcagctcgccgaaaagcagcgtgaccgtcatggcgataagcaccaaaccgccggtgcggcgcgtttttttaaagcagagcaaaacgagcgaaaggacgatccacccaatgcccgcttcgccgagcgatgtgatgatggggaagaccgtatcggtcacggtgttatgaaagtgcgtctgtataaaggccatgacggcggcgtcaagcgacgggatgccgggaaaactcatcttagtaaacctccaatgctttgattgagttatagtatactgcaatttttctaaaaatgccagtggatttctatgaaagaattctttcaaaattctaaacggacgcgcccgcgcatagaattaccggaaaagggggcaggaaaatgtcaaaacccatagcggaagcaaaattctatgccatgacggcggaggcggctgtgaaaactcttcaaagcgacgcggggcgtggactgagcggatccgaagcgaaaaagcggctcggcgtttacggtgagaatcggctgcaaaaggggaagaaaacgagcttcgcaaagaaatttatgctgcagttcggcgattttatggtgctcattctgctcatcgcgtcggcagtgtcgtttgccgtctcgtgcatgcagggagaagcgaatctggccgacccgctgctgattttgggcattgtcattgcgaacgcgttcgtcggcacggtgcaggaggcgaaggcagaacgggcgttggaagcgttgcgcacgctttctgcgccgcacgccgatgtgctgcgggacggcaaacgcgcggtcatttccgccgaagcactcgtgccgggagacgttgtatatatccgcgcgggagacgtagtgcccgccgacctgcggcttttggagagcatgcatttgcaggccgaggaaagcgcgctgacgggggaatccgtgccaagcggcaagagtgcgaatgcggtatgtgacgaaacgtgcggcgcggcggagcgcaaaaacacgctgttttccggcacgggcatctctgccgggcagggcgtgggcattgtgaccgcgacgggcatgcaaaccgaaatgggtcgcattgcggcgatgctcggcgacgaagaaacacccgacacgccgttaaagctgcggctgcggcgcacgggcaagctcatcgggcttttggtgcttgggatatgtgcggtgatttttttgatcgggcttatccaaaaggcagaaccgcttgaaatgttcatgatctccatcagccttgcggtggcggcgatacccgagggcctgcctgccgtggtgacgatcgtcttggcgctcggcgtgcggcgcatggcggcaaagcgagccatcattcggcatttgcctgccgtggagacgcttggcagctgcgaggtcatttgctccgacaaaaccggcacgctgacgcagaacaaaatgacggtagtgcgctgcgcgggtgcggcgggcgagctgaacggacaggatagagacgctttgttatctgcggcggcgctgtgcacgagcgtggagggcagcggcgagaagctgctcggtgacccgaccgaaacggcgattgtcgcggcggtatcggactgggagagtctgcaaaagcagcgcgtgaaagcggctgaggtgccgtttacggcagaacgccgccgtatgacagtcgtactgcgaacggagggcggatacaaggtcatcacaaagggcgcgccggaggcgattttaccgcgctgcacgtatgtgcttttaaacgggaggaacgttacgttaacacccgagatgcgggcggcactgagcgcaaaaaaccgcgacatggcaaacgacgcgctgcgtgttctggcggcagcggaaaagcgcacggaagcttgccccgagacggacgatgcggcggaaagcgggctgtgctttttggggcttatcgggctggaggatcccccgcgcccggaggcggcggaggcggtttccgagtgcaagcgtgcgggcattcgcccggtgatgatcaccggcgaccaacctgcgacggcctcagccattgccgggcggctcggcattgaaaataaagctgtgatgacgggtgcggagctggagagcctttcggacgacgcgcttttgcagacggtgcagacgtgttccgtgtacgcgcgggtctctccggcgcacaaaatgcgcattattaaggcgtttcgcaggctgaagctcgtcacggcgatgacgggcgacggtgtgaacgacgcgcctgccctgaaagcggcggacatcggctgcgcgatgggcaaaaacggcacggaggtcgcgaaaaacgccgccgacatggtattgacggacgacaactttgcgacgattgtttccgctgtgcgggaggggcggacggtgtacggcaacatccgcaagaccatccattttttgatgtcgtgcaacatcggcgagattttggtggtgcttgtgtcgtttttgctgcgcacgccgacgccgcttttgccggcgcaattattatgggtgaaccttgtgacggactctttgcctgcgctggcactgggcagtgacccgccgcagggcgacgtgatgcgccgcccgcctaccgcgcgggacagcagtgcgttttcaaacgggctcggttttgcgatggcggcggagggtatgatgatcggcgcactggcgcttttggcgttcacggtgggacgcgtgttttttgacgccgatcccatgcagcccgccgtggggcgcacgatggcgtttgcggtcctaagcctttcgcagctcgtgcacagctataatatgcgcagtacggggccggttttgggacgtggcatgttcaaaaaccggggtctgaacgtatcgtttttgatttgttcggcattgatggcgggcgtggtcgtgtttccgcaagcggcggcgctgtttggctccgtaccgctgaccttgacacagtggggcatcgtggcaatccttgctttgctgcctctgccgatctgcgaaatgcagaaaaggatactttctcgcacggcaaaagtgaaaaatatgacttccggtgtgaaaaagcgagtcattttcaacaaatagcctgttacttttttaatttttagccgtcatattgacttccttttcttttttcagctataataaggaaaaatagcccacactgatgtgcaggccatggggtctgcgaaaatgaaaggggtcgatatagatgagaaaaaccaagatcgtatgtacgctgggtccttctaccgatgacgaggctgtgctgcgcgagctgattttgagcggcatgaacgtggcgcgcctgaatatgtcgcacggcacgcatgaggagcacaagcgccgcgccgatatggtgaaaaagctgcgaaaagagcttgacgtgccggtcgccattctgctcgacacgaagggcccggagatccgcacggggaagtttgccgaaaaggtgatgctgacccacgggcagaagtacacgctgacgacgaacgagcgccccggcgacgcggaaggctgctctatcacgtttaaggacctgccgaaggacgtacaccgcggctcgcatatcctcatcgacgacggtctcattgaaatggtcgtggaaaaggtgacagacacagacattgagtgccgccttttgaatgacggccccatcacgtcttataagggcatcaatgtgccgggcgtgacgctttccatgccgtatatcagtgaaaaagaccgcgcagatcttgaattctgcgtgaaggaagattttgagtttatcgccgcctcgtttacgcgctcggcagaggatattgtgatgatccgcaacgagcttgaaaaaaacaactgccgcgacattcgcatcatcgcgaagattgagaacacggacggcgtggagaacatcgacgacatcatccgcgtttcggacggcattatggtggcgcgcggcgaccttggcgtcgagatcccgatggaggagatcccggtgctgcaaaagcagctcattcacaaggcgtatgtcgccggcaagcaggtcattacggcgacgcagatgctcgactccatgatcaagaatccgcgcccgacgcgtgcggaggcgaccgacgtggcgaacgcgatctacgacggcacgagcgccattatgctgagcggcgagacggccgcaggcgcgtacccggtggaggccgtgcgcacgatggtccgcattgcggagcgcaccgaaaacgacatcgactacgtgcgccagctggagcagtgggatgtgccggtgcaaaaggacgtgacctctgccatttcgcacgcaacgtgcacgacggcgcacgacctcggtgcggtggccatcatgaccgtatcgaaaacaggctttacggcgcgcatgatttcgaaattccgcccggcgtgcccaatcatcagcggcacgaccgaccgcaaggtactgaaccagatgggcctttcctggggcgtaatccccgtgatgctggaggaaaagaccagcaccgacgagctgtttgagcacattgttgcagttgcggaggagcacggacttgtgcaggcgggcgacattgccgttatcacggcgggtatcccgctgggcatttccggcacgacgaacatgctgaaggtacaccttgtgggcgacgtgctcgtctccggcaccgttgtgaacgtgctgagtacctgcggcccgctgtgcgtgtgcaaaacggaggaggaagcgctgcagaagttccgcaggggagatattctggtgctgccgaagaccacgaacgcaacgatgccgctgatccgtcaggcttcgggtattgtgacggaaatggacggtgtgaactctcacgcagccatcgccgccatggcgctggataaaccggccatcgtcggcgcggcgcacgcgaccgacctgctgcgctccggcacaaccgtgaagctggacggcgttagaggtgcgatcttcagcgtaagtgcaccgagcgcggaaaagtaaaacgaatagcaacgccgcactcacacgggaaagcgtgggtgcggcgctttaaataggcggtcttttgaccgcctatcaggaaacccatgcaactgggtttcctgcggagcgaacgtccactggaagttcgctcctaccttcctagttttaggttaggcaaatgggtttcgtgctctgcggagcgcgcctcaggactttgccccgagaccccaccaactttttgaaaaaagttggatcaaaaactttattcgtcgcttcgctgtgcgttatttcaccgcttttataatcgaacaatcgttaccgttttccaccgtgacggtgaagccgacttcttttaacagtgcagtttcgtgctcttttgtcagcgggatatcgaagtggacgaacgtgtcgtcgggaatgttttctttgcggcgcttgcggctccacgtttcgcgcagcaggttttcttcttcgtcacagcaggcgaagtaatcgccgtttacaaacatgccgccgggcgtgagacagtcatagatgcgtttgaagagccggcgctttttctccggcagaaagtggtgcagcgattcaaacgagatgacggcgtcgaacgcaccggggaacggcacggcaaagtagctgccgcacagcagcgtgaggtccttattcccatgctttttcatgaggacgtcgagcatatcgggcgaaaggtcaatgccggtgacggatatatccgtgcgcaaattgtagagcgcgtcgagctccagacccgtgccgcagccgaggtctaaaatgcgcttggcgctttctggcacagcgcgggcgaactgcttgtagtcttcgccccagaatttcgtcatacgcgcttcgtattccggcaggcgcttgcggaaaaacgcgcccatttcttcaagcggggcgctttcgatctcgcaaagccaattttttaagtcttccaaatatttttctttgttttgtgcgttgatgtccatgttttttctccaaattctttaaatgagaacactgcgctattttgcgcagaatttgcggatggcgccgcgcagcagctgccgcagctcattttcctccgcaataagtgagcccgcgtacagcgcttcggcgatgccgaatgtataaaaccgcacgtcgcgataaacggcttcggcttcctttacggtgagcccgtactgcaccgccgtgcagtcgatggcctcgcggttccacgggctcgagatgatctgcggcacggtgcggctgccgtattcattcgataaaaacaggacgccgaacagattgcgccgatcgcgggcgagcagaatgtgcgcaaggctgatcgtgaacaggtagtccgatttatcgaggtactgcgcgacgaaggattgatatgtgccgtctaaatattcgatgacggcgcggcggaatgtttccatgctgccgaagttgcggaaaacgggctgcacggagcaattgaatttagcggcgacactgcggacattgagtgcatctgcgcctttttccagtgtgatggcggcgcctgcctcaagcagcatttccgccgtgatgtgcggtgttcttgccatagtttcctcccgggtgtggttcagctgatgaggataaaatatcgaatgttatttcatttgtcaagcgcgaatttgaaataaaacggaattcttttgaaatggggatatattgcaaagttttgcggcgcatgatacaataaattgaagaaaatcaccgggagggtgttctatgaattttcgggaaacgttaaaatcgatcgggatcatccccgttattcagatcaacgatgcggaaaaagcagtgccgctggcgctggcgctgaaaaaaggcgggctgcccgcggcggaggtgacgttccgcacagacgcggcggaggaagccattcgccgtattaaggtagaggtgccggacgtgtgcgtgtgcgccggtacggttttggacgtaaagaccgcagagcgcgccgtgaaggcgggcgcttccgcgattatcagtccgggcacgaatccggaggtcgtgcgctggtgcattgcgcaccgtgtgccggtcatccccggctgcgcgacaccgacggaggtggaagcctgcatgcgcatgggactcgattttgtgaagctgttcccggcggaggttgtgggcggcgtgaaaatgctgaaggccctcggcggtccttacggcaatatgaaattcatgcccaccggcggtatcagcgcgcagaacgcggcgcagtaccttgcgctgccgaacgtgctgtgctgcggcggcagctggatggtgccgggggggctcctggacgccggagattttgacgccattgaggcgctggcacgcgaagcggcgcagattgtaaagaaatgattttgtaaaacgaaaaacaggacaaagcgcatctgaaaacgctttgtcctgtcttcttcatttatgggtgcggtgtgggcaaatccccagcgtgtcgcgcccgtataaactccccgttgtccttcatcccttttggatcggacactttcgtcactttctgacaaaaggtatcttatcacattcgcttccgtttgtaaagcccctttttaaacattttgcaaaaaagcagcagaaaagtttttatgagatttaggaaattttaaagggcgttgtctgtacatttcaaaaagaggctcaatgtttgaatttcaaagcctgacgcgtcagagagaagataccggtcatgtattcctcgtgaatgtccgcctgcatacggaaaacgggcatgtggttttccgggatgctctgtttgcagtaatcgatgatgtctttttcgcgcacgttcaaggtggcagagccggtgaggaagaggatgtccgggttcaaaagcgcaatggtgcacacggcggcggtctgcatcagcggcacgatattctcgccgtgaatcatgcgcgagacggtctcgacttttgtagcggtggagttgatgagcggcagactgatgagctcgcccgcatattttgtactgccgacgatgatgtgtccgtccaccacggtgcccgcaccggcgctgcggtggctcggccagtagagaacggaaagggagtacgggtggtcgcaggggttgcgcacgtaaaagccgtaggacgtgaagtgcatgtcgttttccgtgatgaccgtgatgccgagctgttcttcgagtacctttttcgggttgaagccgtttaacgccgggaacgcaagggattcaatggcgccttcgcggtcggtgacgccggaaatgccgatgccgactgcgcggatgagcggatctgcctgcaccatctgtgtgatgaacagcgtgaggtcctccggcagaatgtcgttgagcgggcagaatttttcctgcaagctgtttccttttaaatcgcacacgcgcagggcgatgccgctcctttccacgtcgttattagcggtatacaggcacaaaatgtgcgcgtagtttgggttgatggaaaagcggcgcgcgggacggccgccgttcgatgcggcaaaggcgagctccagcacctgtccgtcgtcgatcatctcgccgaggagcgccgtacaggccgcaaggcttaacctgcactgctcggcaagctctttttttgtggcgaaatccgtgtggtacagcgcgctgcgcagagcggcgaggttattctgttttaaagcggcagcgccgccgtgttctgtcataatcgatttccttcatttctgttgcgggccgagcccgcatattttcaatacgagcctatattagcatataaaatgcacgatggcaatggatttatgttccgataaaaaataagtttccgggaattcatggatttttcatagacaatgcgcgaaaactgtgttatactctaaattactaatgtaacggagtgattataacttggagcagaaagcttttgaactgatacaggaaaaattgcaggcagcgttaaatgagcaaggctttggcgaagctgtggcgctggagaccgacaacggccgcggcgtgatgtttacgacgggcgaagtggcctacggccttttctatgagacgaagcagcggcgctttgtgctgcgcagcgcgacgatgaagaccccgaaggagccgggcgactggcgtcagctttccatgtggctgttcgatgaaggtgaaaacaccatgcaggacgcggagagcatcgcgaacgactttcttgagctcgtgcagggctctaagcgccgcgagctcgtgcagactgcgaagaagcgccgcaagaaggacgaagagaacaacgcggatccgcagttctttctcaaccgcttggtgccggtgttcccggagctgcgcgacgaaatgaacgaggaacgcatcgtgtacggtcaggtgcgcacggcactgtttgctgctgagaaggttgcgccgaagtgcgagaatcttgcgaagaactataaggacagcgagcccatgaagcgcatgtgcaccattttctgcgacatgtacgccgcgggtgatatggacacccgtgcagtcattcagttcggcgttctgaataatattaaggacgaggcggccatccggaatatcatcgcgaactttacggacggctgcgacctgcagaaggtgtataagcactccagaaaactcatcggcaagaacatcaagcccgaaaaggaaaagaagaagggcaaaaaggtggaggcacgcctgagcaactgaaaaaccgcataaaatctcaaaatagctcttgacagcggcgtatatcctatgctattataggtatacctcaagttgggggctatttttttgcgcccaaattttgagggaggctgggagaacatcccaaattttttccgtaaaacgggaggtgccgtcatgagagtaaaggtcgttttagcttgcactgaatgcaaacagcgcaactacaacacaaagaagaacaagaagaatgatcccgacagacttgagatgaacaagtactgcagattctgcaagaagcacacgctccacagagagacgaagtaaagcgaggaacgaagttatggccgaaaaagcaaaaaaagaaaacggctttgttcgctttacgaagaaagcgggaaagtttttccgcgactgcaagggcgagatcaaaaagatcgtttggcctacgccgaagaacgttttcaaaaatgtgggtgtcgttcttgcgacgatcatcctgcttggtctcttcattttcctgctggataccgtcttcatgaatttgctgggtctcgtcatgcaagtggcgaaataagcagcgtgaatgatcgcgcgtttatttgagaagcggaggaatcgaaatgtcggacgaagcaaaatggtatgtggttcatacctattccgggtatgagaacaaggttgcgtcaaatctggagaagacggtggaaaaccactctttacagaatttgatttttgagattcgcgtacccaccgaaaaggtcacagaagttgccgcaaacggcaagaccaaggaagtggaacgcaagatttttccgggttacgtcattgtaaagatgatcctcacggatgaatcgtggtacgcggttcgcaatatccgcggctgcacgggcttcgtcggcccgtcttccaagccgattccgctcacggatgaagaagtggagcgactcggtgtggagacgaggaatgtcgaagtctcctacaatgtcggtgacagcgtccagattaccgacggcccgcttgagggctttatcggaacagtggaagagattgatgtggacaagaaccacattcgcgtcatggtttcgatgttcggacgtgaaaccccggttgacctggaacttgaccaggcagagccggtggaataacacacggtaaattgcggtaatccgctttttattgagggggatacgtccccctgtgggaggaacgcctgaattttcacggacgttccgccatcaaccacgaattttggaggtgcaaacaaatggctcagaaggttacgggctttattaagctccagatacctgccggtaaagctaccccggcaccaccggttggtccggctctcggtcagcacggtgttaacatcatggcatttacaaaggaatttaacgagcgcaccaagggcgacgctggtcttatcatcccggtcgtcatcacagtatacgcagaccgttcctttacctttgtaacaaagacgccgcctgcagcagttcttattaagaaggcttgcggcatcgaaacagcttcgggcacaccgaacaagacaaaggtcgcaaagattacccgcgagcaggtaaagaagatcgccgagcagaaaatgcctgatctcaacgctgcatccatcgagagtgctatgagcatgatcgccggtactgcacgcagcatgggcatcgaagtagtcgattgatttgattttacccgggtgggaggaaactctctgagaatccgatatctaccactttaggaggaacatgaatgaaacacggtaaaaagtatgtcgatggcgcaaagctcatcgagcgcagccgcctttatgatacgcaggaagcgcttgacctctgtgtcaagactggtacagcaaagttcgacgaaaccgttgaagtccacgtaaagctgggcgttgacggccgtcatgcagaccagcaggtccgcggtgctatcgtcctgccgcacggcacgggcaagaccgtccgcgtgctcgcaatctgcaagccggagaaggaagacgaggctcgtgcagccggtgctgaattcgtcggcggcaatgatatgatccagaagatccagtccgaaggctggatggactttgacgtcctcatcacgaccccggatatgatgggtatggttggccgtctcggtaagatccttggcccgcgcggcctcatgccgaacccgaaggccggcaccgttgctccggacattgcacgtgcaatcaccgaagcgaaggccggtaagatcgagtatcgtctcgacaagaccaacatcatccactgcccgatcggcaagatttcctttggcacagagaagctgacggaaaacttcaacacgctgctggaagccatcaacaaggcaaagccggctgctgctaagggccagtacatccgttcctgcgttgttgctgcaacgatgggcccgggcgtgaagatcaacccgaacaaggttggctaagattcgtctgaatcttaaatttaaggcttgacagagttcttctgccatgctataattacaaagctgtttacctaagacagcaggtgcaccggttttccgggctgaaaggttttaccgcctgccgagggagcggaaaagttactttgtactttttatgccttcctgcggtaagtgggaaggcatttttagttttcgcaccgaggaaaatcgttcattttggcgcttttccaaatcataactgaaaggcgaggtgaatattttgcccagtaaaagcgttttggaaacaaagcaggcaattgttgctcagctgaaggataaggtcgctaacagcgtatccggtgttgtcgtagactacaagggtatcactgcagaggccgacacaaagctccgtaaggaactgcgtgaagccggcgttgagtacactgtcgttaagaatactcttctcaagcgtgctatcgaaggcaccgagatcgagggtatgtccgaggttctcgaaggcacaaccgctctggctgtttcccacgaggatcagatcgctccggcaagaatcctgaacaagtttgcaaaggattccgacggtaagttcgtgattaagtccggctacatggacggtaaggtcatgtctccggcagagatcgctgcaatcgcagatctcccgagcaaggaaggtcttgttcagatgctgcttagcgttctcgtatccggcccgcgtggtcttgctattgcacttagtgaagttgcaaaggctcaggaaactgcataagtttgcaggataattttcaatttaaaattttaggaggatattacaatggctgatatcgcaaagtttgttgaagaaatcaagtccatgaccgttctcgagctcaacgagctggtcaaggctatcgaagaggagttcggcgtttccgctgctgctccggttatggtcgctggcgctggcgctgctgctccggctgctgaagagaagaccgagttcgacgttgttctgaagtctgctggcgcaaacaagatcaacgttatcaaggttgttaaggaagctaccggcctgggcctgaaggaagctaaggctatggttgacgaggctccgaagaccattaaggaaggcgtttccaaggacgacgctgaggctcttaagacgaagctcaccgaggctggcgctgaggtcgaactgaagtaagtttttacttcaccttataattgcctgattcaagatccgcaaatgcagttcgctgtgtttgcgggtcttttttcttttcgtttatatggttttctgaaatataatttggcatctttgttcacaaaatagtcattgcttttttgtttttatcggtctataatatgttcattccttaacagttcaaaaatgaacaattcacttttaaactgtttccagaaatggacatcgttaagaacgtttggcgatgttcagcagtaagcaacaggaggtgcgaggaatgaagcgagacgagcaagcgtgtacggccgtgccgtttcacgacggacttgcggagcacttaacgcagatcgcgcgcatcatcaatacggagctgcgcaaggtgctggcggatgaagacctttccgcggtggaatccggtgtgatcatgtgcctttccacaacaaaggtcgatacggccgggcgcattgcgcggcgcatgggtgtttcgcgctcgttgatgagtaaggcggtggaccaccttgtgcgcggcggatggattgaaacaaaacaggaccaaaacgaccgtcgcatggtacatttggttttgttgccgaaggccgagccggctgttaagcggtgcagagaactgaagcatgaatattatgaaaaaatgtgcgccggtgtcagcccggaagacatgcaggtcttccaccgcgtcatagagcaaatgcggcgaaaccttgaaaactttaccgagacgggcggatacccggagatgagaaaggagaaaaccgaatgaaattgctgaaaacgtacctaaagccgtttgcggcgctggtgctggcgtgcattctgctgcttttcgggcaggcgatgtgtgacttgacattaccgaacctgatgagcgacattgtgaacaccggcattcagcttggcggcgtggatgaggctgcacctgcggttttgaaccaacaggccgttgacttattggcgctgtttatgaacgacgcggaggcggggacgttcaaaaacgcctacacgcccgtggagcacggcagcgatgaagagacgaagcttgcgaaaacctacgagaatatcaaggacatggatgcggttgctttaagcgaagatgcagacgtgcaggcggtgggcgatgcctacggtaaagcggcgtatgcgttcatgacgtttctgaaggattacggcgcgcagaccggccaggcggtggacaccgaaagcggcgtgcaggacatggatatgcgtcagctttatgctgttatccccatgttacagcagatgccgaaagagacgttcagcgaagcgatcgagtctgccgaaaacgcacagtcgatgatcggctcgcaggtaggcgcaacgtttacaaagctgttctataaggaactcggcgtcgatttggacgcaaagcaggtgcactacattgtgataaagggccttgagatgctcggcatcgcgctgctcggcgtgctggcagcggtgcttgtcggcttcttcgcgtcgcgtatttcgtccggcgtggcaaagcagatgcgcagcgatgtgttccgcaaggtggaaagcttttccaacacggagttcgataaattttccaccgcatcgctcatcacgcgcacgacgaacgacgtgacgcaggtgcagatgcttatttccatgggtctgcgtttgatgtgctacgcgccgatcatgggcgtgggcggcattattttcgcgctgcaaaaaagcgtttcgctaagctgggtcatcgcgctcgcggtcatcgttttgctggggcttgtcatcgtacttttaaatgtcgcgatgccgaaattcaagagcttgcagcgtttgacggacagattaaacctcgtcagccgcgagaatctgagcggcatgcttgtggtacgcgcgtttacgaatgagaaattcgaggaggcgcgctttgataaggcgaatgaagacctcactcgcacaaaccgctttacccagcgcgtgatgagcattacaatgccgatcatgatgctcatcatgaatcttgtcacgctgctcatcatgtggatgggtgggcacgccattgcggaatccaccatgcaggtaggcgacatgatggcgtatatccagtacacaatgcagatcattatgtcatttctgatgattgcgatgatcttcattatggtgccgcgcgccatggtttccgcagaccgtgtgcaggaggtgctgacgacggagctttccattaaagagccggaaaacccggttacactcggtaatgaaagcggtgagctgcgttttgacgacgtttccttccgctacggcaacgccgaggaagataccttgagccacatttcgtttaccgccaagcccggccaaacgacggcgtttatcggcgcgacgggtgcgggaaaatcgacgctcatcaacctcatcccgcgtttttacgatgtcaccggcggcgcagtttacctgaacggcaaggatatccgcacgctttcgcaaaaggaactgcgcgataacatcggttacgtgccgcagaaggccatgctgttctccggcacaatcgattccaacatcaagtacggcaaggaagacgccgatgtgaacgaggtgctggcagcgctcgattgcgcacaggctacggaatttgtcagcgaattgccgaacggcgtggaaagctccatcgcgcagggcggcagcaacgtttccggcggccagaagcagcgccttgccattgcccgtgcgctcgtgaaaaaagcgccggtatatattttcgatgatagcttctccgcgctcgatttcaaaacggatgcaaagctgcgccgtgcgctgacgaaatacacggaaaacgctgtcgtactcatcgtcgcgcagcgcgtttccaccatcatgaacgccgagcagatcatagtgctggatgaaggcaaaatcgtcggcaagggcacgcacaaagagcttttgaaaacgtgcccggaataccgcgagattgcggaaagtcagctttcaaaggaggaattggcatgagcgaaccgaaaagaaacgcaccgcgtccgcacgggcccggcagaggcatgatgcccaccgaaaaagccaaggacttcaaaggcagctttaaaaagcttatttcgtatctttccccgtttaagtttaaaatactcatcgtcgtcattttcgcggcgctttccaccgtgttcacgatcgtcggcccgaagatcctcgcaaaagcgaccgatgagctgacggccggcttgatgcgcatcatcaccggcgctgcggagggcattgactttggctatatcgcgaaagttttactgttccttgtggggttatatgcgttgagcgcgctgttctcctacattcagggatttacgatgtccggcgtttcggcgaaggtctcatacaacatgcgccgtgccattatggagaagatcgaccgcctgcccgtctcgtattttcacaaaacgagtcagggcgacgtgctttcccgcatcacgaacgatgttgatacgctcagccagagtcttaaccagagtatcacgcagcttatcacgtctgtgtgctccatcatcggcgtgcttattatgatgctttccatcagctggcagttgacgcttgtcgcactgtgcatcgtcccgatttcgttgctgcttgtcggacgcattgtgaaatcctcgcagaaatatttcgtcggccagcaggaatacctcggcgcggtgaacggccacgtggaggaaatgtacggcgggcacgtggtcgtgaaggcgtttaacggcgaagcgcgctctatggagaaattcgagtgcgaaaacgaaaagctctataacgcgggctggaagtcggagttcctctccggcctgatgcagccgatcatgggctttgtgggcaatctcggctacgttgtggtgtgcattttgggcgcatctatggcggcaggcggcagcatgaccatcggcggcattcaggcgttcatccagtatctgcgcagtttcacgcagcccatcacccagatggcaagcatctcaagtcaggtacagcgcaccatggcggcggcagagcgcattttcaacttccttgatgagcctgagattgtcgaaaaaacaccgaaatacaccgtggaaaacagcaatatccgcggcgacatccgctttgaccacgtttgcttcggctacgaagacaccgacgagacggtcatccacgatttctccgccgatgtgaaagcgggccagaaaatcgctattgtcggcccgacgggtgcaggcaaaacgactatggtaaagcttcttatgcgcttccacgaccttaaatccggcaggatctgccttgacggcaaggacatcacggcgtttgcccgcggcgacctcagaaaagaattcggcatggttctgcaggacacatggctttacagcggcaccatcatggagaacatccgttacggccgcttggacgcgacggacgaggaggtcattcaggcggcaaaagcggcgcaggttgaccactttgtgcgcacactgccggacggctacaacacgatcctcaatgaagaagcgacgaatgtctcgcagggacagaagcagctgctcaccattgcccgtgcgattttgtctgacagccgcatcatgatccttgacgaagcgacaagctccgtcgatacgcgcaccgagctttccatccagactgcgatggataacctgatgcgcggccgcacaagcttcatcatcgcgcaccgcctctcgacgatccgcaatgctgacctcatcctctgcatgaaggacggcgacatcgtggagcagggcacgcacgacgagctgctcgcaaaaaacggcttctacgccaacctctacaacagccagttcgagcacgcagaggaaagcgcgtaaacgcctataaaacaaaacgaagctgtcttctctgacaaagagagggcagcttttttggtggttttgaagattgacaaacgcctaaaaggacggctacaataaccgcataaagggggcgtttgtatgtttttggatgaactgaaaaagaggggtgtgccgcgtttaaaatcgcgcgcggagatgctggatcttttgcagcgggaggaatacggctgcttgccgaaggcgccggaatcattcgtttgggaagcggagcccggcgttgcggataatttctgcgcgggcaaggcgatgctggaaaagctgacgtttcgcgttgtggtaaacggcaaggatttcgcgttcccggtgtatttggctgtgccgaccgcagaggggccgcacccgttttttgtccacatcaatttcagaagcgatgtgccggaccgctacatgccgacggaggagctcatcgacaacggctttgcggtgctttcgttcggctatgaggatgtgacgcgcgacgacggcgacttcacctccggccttgcgggtgttctgtatgaaaacggcaaacgcgcgccgcatgacgcgggtaaaatcgcactgtgggcgtgggcggcgatgcgctgcatggattacgccgagcacgacgagcggctggactgcgcaaagtccgttgtgtgcgggcattcgcgcctcggcaaaacggcactgcttactgctgcgctggatacccgcttcgcgtttggctactcgaacgattccggctgtgccggtgcggcgctgttccgcggcaaaaaaggcgagcagcttgacgatatttatagtcagtttccgttctggttcagcgaatcgttcgggcagtatgtcggcaaaacggacgcgctgccgtttgaccagcactacctgctcgcgagcattgcgccgcgctatgtatacgtggcgtctgcggcgggcgacgactgggcagaccctgcgtccgagcttttgagctgctatgcggcggcagcgggggacaaggaggcgtttccctatgaagaaacgtcggaagattacgattttaacctgcacgcgggccgcatcggctatcaccgccgccccggtctgcactatttcagccgcgaggactggaaccggtttattgcgttttttgaaagcaaaaagtaaattaaaagggcggcgtgttgccgtcctttgggagaccccctaattgggtctcccacgagggaatagtccactgggctgtttgatagcaatgcgaagcattggtttctcccagtcctgattttttggaaggcaaatagatttcgtcgtctgcggacgacaacttagggcgctgccctaagaacccgcgacctttttgaaaaaaggtcgatcaaaaactttttgcgtcgcttctctatgaagacgaaaaatgcatacaaaaacggcgagccccctgaacaggactcgccgttttcttatgctttactttaattcttgcggttaaaattgatgaggcagccggctttgacgatcttcttttcgtcttccgtcatcggggcgatgtaaagctcgatctcctttacttcatcgccgagcacatacgctttaatgctctgcatatcgccgtccatggcgtccaaaacgttcgggacgaggatataatcaccgatctcgaaggcgggctcattcttcatctggaacggcagcatgccccagttcatcacgttggagcggtagcgcttggtggcgtactcggagcagatattcgcaaggccgcccaagacgcgctggcagcttgccgcctgctcgcgcgcagagccgtcaccgggcttcacacagtaaatgacactgccgatttcgattgtcttttcatcaacgtcgggcaggatgtttttcactttcccgagtgcgtttttcagagcttcatcgctttgtgcttcacccgcaagtctcgctttttcgagtgcacggacatcttttgcacgctgcacgtaaccggggtcgcggcgggagagtgtgaactccgcaagccccagtgggttggagcggtacgaagacgtttcgccggacgggatcaattcgtcggtcgttgtgaccttatccatgatcttcgagcagacgcgcagcagaatgttctgcgcaagcgcctcctgctccggccaatccttgatgttcgggccgtagatgagcttatcctccggctctgccttgccgaagccgttgtaaatgcgggcgcggtaggaggaatcatcgtagttgtactccggcacctcatagtcgtccgcgtacttttcggcggaggtcaaaatgccgccgtttgccgccgttgccgcgatagaacgtgcgtccatgagtgcgacggcgctcagttggcctgcgcccggcttggagccttcgcggttcgggaagttgcgtgtggcgtggcggatgctcagcgcgttattcgccggtgtatcgcctgcgccgaagcacgggccgcagaaagcggtcttcacgatggcgcccgtcgccatgaggtcggaaatggcgccctttgcgagcaggtccataaacaccggctgtgaggacgggtagacgtccagtgtgaattcgccctgaccgcactgcgcaccctttaagatgtgcgctgccgccatgacgttcgtatatgtgccgcccgcgcagcccgcaatgatgccctgctgcacctgcaaaccctttggggtgatcttatccgtcagactgaattcgatatccttgccttccgtcaagcgtgcggcttccttttctacttcgcgcaggatgtcgccgagattcgcgttcaattcgtcaatctcaaacgcgttgctcgggtggaatggcagcgcgatcatcggctttacggtggaaaggtctacatagaccaaaccgtcgtagtatgtcacgtcggccggctttaactcgcggtaatcgtccgcgcggccgtgctttgcgaggtacgccttcgtgtcgtcgtctgtgcaccagacggaggtgagacatgtggtctcggtcgtcatgacgtccacgccgttgcggtaatcggtcgtcatgctcttgatgccggggccgacgaactccatgaccttgttttttacgtagccgtttttaaacaccgcgccgatgatggcaagcgcgatgtcctgcgggcccacgcccgggcgcggcttgccggtgagatacaccgccacaacgccgggatacgcgacatcgtatgtgttttcgagcagctgcttgacgagctcgccgccgccttcgccgatggccatggtgccgagcgcaccgtagcgcgtgtgggaatcggagccgagaatcattttgccgcagcccgccatggcctcgcgcatgtactggtgaatgaccgccatgtggggcggcacataaatgccgccgtatttgcgcgcggcggaaaggccgaacacgtggtcgtcctcgttgatggtgccgcccacggcgcacaagctgttgtggcagtttgtgagcacgtaggggatggggaacttctccatgccggaggcgcgcgccgtctgaatgatgccgacgaacgtgatgtcgtgcgaggcgagcgcatcaaattttaagcgcaggttctgcatgtcctctgcggtgttgtgcgcttttaaaatggaataggcaatggtaccctgttttgccgtgtctttttgataggtctcgggtgcagcggcttccggcacaatctctgtgccgttcacaaggtaaacgccgccgtcataaagctttaccatattcattcaccgaagcttccgaaggagcccggaagcgatcctttcttttagcattgcatggccgcgcagaaaatcctgcgcttagttgctttcagtatagcataataaaggcggatttgcaatttgcatttctgctttttcattttgttcaaaaacggttcagtcttccgcgatgacttttgctgcggcggaacccgaagcggtcttccaaatgcggatcatcgtcgggatgcggctttgcagttccgaaacgtgagaaatgataccgacgacgcgcccgctttggcggatgctctcgagcgcacgcatggcggtatcgagcgtgtcggtgtcgagcgagccgaagccctcgtcgatgaaaatggaatcaagccgcaccgcgcccgagtagctctgcacgacgtccgaaagcccgaacgcgagggaaagggatgccaaaaactgttcgccgcccgaaagtgtctctacggagcggcacgtgccgctcatgccgtccaaaacctcaatgtcaagcccgccgtaacccgcgccgcttttgccctgcttgtgctgcaaggcgtagcgcccgcggcttaaaacggagaaaaagcggtttgcgctctggatggtctcgtcgagcatcataccgagcacgtactgcaaaagcggcacgcgcaaggcgttactgcggccggtcacgtaccccgcaagctttgctgcgcggctgtactgtacgtcgagcgcggcggcttcctccgtgtattgctgcacggcggcggcgctttccgtaatggtgcgcaggtcggaaccaaagcgtccaagctgcacggaaagcgtctgcgtttcggtgctttttgcgtccagctccgctttgctttgcgggaggtccttttccggcgctgcgccgagggcatttttcgcttcctttgcggcgaacatctgctgtgcggcagcttttacggcctcgtttgcggcagaaagcgcgttttccgcagcgtggaacgcttcctcaagcgctgcggtctcctgctcgagcacacgaatgcgcttttgtgtttcggtcatctccaatgtgatttgcgccgcatcgcgtacggtgtccatggcgcttaattggcggcgcttttcttccaaagcggcgcggcaggcggcaagcgcggcgttgtggcggctttcgacctgcataagcgcttcacgttccgctttgagtgtctcaagtttcttgtgtgcggccggcgcctgcgctgcaagcttttgcgcttcgttgagcgccgtttgcgccgcaatgtaggctgcggtgagcacgtcttcgctttctgtgatgctttttgcggcatcatttgcggcgtttaattgtgcgaaagcgacctcgtgccgcgcttttgcggcggcggccgtctgctcggcgcggctttgctcctgccgcaggtcttcgagctttttgcgcagcgcatcaagttcttcttttgttgtctcacctgcgcacggcacggcgagcacggggtggtgcaccgcgccgcaaacggggcagggcgtgccgtccgtgagccctgtggcgagcgcggcggcgctgttttggttccacttggcttctgccgccgagagcagcttatcctgccccacgacggtcagacgcgcggtgcgcgccgcgtcttcggcagctccccacaattttttgcactgcgcttcggctttggcggcgtcgctgcacgttttcagcgcggcaagctgttcgcttaaaatggtctgcgtctgcaagagcgacgcgagccggtcttttgcggcatcggccttttcggtgaatgcttcgcctaccgcgatgcgccgcagcacctccgacagcttttggcggtcgtcctctgcctgcttctgtgcggcgcgttcgcgctcctcctcggcgcgcagttcttttaaaagctgctccttttgcaggctgcgttcctgctccgcacgcagctgttcgcttcgttttaaaagtgtgtctttttcggcggtcagctttgtgagtcccgcgcggttctgctcggcgcgcgtatactgcgctttggcggaagctgcccgcgtttcggcagttttcagctgcgcttcggcatcggtctcggctttttggcactgctcaaattgcagtgcgcgggtgtattgcttttgcgcgagcgtcagtgcttctttcgcggcggcgagcgctttttcggttcgtgcgcattctgatcgaagcgcttccgtttgaacggcgagcgcctcggcggtctccgcgccatgcttttcgagcagcgatttcagtttcgtctcgcacgtttcgcgctttgcgtacagctttttttgccgctccgtaaatttcatcgcgatgcgctcccatagctcgcaggagaaaagcgttttcaaaatggctgctttttcggtggaattcgcgcgcagaagctgcatgaatttgccctgcggcagcacgatgacctgcgaaaattgctcggcggtgagggaaagcaggttttccgcgtagcttgtcacattgcgcgccgcacccgaagcggcaagcgcccagccgtctgccgtgcggcgcttgcactcgttttcttcctcggtgataaaatcgtcgctgccgcgctttttgcggcggtacagcgcgcggcggaagcaatattcgtcttcgccgagcgcaaaatgatagacgacctcggtgcggtcgctgtccgcggcggcaagacagcgcatatcttgaaacgtgcgccgcccgcccgtcgatttataaaagagcgcgatgctcatggcgtcgagcagcgttgttttgccgccgcccgtctgtccggtgatgaggaacagccccgcttcgttcagcttttcaaaatcgatgacggtgtgctccagatacggcccaaacgccgaaagctccaaacggatcggtctcacgttgcatcgccctccaattcctttagaatttccgcaagcagcgcttcgtcctccggctgcgcttcctcaccgcagacctcctttaaaaagccgcggaaaagctccgcgcggctgcggctgtgcagatcggcttccgcctgcgtgcctgcgtgctgctttaaaaaccacgtgctgcgcacgccgagtacattcgggtaataggggcgcagtcggtcggccgggcggaaaaccggctcgtcgtcggtgagcagaatttccacatagtcttcattgggcgccgcctgcccgttttcgagcagcgccgcaaacgtaccctctatgcgctttacgtcgtgcagaggggttacggggatgcacgttgtttccaccgtgtcgccgagcgtgacgagcgtcatgctctttttctggtgcgcttcgtctacggaatatttgagcggtgagcccgcgtagcgcgccgtgtcgcctgccctttgcgccgcgtgcaggtgcccgagcgccgcatagtcaaacggggagaagacatccgtcggcacatcgcccgcgccgccgacgaaaaggcggctttcggaatcggaggtggaagcccctgccgcaaagcagtgcgcaaccaaaacgtgctttttcgcggggtcaaacgctttttccattttttctaccgccgcgcgcatgcaggcccctgcaccgcgcagcgtttcatcgcctaaaaaatcgcgcatctgagcgttttcaaagtacggcagcgggaaaatctgtatgttgccgatctcgaccggcgtaaacgcgtctttaagctccgtgatgatatggatgccgtgccgcgcaagcaggcttttgcccaccgcaatgcggtccgggctgtcgtgattgccggaaatgatgacggcggggatgttccgttcgcacagcgcatcgatgagctcgtcgaataaatgaatcgcgtcgaccgaggcaatctgccggtcgtacagatcgcccgcaatgagcagcgcatcgggcttatatgcatccagcgcaggcaaaagcgactgccgcacaaaatgccgctggtcgtccattaagctgcgaccgtacaaaagcctgccgaagtgcaggtctgcaatatgtaaaagctgcatagcgtctccttttaaatttttaatctgacttttttctgaatttgccggcgagcaccttttcaggggtgccaaaccgtgctataataataaaatagttaacagtattatatcatgtccgttggaggataaacagtgagaaaacataaatttttatcgatatgcgcaagcgttttgctgtcgctttccgttttgacgaccggcgttttggccgatacagccgaaagcaccgcgagcgatatttccacagcttccgatacctcgacttcggaaaccgacacaacgacaaacacggtcgtggccaaaagcagcgaaatgggctttccgtgcgataagctcgcagacccgaacagcgcttctatctatatggtgagcctcgacaccgataccgttgtctatacatataatccggacgagcgccgccccatggcttccatgacgaagatcatgacgtatatcgtcacggcggaaacggtcagcgacctgcaaaacacgcgcactacggtgccggaaagcgttgccgaggagcttgagggcacgggctcgtctttggcggaaattcaaacgggcgaaagctttaccatctatgagcttttgaacctgatgatggtgccatccggcaatgatgccgcgctgacgcttgcaaaatatgtggattctttgaatatcacggccgacgacccgcagtatgacgaagacggtgacggcaaaatgagctgtgtggagctgatgaacaagaaggctgcggagctcggctgcacgaacacgcattttgtgaacccgcacggcctgtatgatgaaaaccactacaccaccgcgcgcgagatggcgaccattacggagtatgcgctgacaatgccgtattttacggacgtcacctcgcagacgtattacacgcagccgccgacgaacatgacaagcgaggaacgcaccgtcaccacgacgaaccgcatgcttttgagctatgacgatgagtattacacctatgcaaccggcgtaaagaccggctccttgaatgaatccggctactgcatttccgccacggctacgtatgacggatacagttaccttgtcgtttgcatgggcagcccgtatatcgacagcgagggcaaccatatcgattatcacggcgaaatgtacgatgccgcgacgctgttccgctgggcatttttgaatatcgaaaacaaaacgctcgttacggacggcgagcttctcggcgaggtgagcctcaaatacgcgtggggcaaagaccgcctgcaggtgctggcgcagggcaatctcaccgcaacactgccgagcagtctggaaagcggcgccatcaccacaaagctcgatctgcccgaaagcgtgaaagcgcccatcaaaaagggcgattacgtcggtaccgccacattctattataacggcgcggagcttgccaccgttgcactcgtcgccgcggaaagcgtggagcgcagcgagatcgtgcaggttttgcagcaggggcaggaggtgctcacctccacgtggtttatcgttacggccaccattttgctggtcttggctgccgcgtatgctatccttgccatcctgatgaaccgtaaaaacaaaaaagtccgccgcgtaaagaaatacagagatttataagtacagaacaaaaccccgatccgtttcatgtgcggaatcggggttttaacgttcacggagcgaacaattcacttgccgtaaggcaaatttcaccataatctcctacgttctcacctgccggctcggtcggggctggacggtcgccaccggcgaccagcccccttcgggttatgagccgcgggcgcatagatggaaagtcgcaggcacaaacttgcccaaaacaagaagaaactcagttgttcaaaagaacaactgagtttctttggctcgtagcaccgaaaaagatatcacaggatttttaggaaaatccgcttgtgacaaccgtttccgttcataaggatgtattttcttatgagagattggtcgcaacctctgttatggaggctgcggccttttctctttctgcggtagatcacggccttgacgattctgcgatagcaagcatct

SEQ ID NO: 3614 - DNA, 3461 bp, Unknown
  16S sequences of unknown bacteria
catcttctgcgagatggaggacggctcccaggccaacgccatctgcgatcagatgcaggcgtttctcggcctgtagaagccgcggtttcccggggcgcgtggtatattttccgcgcccctgcgcaacctaatgccacagaagtcccgcacagcgcggacggctgctgaacgagatatccaagaacccgatagatcgataggaggaaacaccatgaaacgcattttagccctgggcctgtccgcactgctgtgcgcttcctgcctggccggctgctccaaagacaaggacgagagcaaacctggcgcgggcaaggtgaccctgaaggtggtcacccagttcggcggcgaggatcccgccacccctgtgttcgagcagcagatcaaggactgggagaaaaagaccggcaacaaaatcaccaacgattccaccaaggcggacaacgtctggaaggcgaaggtggttgccgacttcaacaccggcgccgagccggacgtgctgtttttcttcaatggcgcgacggcggcccccatcctcgacaaaatcgtggatgtggaaacaatccagcaggtagatcccgattacggtaaaaatatccgcgaatcggttatgaaatccgccaacaatgtcaccagcgggggcaaatctatgtctgtgcctatcaagggctatggagagggcctgttctgcaatgagaccctgttcaagcagcacaacgtgcccctgccaaccgactgggcctccctgctgaacgccatcaacgtcttcaagtccaaaaatatcattcccatttcagcctccctgggcgccgaggcccactattattttgatcacctgatcatggcggtgggcggcgcgaaagccatgaacgtcaacccgaagagcgacgccgaaatcccggaatcctgggtcaagggcttagggctgctgaaggtgctgtacgacgcgggcgcgttcccggcggataccgcctccatggccaataccgaagcgcccctgtatttccgcaagggggaagccgccatgtatctggacggctcctggttcagcgtggtggatcccgacggtaaaaccgagggagccaaggtgaccgcggacgacgtcaaggtgattccattcccctcctataccgagagtgaaaacgagcccggcaccatcctgtccggcttctcctccggctggtatatctccaagaaatgctggaacgacgaggccaagcggaaagcggccatcgactttgtgaaatacaactccagcgacgaagccatcgtgaaattcgtggaggccggcggcggcttcgcggcctccgacacggccaagatggacgaaagcaagatgaccgcccaacagaagcagttcctgcagctgctcaaggacgcgcccgccacccccatggtggcccaggacaacctggagcgtccggccttcgaggtgtatctggccaacgccactaagctggccaagggcgagaccacgcccgaggcggtgctcaaagagctggtcaaaaacaacaaataacccggcggcgccttcggcgggggcgggatgcgtcccgcccgccgccgggcccgtccggatggagggccgacggcttttccttacattttatgcctaggcaggatcgggggattcctttgaaatccaaaaccaaatcggtgcagcgcccggagacggtggcgatgatctataagcgcaaatggccggccgccgtctttctgctgccggcttttgtgttcatggtcattttcctgttttatccgtttatccgcaacatcatcgattcctttttcaacgtctcccagctgggcgcgcctcacggggcgttcatcggggcggaaaactatctgaaaatcatccccgggctggaaaccacggatcccaacatggtcatcgcggtgaaaaacaccctgctgctcatggcgtgcaccatcgtgtttcaggtcgggatcgccctggtgctggccctgatggtggatacgattcagaagggctcccaggtgttccgcaccctcttctttttccccatcgtggtgtccgccaccgccctgggcctgctgttcaacctgatgctcatgacccgcggccccatcaaccagcttatcgagtccttaggggggacgcggatcattttcaaggagcagtacaccttcttaaccatggccatcccagtggtatggcagtacgtgggcttctacttcgtcatcctggtcaccgggctgaacaacatctccgaggacgtcaaggaggcggcggaaatcgacggggccaccggattcaaacggatccggtatatcaccctgcccctgctgcgcaacgtgctggtgacctgcctgaccctgtccatcaccggcgcgctcaaagtgttcgatctgccctgggtcatgttcccgcccaacttcgcggacgcctatctgaccggcacctatatgtattaccagacctttcagaccagcaacgtggactatgccgccgccatcgccgtgttcatcgtggtgctgggcgtggtgctgtctcagctgagcaagctcgtgttccgcgagaaggattattagaaaggggcgccgtcatgaaaatcggacgcaagcgcatctatccctcccacgtcctcatctatatcctgctgagtctgtgggcgctgaccacggtgttccctttcctttgggtactgataagctcctttaaaaacaaggacatcatccagaccgacgccttctctctgcgcttcgcccccaccctggacaactacgtcaagaccttcaccaagccgccccagtcggtatggatggcctatttcaacagcattctcatctccggcgtggtgacggtcctggtggtgctgctggcgggcatggccgctttcgccatggtgcgctaccgcttccggggccgtcggttcctcgattccctgatcatcgcgagcctgatgtttccggtcttttccaccatcatcccggtgtttcagatgctgtccgctatcaacgtgaccgacagccccgtgggcgttatcctgccccagatagcgggcaacctgtccttcgccatggtcatcctcatggggtatatccgcggcctgcccgtggatttggaggaatccgcctttctggagggctgcaacgtcttccaggtgttttacaaggtgattctgccggtctgccggccggccttcgccacggtggccattttctccttcctctggtcgtacaacgatctgttcactcagctttttttcctgcgcagtccggagaaatggaccatcacccgcttcctcaacgaggtcagcagccagttcggcaccgactacggcatgatgtgcgcggtggtgacgttgattttcgtgccggtgatgatcgtctatgtcttcctgcagaagaacatcatcaagggcctgaccgccggcgccatcaagggggtgaattgtcaaactaagagcaacaggaagtgagttcaagaacccataattcct

SEQ ID NO: 3615 - DNA, 20270 bp, Unknown
  16S sequences of unknown bacteria
ggtttgcgaactgtttaaaataatcatcgtgttcaatcaattccattatttcagaatacaggcacaaaaacagtccgtcgcaaaattgcggcaggctgtttttttgtggaaataaaaaaatatatatcccgcataaaagtgataaaagcaacaatatattttcaaaaaaaatttaaaaagagtcttgacacgggagaaattccgtgttatactttaattagttatgcgggtaactaattttcagttactcaataagttacataaatgtaaccagtcgcggggagaaaaatatggacgagcgaatgcaggaagaaagactgcccataaaaattctgcgggcggaaggctcgattgaaaacgcaggaatattattgacgcccgcagagcctcagatcgggctggacgaaacgcatctcatgtgtgtgaacgggcgcgggtatatcattctcgattttaaagaggaattgaacggctcggtgcgcattctcacccaagttgccgacggcggaggctgccgcgtccgtatcaggacaggcgaatcagtttccgagtgctgtgcggaagagggcgatcgtatggcgggaaactatcataccctgcgcgacgccgaggttcttctcgtcatgtattcggatatgcggtttttcgaaacgggtttccgctttgtccgcattgattttctggaagagaaaacagtttatatcaaatcggtgatggcgacaagtttcagccgtaaattgcagccgaaaggcagttttcgatgcagcgacgagcgtgtcaacgaaatattccgcgtggcgtcgcgtacgctcatgctgaatatgcacgattatctctgggacggcatcaagcgcgaccgtttggtctgggtaggcgatatgcatcccgaaacgactgcgatcgcctgtctgttcggcgacgatccttccatcgggcgttcgctgacgtatagccgcgagcatacgcctttgcccaactggatgaatcgcacgccgacctatacggcatggtggctgatcattttgcacgattattatatgcaaaacggacgtctttcctttttaagggagcagagagcgtacgtagacggtgctttacgtcagttgaacggcgtcgtgcgcgaagacggcacgatcgcccgcgacggaagttatttgttcgactggcccagccacggttcggatgacgaaacggcgggcatctacgcgctctgggttttggcggcgaaaaagagccgaagtctttttaaaacgctggggctggacgttcgcgtgtgcgatgatatgctcggaaaactttcccgatatcgagggctgtcggtgcggataatgaaacaatgcgaggcgtttctcgtttatgcgggcgtcaagggcgccgagaatgcctgttcctttttgactcgcggcggagcgaaaggattcagcacctttatgagttattacatattgcattcgatcgccgcggcggggcgcgccgatacggcggtggaattgatgaaacagtactacggcggaatgctcgatatgggggccacttccttttgggaggatttcgacctcgattggatggaaaacagttgtcccgtcgatcgtctaccccgcgagggcgagagggatattcacggggatttcggaaaacattgctacgtcgggtttcggcatagtttgtgccacggctggtcgtgcggcccgatcgcttttttgatgaagtcgctttccggactggaaatatcggaggcgggctgccgcaagatccgcctgcatccgcaatcgggcggtttggattggtatgagatttcttatccgacgccgttcgggaatttggaaatcaattggaagaacggaacaaagaatattcgtgttcccgacgggatcgaactgaccgattgacccttgacgggggcaaaacagccgcggctgtttttttgattttttctaatgaaaaaatcaaatctattatccgataaatcaaattaaggaggagatcatctgtatgcgaaaaaaactgtttgtcgttttcgccgctctgttgtgctttgtgtctttgatgggcgcaacctttgtttcggcagcggaaacaagcagtacggcgctgtttctcgaatcggtgcgcatggataaggaggaggacggctatgtctttacctatcggtttgacaagtccgtcgcctcggaggaaaaggatatcactttgacttccgcatcgaaatttacggtaaatcagaagggactgaacgaggtcgaaggggcgaaagttgcttacgccgaacaggagggcgtatacgtcgtgcaggcgagagtgcccgctgcgtcgggatgcgtgaaagaggacggcaccgaccgcgtcaacgtgcttgcgggctttgagtgcgatacggggtaccgcacgaccgtccggtatatttatcagtttgcaaaaacgggcgagggagagcgcatttatcgcagcgacaatatcgatgattacgccgaggtttcggttacgtcggtgtccgtgcccgaggtacagggctcgaactttgttttttatatctacctttccgaagtgatcacgccccgcaaatacatcgatctgcaggtgcgttctttgcgagaaatgctcgtctatcacggtgaaaagggagataaacagtattcggattcggaattgacgctcctctacgattatcagatattttcgcgcgactgggcggacagcatcagttataaattccatttcggctgcgattcgtataacggattgcaggcgtttcccggcaacaacggcggctatccgtacgatatgacgccgcaggagaaaatcaacggaacggatctctacaacgtgtatcagattcaggaacaagtcgcagatacttctctcgtttatctcgataagaacggtcaggaacagagcaacggcggatcgttacagcccctcgcgatacagatccatatggataataaccgtatacaggtcgttctgaaaggcgattccctgcgcgacgaccttgcaacgaagatcgtcgacgccgcgggacaggatacgggcatgacctcttttaacgaaaatattgcgccgaacaggcgcgagaatatggcgctctgtttgaaaagcgggcttttgtttcccaacggaaaaattttaaaggaagatttttccttttattacgatcccgtcggcaagcaatggcgcgcaacgggtacggacgcgggcgaaacggtcgttgacgaaacgctctccaaccaggaaggctatacagacgaagaactggctgccaaaaacaacggcaacgggggcacggacgaaagcgggggctgcaaatccattgtgaacgtcggaaatcccgctgctgcggcaacgtccgttacgctttttgctgctgctgcaattgcgctgttcgggcgcagaaacgccaaaaatcggtaaaggagggcgtaaagatgaaaaaattgttgtgcaagtttgcctgcgtggcgctgtcggtttgcctcgtttgcggcgtggcgtacggttgctctcccgatacgacggggggcaacgtcaatccgcccgacccgggcatcgatctgaacaacggttacacctatacaaagcagaatgacgacggactgatgcagttttacagttcggacgaatcgctcgactcttttctgaacgagtatatgagaagacatctccgctatgacgacgatgcgatcggcgatctgaaactgggagagggcaatacggtatggaaagagtgggaggccatgtctgtcatgtggatgaacacggcgggcatcgggtacagccccaagaccagcatcggtaactggttttccaatatctatcaggacagtttcggctatatctgggtagacgcgggcaccacgaccaccgattgggggcagagttggcagttccccaatatggggcattcgggcaactccgtttccggcgaatattacaatacttcttatttcaacggcctgaacgatttcaagggatataacggcagcagcgaacttacttcgatctggaaaggcagatcgaatacgggcgtgaacggctcgacggtggcggcggcgacaggctactccgattatatgaccgtttcgggcaaagatatgaaatccatcacgttcacttacgacgcgccgcaggacggcaaaatcatgtgggacggcgcagaactgaatatcaagccgtatatgggcacgcctttctgttctcccttcctcgaattggatttcagcattaccgattacgattcgctcggttccacgcagcaggtcgaggacgtcatcgtttcgtggaagggcggcagcggtacgaaaaacagcgaatgggacgacgaccactgcgtccgttacagcgaattttcgaccaactataaggaaacgttctccgcggcgacgcacatcgtgttccccatgtacgcgcacgaaaattggggcaaatccgaatcgctcgacgacgcgatcaccgatatgaagatcgagatcgtattcaaggacgggatcaacgccgaagtgcggctggaagaggtcacgctttcgttcgacggcaggcaggtcaacaacaacagcgtatttattgccgccgcggcgtactattatcagtacacgcaggacgacgaatggctggaaaagaatatcgataagatccgtaaggcgatgcagttccttctgacctattgcaagggggcggagcaggagttgatcacagtggaggaattcgtcgggcacgacggctcttccaactatgattatttcgcgtggaaagatgaagacggaaaggtcggctccgcaaccaatacgggcgtggggcacggcatcggcgacggatattgggattgcccgagttaccccgtcgtgagtctttactgcaacctgtattatttcaaggccctcaaaggcatggaatatctggaaaaaatggttgcggcgagcggcattgaagagagcggaaacgccgtcgaagtaaagagtgcggacatgaaaaagaccgtaaaatacacggaaacagcggtaacgctcggacaaaagatccaagcgtttattcccgagtttcaggaatacttctggaacgaggaaacggggcgcttccatctcggttaccttcccgaaacggataagggcgtgcaggcgggcgttctggataccgtcgtcgattacggctttaccacgtacaatcaggaggcgatcgaattggggcttgccaccgaggaacaggctgcgtccatactttcgtggatcaacggcgatcgcatcgtggaaggggatacggcagataattcctcccgcaccaagcagatctattactttacgtttgcgccccgctggacgacaaaagaaaacgtatatcagtattggttccgtttcgacggaaagaggagcggttcttacggctggaacaaacaggtgcagaacggcggtaccgcggcgcattgcgcgtattacgacatggttgcggaacagatcgtcaacggcggagatgcggcttttgcgaagttgaaaaacgtgcagggctggtacgaaacggtcaaagaggcgggcggcacgggcaaaaatttctaccgttcgtattatctgaaaaacgggatcattttgcagggcggcgaaagttcgggcgtcttggggctcgactatgaatttatagaggcaacgctcctgtatacaacggttcccgccgcgttcttcgggctttcctcctcggattacaactgtctgaacattacgcccgatcttccttcctcgctcgattattggaagatggaaaatctgagttatgccgatatgtattacgatttgtctatcggaaaaaattgggtgcagatcaacagtatacagggcgataccgagggcaagaccgtccgcgtgaccctcgatgcgccgtccggcgcgttcgaagtgcgtcagcacaacaaaattctgaccgccggcaccgattatacggtagaaaacggcaaggtcgtgatcgtggcgcctttccgtaacggcaggatccagatcgtaaataaataaattccgcgcgcgcctccttcggacggcgcgcggataaggagatatgtttatgaaaaaaattgtcacgctcgtcatgattatgcttctggcggtcacattcgtcttttcagccgccgcgtgcagtatcgatacgggaacaggcggtcccgataaacccgacgtaaaacccgaggaaaatcccgacgcggaagtccatctgaccgtaggcacgctgggtaaatccgccgagcagagcgttatgcaggagtggatcaacgctttccagaaaaagaatcccgaagtttccattaaaatcaccaaaaacatgagcggaatggctgagatcatcaactggacttccgcaggcgagttgcccgatatcgtatggacggcgggcgaccagcattctccctattcgggaacgggatattttcaggatctgtcggatgagagcaagtttccgggaaacgaagaatttttctccgatttttacgacgctttgatcgattccacgcattattcctcgtccgacgaggggatctggttcgttccgcgcgactataaccgactcgtaatatacatcaacgaaacggcgttcgagcaggcaggcgtagcggtgccctccaacgactggacttgggaaacctttctcaaaacctgcgacgatctgatgaaagcaggcgtgaaaaaagcgatcgaatggaaaaaatggcggcctgtctatgcgaccatgctggcaaattacggcggcgaatacctcgacgaggagggcaattttgcgctcgacagcgacgaggcgaaggcttgctacgaattttacgaggaattttacgatacgcgcacgggctatgccatatcgggagagggcgcgtctttcaaggcgtacagcggcgaactttccagcgctgtgcccatgatcgtggacgtccgcccgcaacttcccgactatgtgcagacggcttacagccgccaatggtcgttgacggcgcgcgccttccccaacttcgtacagaaagacggttccgcgggcaaggtcggtacgggttgcagcggctacggcatcactaaggcgtgcacggacgaaacaaagagggaatgggcgtggaagttcctgaaatggtgtatgtccgaagagggctacgatacggtggcatatctgggaaatatcgttccagccatcaccacgatgcgcgagagcggcgcctggacggaatacacctacggcggcattaccgtggattatgaggcattcatcgcggataataccgaagatatctttctcaactattacaatgcgctgcccaattccaagcacgatacctttgtccgcatgacggacgacttctggaacaaggtaggcgtcaattcctttgcaacggcagtttccgaatttaaaaagcaattcgaatcgtacatgaatcagtagggagacgctatgaaatcattgacggagcgcgacaaacgcaagatcgtgcagaacgtggtcggttatctttatatcgcccccgttctgctgggcattctgttctttacattcacgcccgtattttatgcgtttatcaccagtttttttgaaacggagttaaagcccttttcgcttaccgactggggcacgttcgttggctttaaaaactactatcagaattttaccaactattattaccgctcacagtttttcacctcgctcggcgttacttttctctatgcggtcacgtacataccgctgtcgctgatcctgtcctttcttttagcgctccttttaaaccaaaaactgtcgggcatgcgtttttttcgggtgctgtattatctgcccgtactcattcccgcggtgtgcagcggtatgttgtggaaccgcatcaccgatcccgattggggcatcatcaactccatgctgcaaaatgtgggattgggaggctggcagtggttcgaagcaaaagaaacgagcatggcgtcctttatcttcatcaacctgttcacgctgggcggaagtatgatcctgtggctcgcgcaactcaaaaacgtgcccgtttccctctacgaaagcgcaaggctcgacggcgcgggaaaactgcgccggttggtttccatcacgattcccatttgttcgccgatgatcctgtacaacgttatcatgagcattatcggcgtcatgcagacgtatgcgcaggtgatcacgcttacaggttcatcgggcgcgggaaagagtttgtttttctacgtgatgaatatttacgacaatcgcgtgcagaacttcggctatgcgtgcgcattgagttttatcttgtttgctctcatcggcggattgaccgccgtcgtcatgaaaacgagcaaatgggtctactacacggaggagggctgagcgaatgcgatcgatttccgaaaacgctttccccgctgcggaaggggaggcgcgcgaaacgagtcggcgaagcaaaatgaaaaagaaaattttcataacaatttcctatctcgttctcgcgatactttcgctgtttttcctttttccctttatcgtgatggtatgcctgagcgtacttcccgacagcgagatcaatctgcaggtgctcatatccccgtcgggaacgctgaatctgggcacgtatatccgtatcctgacgcccggctccgactatatgcgctatctgatgaatacgctgcaagtcgccctcatcacgacggtcggcataccgctcgtttcgtcgttatgcgcttacgggtttgcaaagttggacttcaagggtaaaaacgcgatgttcggcatcgtgctttccacgatgatgatccccgcggtcatcagtatcgtgcccctttataccatctatgccaaactggggtggatcaacacgctgtatcccatgtgggtgccttcgctgttcggcggcggcgccaccaatatctttttgatgcggcagtttatgcgcgggatccccaacgacatgatgaaagccgcgcagttggacggcgcgaattcttttgtgatctacgtgcggctcatgctgccgttatgtcttccgatcctgctgtacgtggccgtcatgtcctttatgaatgcatggaacgatttcatgacgccgttcacctatctcgaccacggctcaaaaagcgttacgctcgccctcggcgtctactacgattacgggcctgcgagcaccgaacttgcgaacgtggcgatggcgtcgggtgtgatcatgacgctgccctgcgcggtgctgttcttctgtttccagcgctatctcattgacggcgtcgccgtaacgggcatgaaagactgaggagggatagtatgaaaaaatggaacaaagttctgagcgcgtttctctgctgtacgctcgccgtcgcagcgatggcggggtgtcagcccaaggataattatacctattacgaatacgacgcgcagcatcagtcctcggacaaaatgcttcggttttacagttcggacgcgggactggacgcttttttgaacgattaccgcgagcgccatatgcgcgacacggaagaccgtatccacacgcaccccgtcggcgcagggagcaccgcctggaaggagtgggaatcgatgatcggcagttggtgggatgcctcctccgccaacggcacgatgagcagtttttacgccaccaaagagtgggtgacagattggctcttgtctccgcgccaggatcggcagggctatatatgggcggacgagggcaacgatatatcttcctggggcatgggctgggcgtttcccgattatcagaacggcggcatcggctggctgttcgatacggacgacgagagcgagggatggtacctcggcaatgcgtcgaacgcgtccctgacggtggaaaattcaaatctgatcgtcgataccgcgggcgcgacggaacaaatcgaactctattcgccgctgtttgaacgcagtacgctcgtggcgccctttctgcgcatgaatttcggttttacgggcacgggcagttacgatatagacgatctgttcgtgtattatacgacggataagagcgcgcagtggtcggaagataaaaaagtttctttttccgaactgtgcacgaccggcttcgagatcggcgcgggaaacgtgtcgcagcagggtttctttttccccatgtatctgcaagagcaatggggcgccgagtcgcggacgcgcgttacgcaactcaagatcgtgcttgcggcggaagaggggacttctttcgagggacgactgaattttgattatatctgcacggatttcgacgacaggcagccgctcaatctatgcaactatatcatagcggcaaaaaacgtatgcgaattcgcgcaggacgatgacctgttggcgcggcttctgccaaatgcgcggcgcgcgatgaattttcttctgtcccagttgaagggtgcgggcggactcatcgataccgaatatttcgtggggcacggcaacgacggattgaagggcataggcacgggattgggcaacggctactgggacgttcttgctttcccgcaggtgaatctttactgcaatatttctttttacaacgcgctcaacgccatgtcgtatctggaaaacatggcgcagtattacgaaatcgaaagcgatcccgtaacgacgcttggcgcggatatgaagagcgttgtgacctatgcggaaacgggtagcagtctgaacgaacttgcgcagaattgccgcgaaaagatgcagaaagttttctggaacgaaaaaacggggcgctaccacgccggcaaacgcgacttctacgataccgtgcaggaccacggatatctgatgttcaacgagcaggtcatcgcctccggcattgcgacgaaggaacagacggattcgatcctttcctggatcaacggcgaacgcaaggtggcgggcgatgcgagcacgggcgaggatatctattattacgagttcgcgccgcggttcaataccgcggagatcggagcggatttttattggctgtacagcgctaccttcgacgggaacgtgcagaacggcggcactgcgctgcatctggcgtactacgatctggtcgcgcaggctgcgggcgataaaaacgtttcgtttgcacggctcaaaacgatacaggcgtggtatgaaaaggtgaaagcggcgggcggcacgggctgggatttctatcacaaatattacgataactataccgatatcggtattcagggcggcccttctggcgggacgatcggcgtggattacgaatttttagaggcggcgcttttgttcgcggccgtacccgacgcgtacttcggcatggatacttcgtacgacgatacgctcgtgtttcagccttcgctgcccgatgcgatggatttctggaaaatggaaaaccttacgttcagcggttactattacgacgtgtccgtcggacagtttttcgttcagatcagcggggtgaacgagtatcggaaaggacagggcagccgaaacgccaaactggagatccgtatgcccaagcccgcatttcaattcaaagtctatctcaataacgcggaaacggcaaattaccgtttggaagacgatcagatcgtgatcgaaacgaaattcggcaacgtaaaagccgaaatcaaaaagatctgaaaccggggtaattttcgcggaagcattatgaggagaggataaataaaaaaaggagcaaggaaaatgaaaaagcactttaaactgttggccagccttatgctggcgctgtgtctctcgttcgccatggtcgcctgcggggaaacgacgacgcctccgcccgacggcggcgatgaaaaacctcccacggtcgtggaagtggacaaaacgtattacgacgttaccgtcgtcaacggtaccatcaaggacacgacctataatcacgacaaagtggaaaaggacgcgtccgttacggtcgtggcgggcgaacccgtcggaaacgaggaattcacccattgggaaatcggcggcgaaagcgtggggacgaacgaagaatatacgttcgacgtcaccgcgaacgtgaccgtgacagccgtatacggtaccaatttcagcgtatgggacggagaatatcccgaagacgcgcctgaaacgtataccgaggacgaagacgcgcgggtcgtacatatcggttccgccgaggctctcgcatattgggcggatatgatcaccaaccaacaggacggaacggacaaaacgcagtacaagtattcgacgttcgattggggcgtctacacccgcgaattcaatagtaacggcggcgatgtggaagcggccgtaaaagcggcgcgcaaacccgataacaaatggacggtttcactcgattgcaatatcgatctggcaggatttgaatggacgccgatctttgatttcagttatgcgcagcatcaacttacgttcgacggcaataaccacgtcatcaaaaatttgtatgctcccgcttacaacagcggcgaattcgtgaatatttccatgaaagccagcggtttttacgggcacgtggcgggttcggatataacgtttaaaaatatcaccttcgattccgccgttgcggaagtgcagggaatggatgcaggccgccagaatctggcgatcgtactcggatatacggtcaacaacaaccattatcagtattttaaaaacgcgcaggaaaccgtgtttgataacgtaaatatcatcaacagcaaaattatcggttccggtgactgcaagaaagcgggatttttgctcgggcgtgtcggctgtgcgacggaaacgttgaattacgacaacaagcagcacgtgaccatcaaaaactgcacgatttccgataatcttttggtcgcaagcagcatcctcggcggcatgatcgggcatatctattcgagcgatgcggatatcatggaccgcgatctgcacgtgctcgacgtctacgacaacacgttgaacaatattacggtcatttcttctctgaacggcagcgattccaacgaatcctataagttcggtacgctcggcacgtgggatcaactcacgtggaccggcggtatgggcgtcggcgcgtcgtttgtgcagcatcccgtggatttcgaacacggcgatccctccgtcaactttatcgatctgcacgtcggtacgggcaaggcggaaagcggcgtattgcagtatgctcccgtgaacaccaacaccgccatgatgaagacgacgctcgaagcggtcgacgacgaaggcaatccggtcgtaaaggatattttcgtggcttccgacatggaattcgatcccgacagcatgggctatcccgattggtcgggcaacgatgaacaggtcatctatatcgtaggcggctgtacgctgacggggttggacaccgagggctcggaagtccgctacatcagcggcgcgcgcaatgcggacggcgatctgatcgtaacggatgcggaaggcaacgtgatcggcgcttgggtcgttacggactatgcgggcgcgttcgtggcggctgaataatctgcttgtaaattaagatcgtagaggcaaagcgcgttgcacaagaaattgctcagcgcgcttttgttcaattaaggaggaatatgaaggcgattgcaaaaaggaaactcgttttgatcggtttcagcgtggttctggcgttttgcgccgtgtttttgctggtatctcacgcgccttacgcggcgcgcgccgacgtatcggtttccgatttcatttctacgtttaccgtcagcaagggtacgaaagaagtgcgcgaaggagaactccgctattcgatcgggggcgaacggtcgtacgcggaggtcttgacggacggttattctctcggatcgcaatggtatgtaaaatatctcaccacgcgcaacgtcgtgatggtgcacctgaaaaacgattcgcccgccgaaagcatgaaagtttactttaagaccaaaaccaaagactggtcggaggaaaactctctttccgtcccgctgtatacggacggcgaataccatacctattttatcgaactgacgaaaaatcagaatgcgggcggcgaactgcgcgggcttcgctttgcgccgcaggccgccaagggcacgattttcgtcaaccatatctctttcgagcgcgaggatacgagttatccctatgcgggcgaggtgctttcgtgcacgaccgacggttatcaagtcaccgtcgaagggcgcctgaacgacgaatacagcggaaagaccgtgactctttatcgcactttgatcgacaacatggatgaggaaatcgaaaatgcggaaaaactgggcacggcagtcgcgtccggcaaccgctttactttttcgttcccgtatcacgacggagaagtcacgatgctcagttcgcattttatcgccgcggtggattccgtaaaagtagatagaatgttttctatcgaaaattggcgggatatgaccgagaatccgtatgcgttcgaactgcccgaacgcacggtcaaggcgagcgaatatggcgcgaagggagacgcctataccgacgataccgcggctatacagagcgccatagacgccgtgagcggacaaggcggcggaacggtcgttctcgagggcgatcccgacagcgagtacggtacgcgctacgtcgtgacgagcatatggatgaaggataacgtggagttgcgcatcgaagagggcgcggttttgtggcagtcctggcgcgaagaagattatacgtacaaaacctataagggacacgatatggagggcatcgtttgggggcataacggtctggcgatgaattatccgctcgtgtacagcaatcaggcaaacaatatcaagatcacgggcggcggaacgctgcggcttttagactggggcaatcaatcccgtctgaacggctataagcccgcttattcggaatattgcaaatcgctcattcaccttgtcccgctggggctatacaacagcacgaacgtagaggtgagcgatataaaaattctgcgtaccaactgttatcacgtcgtagtatacggctgtaccaacgtatatctcggaaatctgacgctgaccgaggacaactgtctcagcggcgacgggatcagcatcggcgtcggatcgaaaaacgtggtgatggaccgctgttttctgtatacggacgacgacgccgtcgttttgctcgcgcagagcatcaacgatccccgcggcgtcacctggtggcacgccaaacccgacggcggcgacaatcggatccgcaacgtcacgctgcgccatagcgcgatcacgcccggcaacatcatcgtgctgatcacatggggcgtggacgcttccgattatacgtggcaggcgatgaacgggttttacgtttatgacaacatactcggcaactggggcgagagttccacctgtatgaatctttgtcccggtcaaggttatccctacggcgacggcggcaaatccgtgcccgtaaataatttcgtagtcatgaacaattcctaccgcgggccgatttccaatctcaacgcgatggtaaaaacaaactgggtcgtggactgcgacgatgtagaggtcgccaccgacttcgtggacacgtcgttttcttacaaactcggatattgggaatacggcggagaatatcagcagaacgtgaccgtcggcggcaataccgctacgctcgatttcgacaaggcgttaatggaacaatacggcgcggcgagcctgtatcagggattgtatctcaaggcgggcacgcacaccttttcggcagatataactttgcatgacgcgtccgcgcgccttttcgtgaaagaagcgctgacgggagaaattgtcgccgtaaaggaggtttcctcgtcggggaacgccgccgtcgaatttgaagtgccgcgcgagggcgtctatctgctcggcgcagacggcggacgatccgcgtccggcaaggcggatgtttcttcctttgccattgtatcggaggggacggacagacccgcttggttcgaacaggattttgaagacggcgccgcgtacttcgatacattcgggtggcagaatggggaggaaggcggcaattcttatctcacttttgccgaagataccgccgcggcgtccctgcacgtaacgggcgactacaagcagttcgatttgaaattcgatttcaaagttctgaaaaacgatacggcccgcgcaacagacggcaacgtgttcgtgcgtttcggcgagcgcgacgacgcgtattatattctgcgctattgccacaaagcgtcacgaattcaactggaaagttggcatggcggcgtgtttgaaatcgcggcgagcgcggaatacaggatggaggacggcgtatgggtacaattcggtttatcggtcggcgatgcgggcgtgacggtctatgcggacggcaaggccctttgggatgcgcagccccttcccgacggattgggacgaagcaaaataaccgtgggctttacctattttacgcccgcgctcgataacgtaacgctgggagaagcgggcacgctcactttcgcgcgttccgagcattggacagaaaagcccgtcgatccgcccgtcgatccgcccgaagagccgaaaaagtcgggatgcggcggcactctgtctggcggtgcgctcgtactttcggtgtctgtgcttgcggcggcgctcgtctgtacgttgcaaaaaaaacgcggagggcgcaggggatgaagcgctggaaaagtatttctatgcttttgatctgcgttctgtttctcgcgctggggacggcgtgcggcggcacgtccgcggagcctttgccccctcccgaggataagccgcagccgacgggcgtttcaacgttgacatttgcggaaaacgagtgttccgattatatcaactggtacgggcgcaacgagcgcaacgctacctttcgcgcgatgatctgctacaactcggcggcgggtttcgaagttaccttttggggcacccaacttacgatgtcgtatatcagcgaaatcaacgtaaaaaactttctcgatggcagttgctatctctgcgtgcagatcgacggttccgaggattacgaggcgggctttaccgaattgcctttcgcctcgaaccaaaaagagatcacgctcgtgtcggggcttgccgagggaaaacatacgatcgaggtgcgccgcgcgaccgaagatatgtgcgcgtcgtgggagatatattccctgaaaactgacggctttttccttgcaccttccgagaaacctgtgcgcaagatcgaaatttacggagattccatcagcgcggggcgcggcaatatgcgcgcggtcggggaaaaggaaaacgacaacagcaaccaggaaaacgcgcttatgacctacggtgcggtagccgcccgcagtctgaacgcgcagtacaatatttttgccgtgagcggttcgtgcgtaggcagttatacaaccaacgcgggggcgaacattatccccaggttatacacgaaatacgcacccaccgcaaacgcccgcaataaatgggattttgcagcctacgtgcccgacgttgtaatcatagatctgggcaccaacgatatcatcggaaattccgataagcaagaaggttttgcggaaaagttgaaaagcgaatacacggcgttcgtacaagatttaaagacaaaatatcccgatgcggcaatcgtgctttgcagcggaacgtttcattattcgcgcatcgatattcaggcgtatgacgcgctgttcgaagagatcgcaaagagtttcgaacaagaggagcgcgtctgtcatttggcgctggaaaagagcaataacgcgcatccgaccgcatcggaaaacaaaaattacggcgccgccctgacagaatttatccgttccgtgaccggctgggagtagacaaagatgaaaaaaatcatcgcgctttgtttatgcctggtgctttcagccgcgctgtgcggctgtcggggaaagccgtcggaagatcctcccgaaaccgagccgacgccgcagactctcgcctttgcggaaggtcggcgggaagataaaataaattggttcgggcgctgtttctgggacggggaaacgcggaacgtatgcttttcgaattcctccgcgggattcgaggtgcgctttgtcggcacttcgctgacagcgataatcgccgctaccgaatcaaaatacccgcaggaagcggcggggacggcatatttatatgtttttatcgacgggacaaaagattacaaaaaggcgcggcgcatggcgctggacggttcgggcgagcccgtcgaatacgttttggcgcagaatttgccgcagggcgaacactccgtgcgcgtactcaaatgcaccgaagtcaaatacggcagcgcctggctgtattcgctgcgttccgacggggaatttctcgcgccgccgccgcgggcggaacggcgcgtcgaattgatcggggattccattttaagcggaagcgaaagtatgcgcgagagcaccacgacggacagtaaattgaccgaaagcgaaaactcgctcgcctcatacggcgcgttcgccgccgatcttttggatgcggaggtcagcgccgtgacgcgttcgggcgcgctggttagcggatatcgcggctatgcgtcgatacaggatttttacgatctgtacagtgcggactgcgacgccttgtgggatttttcgctttctcagcccgacgtcatcattctcgatctgggcaccaacgattttctcgtcggcgcgccgactgatctaatctcggaaaaatatgcggagtttttggcgtacgtgcgccgaaaaaatcccgacagcgcgatcttttgctgtgcgggcgcaatggtcaccgccgtcaatcgcacggtttctgcggctgtcgagcaacgaaacgccgcaggcgataaaaacgtatggtattacgcgttgcccgtgatcgcttcgggcgggcatccgcgggaagaacagcatttaagcaacggttatcagttgggcgcgtttattttgcagtcgatgggctggacgggcgagttgtaaggcaggcacggcgggcaaaaaaagttcgtcggggaggttattatgtcgcaaaagttaaaaacgacgtcgcaaagagcgagaagggaggacgtggcgagtgttgcgggcgtatcttcggcggcggtatcgtacgtgctcaataaaacgaagcggctgtcgcccgaggtggaacagcgcgttttggatgcggcgcggctgctcaattaccgacccgaccgcatcgcgcaatctcttgcgggcagccgaacgcatacgctcgcctatatgacggcggatatagcgaacacgtatcagttggaggtcatcaaggggatgcagacggaggcgttgaagaacgattatatcgtctacattttcgacgcggcgggggacgtgaaaaaatacgtcagccacttgattacccgtcgcgttgacggaattttcgtatccgccgcgcccgattttctgtcggatgaactgttatgcgaacttcgcgatgcgaatatcaaggtgctcgcagacttttcgcgcagtacctttttgccggacgtttcgtatatcatgtccgatatgtacgacggttttatgcaggcggttggatttttaaaggagttgggtcataccgaaatcggttatctcagcgcattcgacgaatcgtgctattacgatctgcgtctgcctgcctttaagatcgcgatgcgtaaattgttcggcgcgggcgtgccgcccattgaattcggcggctggccttactccacgtccgaaactttgggaatacggctgatgacaaaaatgctttcggaacatcccgaagtgacggcgatcgtcgctaccaacgatctgatggcgctcggcgcgatcaaggccgcgatcgcttgcgggcggcgtgttcccgaagatatctccgtgatcggtatagacaacattgattcgagtgcggtcagcaagccttcgctgaccacgctcgaccaaagcggaaatcgttacggtgcaaaaattttcgaaattttgcataacgatatcgtggcgggcacgtcgggaaagtacatcgttcccatgcggctgatcaagcgcgaatccacgggcacggctccgcaaaacgtcgaaaacaggatactgttgcaagaatgatacggcgggaccgatacgccgaaaagcacccgaaacagggtgcttttttttcaagtcgcttctgtacgtaaaatataaaaaaggaaaattttggcaaattataaaaaattttacaaaaaggtattgacaatccgaaattctatgatataataaagatgaaattgatatattgatttatatatcaattcgcccaatatctatatcaattacaacaaattacaaaaaggggcccctttttgtttgggctgtacagcccaaacaaaaa

SEQ ID NO: 3616 - DNA, 3431 bp, Unknown
  16S sequences of unknown bacteria
ttgcgggtcaataagtcatgctttttcatgcaagcatgaaacgcatgaccttttgaccctttgtatcatatactatttttagtataggattctcccggtattgactgtataattgtaatatacaaacaaaggattctgctttttacaaaaaaagacagaatatttatagccaagaaagagaggatgagcctatgactatgaagagaagaaatcagacaatctgtgcagtgctgttatcgacactgctcatcggaattcctgttcaggcagagattccggaggatgccctttccgattatatgggggactggtatgtaaactatatggtagaagaaggcacacagcttaatatggcaggacttctcggctacacgatgttgcttacactgaatgatgacggtaccgcccatatggaaatgatgatgctggaggagtcggcagaggaagaggaaaacgaggcgatggaaggcagctggacgtatgcagacggtcggatcgtactgaagatggatgatgaatcggtaatggaactggatgcagaagagggcgatctggtcggaaaggcagccgaggaagaatattcatacctgtttggccgggagctggtgaaggaggatgtcgaccttgacgcattgatggcaggctccgaggatgaggaaaaccagaagcttgctgatacggaaaaggcaaatccgttcagctataatgcggagacaaacaatcttgtggatgtccttagtgcctatatgtatgcgaattactacagcgaggattttgtagtgactgtggatgaggcaaataagacctttacagcagaccgcgaggaaagtgactatctggctgcagcgcattatgatggcacctatgagatcacagaggatggatttgtgaatgcgacctggaaggagccggactatgattatgatatgagctgtgtcggaagtgaatatgcagcccagtgggataaatttacattaaaagaagacctgagcaacctggatgatgttctttacagtgtgatgaatgagtattcctgggatcatgactatccgagagaaagcctgacccggacagaaacgtcggagctggagggcactgcagtgctcaaggacggcgatgcggaaagatctgccgtgtataaaatctacgcaggcgtggatccgcttgtaaaggttacgattcatgagaacgattcggatgtgaattacacaaactactatttccgtgagtaagcctgtagcttgggcaaattccctgcacagaatgtcggaatggaggatatcaggataaagaggatacgactatgacagatattattgtatataaatgtcctgcctgcggcggaagaatggaatttgacagtaaaacgcagcatatgaagtgcccgttttgtgatacggagcttagcgtggaggaatatgaagcacagcagccggaagcggatctgagtcagaatccgaatgaagaaaacgggcaatggatggcggcaaatgacggaagctggcaggaaggtgaggcaggctcgcttagggtctatgcctgcgccacctgcggcggtgaaatagtaggagatcttacagaaggggcagcaagctgccccttctgtggtaatccggttgtcatgagaggacagttttcaggagaactgaagccggattatatcattccgtttcggcatgacaaaaaggcagcgaagcaggcatactataagcatctggaaaagaaatattttatgccgcgcgtgtttaaaaatgaaaatcatatcgacgagatccgtggaatttatgttccgttctggctgtttgatgcaaatgtggaagcctcggtgcagtacgcaatgacagaaacagacagctgggaatcaggcggttatatttacacaaagagcacagagcatgctatttatcgggaaggcgaggtggcgttcgcggggattccatgtgactgttcaaagaaaatggatgacacgctgatggaggcgattgagccttaccatttccgggatgcagtgccgtttcgggctgcgtacctggccgggtatgtagcggatcgttatgatgttgatatgcaggactgcatcgcacgggcgaccaagcgtgcgcaggcaagcaccgagaaggaaatgaagtacgggctgcaaagcaaggggacaattacggtaaagtccaaccgcattcaggtaaaaagtgcaacctatcattatgcgctgtatccagtctggattttaaatacgacctggagaggaaaaaagtatacgtttgcaatgaatggtcagacgggaagaatggtcggagatcttccattttccagaaaggagttctggaagtatgtgattccccgtggaatgatagcaggagccgggatttacgcagtgcttgagtgctttatggtattgtctgcttatcaatggacttcattccatctggggctgatgatccttgcggtactggcgctggtcggattgatccggcttctgtcaaaatagagagcgggacgagcgaagaaggaagcggggaggaaccatgaaaaaaacggtgttaaaaaaaatatatcgcattcgagttgggtgtcttctgatgctgttggttttgtgcagtcttgcaattccttttccatccaaagctgcgcagataccggatgaacggcttggaccgcggctggcagaccgggaagagctgctgacgacggaggagcaggaggaattgctggctcggctggatgagatcagcgagcgtcagcaatgtgatgtggtgattgttaccgtagcgagtatagaaggaaagacggcaacggaatatgcggatgattattttgattatcagggctatggctatggtgaaaaatcagatggaattctgctcctggtcggaatgaaggaacgcgtatgggcaatcagtacgcacggaagtcttggaatctcggcttttaccgatgcaggactggactacataaaagaggatgtccagtttcagttgaagctggacaattatgcaaaggcatttcgaacctttgcgagtctttgtgatcagtttctgaccgcagcacataagggaaagccctatgatgtgggaaatctgccgatcaagcatgcatcaccgtcaatcctgatttttttgtttccgatcgggattctgatcatggcctggaaaagccgttctaaaaagaggagtctgaaatccgttgtgaaaaagacgggcgcgatatcctataaggtaccgaacagcctgcatctgtgggtggatgaggaccgtattacaggcagtcatgtgacaaaaagaaaacgccatgaggagagccgtgaccgcggcggaagtggtggaagcagcggcggaagcacgacgcataccagttcctccggccggacacatggcggtacgagcggaactttttaaccgaatcaagcaagtcccctgcttcaattgcgcaaagca

SEQ ID NO: 3617 - DNA, 1914 bp, Unknown
  16S sequences of unknown bacteria
ttcacgggacgcgcccgcatcagacgaggaagcaggcgagggggacgatgggggagaggcgctttgctgcgatggtggagttgccggctgtccgggggctgcgctctcatccgcaggaccagtggccgggacctcgtcagaagcgcccgacggcgcttcttgctcttccggcagcagcgccgagatgaccccgaacgcgggctcgtcgtccgctgcggcttcgcccgaagtggtgttgcggtgtgcgggcgcggctgccgcgcgctcctcgagacgcgcgtccccgatagaggcggaaagactcgcgatgccaatcagacacacgagaacggatgccgcgagcacaaggccgcggtgcttttggcttgtttgaatgcggcgcctgttccccccagaaccgacgactgccaaacgagctccttgttatctggtgaccataagaacgatgatgacgacgatgaggatgatgaagccgagcgcttcgaggcggaccatccaggcgccgcggttttccttcttgatagcgcgggcgatatcgttttcgtccatctcgggatgggtgagtttgaggaactccgcataggtcatgtcctcggggatgatgaccttgccgtctttgtcacgcgggagcttgttgtggtcgaactcgcgtacgcgttcgacgcgctgcttgtccgcatgctcctcggcctgtttttgctcttcagtcatagtgctcctcgtaaatcgtaggttagagggcagtgtagcgtacccgcgagacgggaatgcgcgggactgggcgaacggcggcatatttcagcagtatttaaggaacggaaggtatctgtgtcggggtatgctaacgtgcgtatgtacgagaaccgacctggagggtgtatgacctcactgaaacgcgtcttgatcgtcgcctgcgccgttgcgctcgctgtctgcggatgctttgcgcttgcaggctgcggcaagcaggccgcggcaacctgggcgcatggcgatgtgtccgaagaggacgtgacgaagaccatcgagaacatgcgggcaaactacggtctgaccgacgacgcgacttgggcgtcgttcatcgccatgaaggcgtacgactctaccgcgaactccgatgggcagacgacgacggacggcacggtcgccgacctgcgcacctacgtcatcaaccagatgctcaagaccgacgtcatcgactacgaggtcaaagagcagaacatcaccgtctccgacgacgagctcgacgcctacgtcgaccagcagcgaaaggcagtcgagagccagtacatggcgggcgtcttcgagagctacctgcaaaagcagggctacaagagtctcgacgagtacaaggagcaggcgcgcaaggcactcgcggagcaaaagcttgccgagcaaaacggcgcgagcgaagacgacgagagcgcctggaattcgtatgtggacggcctgatgcagaacgccaacatccacatcaacgacatgccgagcggcctttcctacgacgtcgacctgtcatctgcaaccgcgacgctgtccggcggcagttccgacgcgacggcttcgagcgagggagacgccacccagggcacgagcggcaccgactcatccggcaactagcacaaatcgacacaaaaggggagaccagatgtacacgaaaaagaccgtcagggacattgacgtcgcgcacaagcgcgtcttgctgcgcgtcgacttcaactgcccgctctacaacggcatcgtcatggacgacacgcgcatccgcgaggcgctgccgaccatccagtacctgatcgaccataacgcacgcatcatcatcgcgtcgcatctgggccgcccgagcgggcacggcaagttcgagagcgagttctcgatgatgcccgtcgcgatgcgcctcatccagctgctccgcaa

SEQ ID NO: 3618 - DNA, 6202 bp, Unknown
  16S sequences of unknown bacteria
aatggctgaaagccatgaagcgcgtagccaagcccaagcgcagcgcagggcttggtcgcagtgcatagcgacgtgggccgcctctggagtcgccgtgccgcgtgctttctttggtactttctttcgcgccgaaagaaagtactacccccttcggggcggcagccccaccaccagcgccggagtcggcgcgtcaatcccctcggagtggtatgcgcctaaagggctttccgctcgccttttggaaaccttcggacaccaaatctggccagaaaccaacgaaaactgcatttcttgcgctctcggcaaaatggccgcgcatcgccatagactgggaggtccttcggagaaaaccatcgtctcgtcccgccctgtcgtgcgctctacctgttggtgagccataactggcggcaaaatagacccataatgtcctctttcttcgtgacagtccaacggtgtagccgtcaaagcatccccactgctggaaggaatgcccctgcactcatttccgaacgttttgtcctatctgtctctgctttgtactcatttcgcttcttgacacgatcgatattcggtattacaatgttaaaggttcgaagaaatccgtacattttgcaagactgaaaggagaaacgttcatgaaaaaggtcctgtctcttgtctgcgttcttctgctctgcgccgctttgatccccgccgccgtggctgaagaagccgcctataccgagacggtggtgtccatccccaacggcgaccatgatattcccgcgactgtctgcgttcccaacggcgaaggcaagttccctgctgtggtgatgctccacggcaccggctccaaccgcgacgaagcgggcaacggctataaaatggctgctcctgtgctggctgaaaagtatggcatcgcgaccgttcggatcgacttcatgggcagcggtgattctaccgccgactacaccggttacaccttcgaaagcgctgtgagcgacgccgccgcggctgccgcctatatgcagacgctggaaaacatcgacgctgataagatcggcgtgatgggctggagtcagggcggcaccgacgcgctgctggccgctgcccgtcatcccgagctgttcaagtctctggtgacttgggccggcgcacccgacctgagcgatatgctgaccgacgaactgtatgaagaagcgaagaaaaacggcttcttcgtcatgaccttcgactggcgcgattccctgaacgtgtccctccagtggtgcgacgacgtgaccaacaccgacgtgctggctgagttcgccgccggttacaccggccccgtgctggccatccatggcaaggacgacaccaccgtggatcccgagtggagcaataagatcgtagccgccagcaccaacgaggcctccaagacctacttcatcgacggcatggatcacaccttcaacgtgttctccgaggaggacttccactccctgtacaatgcggtggacgctaccggcgagttctttaaggccacgctggctgactgaagctgaccccctgccagagcgtttgctttggaaaatcggaagaactgctgcaaagctctcgttttgcagcagtttttttgtgcacgtttgcgctctattcgttttttcagcagccgtattatgcgcaaagacggctcgtcacccgatagaccggctggcgccgtccatgaaaccgttgacgagccgcagcacctccgcgctattgcccgtcagggtgattcttggggtgcccgccgcgccgtcaaaggaaaaacggaggttgtgataaggaccgttgttgatgcggtaacaaaagaattctgccatttcttttctgtttcttctgggacagtccagaacgacgcagatctcgtcatcgtttttctggtcgtccagcagaaagtcatatacggcggcgtgatgtttggccagaatactgggacgcaccgccgggtgacggacaaagccctccacctgttccggggtgaaatgccagagcccgtcgattttttctccctgaaggatcccggaggaaatatatttgcgaatcgtgcggtccgtcagcccggtgagcagaacaagatggcttatcagatagtatttgccgcttccttccataggctagctcctttcaacgcgtgttcctgcaggtgctctcattataaaacgggcggagcggggaatcaatttgaaatccccccggtttttcatagccgtggcacttcgtcccgagagtatttctcaccgggaaccttccttcatctcttgcaaggaaagcgctttcgtcccagaataaattttttccagtattttttattaggaattgacaaaaatcaaaaaatgagtataatcaacttatgaaaacgtttgcgcatcgttggaattgcggaacggcgcgcggacgaatcaaaaaggagtggaaccagttatgaaaaagatcctggctatgttggttgccgctacgatgatccttggcatggtgaacatcttcgccgtggccgagaccaccgctaccggctctgtttactatctgaacttcaagcccgagcaggctgaacagtgggaagctctggccaaggtgtacaccgagcagaccggtgtgcccgtgaccgttgtgaccgccgcctccggcacctatgaagataccctgcgctccgagatcgaaaagcccgaagcgcctaccctgtttcaggtgaacggccctgtgggtctgaagacctggagcgactactgcctggacctgagcgataccgaggtctacaaggagctcaagagcgacgacttcgccctgaagcaggacggtcaggtgctgggtctggcctacgtcatcgagacctacggcctgatctacaacaaggacctgctggccaagtactgcgcgctggataacgccgttatcaaggacgcttccgagatcaacaacttcgcgaccctgaaggccgtcgctgacgacattcaggcccggaaggacgaactgggcgtgctgggtgccttcacctccgccggcatggattccagctctgactggcgcttcaagacccatctggccaacctgcccatctactatgaatataaggccgacggcatcggcttcaccgaggccatcaagggcacctatctggacaactacaagcagatctgggatctgtacatcaacgacgctacctgcgagcctgccatgatcggcggcaagaccggcgaagacgctgtggccgagttcaccctgggcgaggccgtgttctatcagaacggcacttgggcttacaacgactgcatcaacggcggcatgaccgacgagcagctggatatgctgcccatctacatcggcgctgagggcgaggaaaatcagggcctgtgcaccggctccgaaaacttctggtgcgtgaacaagaaggctcctcaggagaacatcgacgccacgctggccttcctgaagtgggtcgtgaccagcgatgaaggccgcgacgctctggccaaccagatgggcttcgtgactcccttcaaggcattcgacgacggctacaccgcccacaacgctctgctggacgccgccgcccgttacatcgccgagggcaagacctctgtgagctggaacttccccaccatgccttccgagacctggaagaacaacgtgggcgccgctctgctggagtacgctcagggcaccggcacctgggacaacgtgaagaccgcgttcgtcgatggctgggcttctgaatacgccgcgctggcgaagtgatcccgtctgaaagcggcccggatgattccgggccgcctaccccgcttgagggtgtccttaagcggggctttttcatcgaagggatgaatggcaggattttccggcccaatgtcgaaaaagaaccaatgaaatgccccggaatggggaaaactctctgccgtatggcaggcgaactatcgcaagacccgcacaggggggacgaagtaatgacgaataccatcaagcgctactggcccgtatttgttctgccgacgatgctggcctttgcgatcggcttcctgatcccgttcgtctcgggactgtatctttcattctgcgattttaccacggtttccaacgccacgtttgtgggcttttccaattatgtgaaggcctttaccgacaccagcagcgattttctgcacgccctgtggttcacagcggcgtttgcaggcatttccaccgtgctgatcaacctgttcggtctggccatcgcccttttgctggtgcgcggcttcaagggcaccaacattttccgcacggtattttttctgcccaacatgatcggcggcatcgtcctcggctggctgtggcaggtcatcctgaacggcgtgttggccaactacggccgcacactggtatataacgaatggtacggcttctggggcctgatgatcgtcatgctgtggcaacaggcgggctacatgatgatcatctacatctccggcctgacctccatccccggcgagctgatcgaagcggcggagatggacggggccaacggctggcaggtgctgacccgggtcaagctgcccatgatcatgccctccatcaccatctgcaccttcctgacgctgaccaacggcttcaagctctttgatcagaacctggcattgaccaacggtatgccgtcctcccggtcggagctgctggcgctgaacatctacaacaccttctacggtcgcaccggctgggccggagccggtcaggcaaaggcagtggtattctgcatcatcgttgtcgctatcgcgctgatccagctgcgggcgacccggagcaaggaggtgcagcagtaatggcaaagaaaggcttgcaaaagaaaacgcggatcgccaacaagattctgacggtggtgttctcgctggtgtcgcttctatatctgtacccgctggtgatgatggtgctgaacagcttcaagaagaaggccttcatcagccgcgcaccctttgccctgcccacggacaaaatgttcgccgggctggccaactacgagctgggcattgcccgcaccaatttttggggctccatggtatggagcgtggtcatcactgtgctgtcggtgttcctgattttgctgtgcacgtccatgtgcgcgtggttcatcagccgcgtcgtcaacggctggacgaagctggtctatctgctgtgcatcttctccatggtggtgcccttccagatggtcatgttcaccctgagcaagctggccaacacggtgcagttgaacacgccgtggacgatccccatcgtgtatctgggctttggcgcaggcctggcggtattcatgtttacggggtacatgcgctcctgtcccattgccattgaggaatcggccatgatcgacggatgcacaccgctgggcatcttcttcaagatcgtgctgcccattctgcagccgacctacatttccaccggcattctggaagccatgtggatctggaacgactatctgctgccctatctggtactggacatcaagaagtacaagaccatccccattgccgtgcagtacctgaaaggcggctacggctcggtggatatgggcgcgatgatggccatgctgacgctggcgatcctgcccatcgtgattttctatctggcgtgtcagaagcacattgtgtccggcgtgatggcgggtgcagtgaagggttgattttttgaaatatcattgtcacccggcgggaaagcgagttttcctgccgggtggtttttggttggcgatggcttgacgggccggctgcggcgcggattggaatttttccccctatgggtttctcggcagcttcggtatccgaaggtttccaaagggggaaagaaaagccctttggtgcgcccgcaggcgcctatcttttgtctcgatggaaggaagattaacgtgccgggacggcccgaaggggtgcgggtgcgagcggaaagccccttgcaagcagcggtgtaagccaactttgccgaaaaaaacgtctgggggcttgatgcgccgcatcagcgcgaatggggacttgccgtcttatgggcttctcgccgacttttgatacccgagtgttccaaaggggggagagaaaagccctttggtgcgcccgcaggcgcaatccccctttctccaatgagggaatgacgcgccgactccggcgcggacggtggggctgccgccccgaagggggcagtactttctttcgaagcgaaagaaagtaccaaagaaagcacgcggcac

SEQ ID NO: 3619 - DNA, 13864 bp, Unknown
  16S sequences of unknown bacteria
gtgccgctggctttcttttgcacacttttctttcgccaccgaaagaaaagtgtgaacgccccatagggctgtaagccctgctcccgcgccggagtcggcgcgtcaagccccagcaagggtatgcgcctgcgggcgcaccaaaggactttccgctcgccctttggaaaccttcgggcaccgaagctggcgagaaacccaggaaactgcaaccattgctcctgcaaaaaattttcgtttttggaagcgaacaaaatgaccttcctcggggcaaaccatcagcgcagcccgcactgccgtgcacaccgcttgttgtttgcctgaactccgagccgttaaccgcctacggcggttgtatacaccgaacacgcactttcctcccctgtccccagaaaattccccttttgcttttttcaaaaatccgtgctaaaataatcccgctgtgtggctgaaaggcgtaagtccaagtgaacggacttgcgccttttgatttgcccaaagcgcaggtcttgtttggggacctacgcttttttcatttcaccggcaaatcagagaaagaggaatcaaacatggaaaaatcccatttggaaaccacccccattcccaaattgatgcggaaatacactctcccctgcgtgatctcgctgctggtggcggcgctgtataatatcgtcgaccagatcttcatcgccaatgccagctacctcggctccaacggcaacgccgccaatacggtggtgtttcctctgacggtgattgcgctggccgtggccgtgatgatcggcgacggctgctgcaccttcgtcagcctttgtctgggccgcaagcagccgaaggacgccagcggaagcatcggcagcgccgtgctgtgctgtgtgagcgccagccttgtgctgaccgcctgctatctgctgttccgggacccgctgctgaccctttttggcggtacggtcaatgaagaaaccttccgcctgtccaaagagtacttcttctggatcaccctgggcgtgccgttctatatgttcggtcagtgtctgaaccccatcattcgctccgacggcagcccccgcttcgccatgatctccacgctggcgggcgcggcggtcaatctggtgctggacccgctgttcattttcggctttcagtggggcatgacgggcgcagcggtcgccaccgtgctgggtcaaatgctgacggcgggtctggcggtgtggtatctggcccatatgcgcaccgtgaagttggaacgggatagcttccattttcatccccggctgatccgtcagtatgtaccgttggggatctgcagctttctgagtcaggcctcgctggtggcggctatggcggcgatcaacagcatgacccggaagtacggcgtgctggacttggtcttcggccagccggaatacgctcagattcctatggccgtcatcggcattgtaatgaaattcttccagatcgtcatttcgatctccatcggcatggcggcgggctgcatcccgatcgtcgggtatcacgtgggcgcgggtctgaacagccgaacccgtcaggtgctccgccgccttctgctgatggaagccgccgtgggcgcggcggctacgctgattgtggagctattcccccaagcactgatcggtattttcggtgcggccaatgagagcgtctattacacgcagttcgccatcaagtccttccgggtgtatctgttcctgatgacgctggcgacagtcaataaagccgcgttcatctttctgcagtccatgggcaagccctgggcctccaccctgctttctatggtgcgcgaggtggtattcggcgtaggcttcgccctgctgctgccgcgaatgttcggactggatggcgtgctgtactccatgccggtgtccgacgcgctgacctttgtgatctccgtatgcctgattctccgtacctggcgggaattgaaagtcgacgattccggccgtgtttatcccgcataagacattcttcgcatctttccgaacgttcggtgaaaatttttctggtaagattcggaaagccgtggtataatgcctacgaactcccggtttcttccggaaaaaggaggaagacgtttggaacgcatcaagcgcaacgagcgaatggctgccctgaccaaatggctgaccgattcgcccaatcagattttcacgctttcccaattctgcgagcgcttcggctcggccaagtccaccatgagcgaggatatcgacattctccgtcaggtgtttgaaacctttgaactggggcggctggagaccgtcaccggcgcggccggcggcgttcgttaccgtccctatttgagcccgaaggcctcctatgacttcgtgcaggagctttgcggccagctgtgcgtcccttcccgggtgctgccgggcggcttcctgtacctgagcgatattctcagtatgcatgaactggtgtggaaaatgggcatcattatcgcgggacagttctatgacgcggcccccgattttgtcctcaccatggaaaccaaggggatcccggtggcgctgatgacctcccgggcgctgggcgttccgctggtgatcgcccgccgctccagcaaggtgtacgagggctccgcggtgaacatcaactacgtttccggctccgatcaccacatcgagaccatgagtctgagccgccgggccgtcaacgaaggccagcgcgccctgatcgtggatgatttcctcaagggcggcggcaccgccaagggcatgatcgacctgatggccgaatttgatgtggaggtggtgggcacggccttcgtcatgtccaccgaaaaccccaatcagcgctgcatccgcaatgaaaaggcgctgatgaccatgaacgtgaccgacgaccccgcgtctctgaccgtccgccccgccccgtggctgcgggagctggccggagatggcgcggtctgtgcagaacaggagggaacgaactgatgacctgttacagctggctgacggaaggcagcgcttttgccaaaaagcccctactgggcaaaatgagccgggattatgtgctggaagccctgaagggcgttgaaatcatcgaaaagccggagcagctttccgggcgaaagaccgatctggttatcgtcatccgggaggacatggccactttccgacagaaggagcttgcgcttttgctggaagacgccaagcgggaagcgcagattttccgtgcgttgggcacagacgaaccccttgccattgccatgaacgctgaaacggctgtgcaggtaatgaaagggatcgagacgctgcctgacctgacggagctggaaaaacggctgaaaaaggccgggcttcatacggctgactggtctgcggacgagaagatggagaacgtgcccttcccggtagcttcagcgtcgaagttttccgctgcctacaaggagatcaaccagcggaatatcgcccgtcacgagcaaaacggcgtcatttttctggctcccgaacggacgatcgtggaaagcgatgtggtcatcgcgcccggcatcatggtctacccgggcaacaccctgcagggcagtacccgcatcggcgcggactgtgtgctttatcccaacaaccgcctgagcaacacggtcgtaggccggggaaccaccattgaaagcagcgtcctgctgaactgcgccgtaggtgaggaaaccaccgtaggcccctacgcctatctgcggcccgacaccagcgtgggcagccgctgccgcatcggcgattttgtggaaatcaagaattcctccatcggcgacggcaccaaggtctcccacctgacctacgtgggcgacagcgatctgggccgggacatcaatctgggctgcggcgtggtgtttgtcaactacgacggcaaggtcaagaaccgctccaaggtagaggatcacgccttcattggctgcaactgcaatctggtcgcgccggttcatgtgggcaagaacgcctatctggccgccggttccaccgtggtggaggacgtgccggaggacgcgctgttcgtggcccgctcccgcggcgtggtcaaggaagactgggtcaagcgccgcaaggaagccgggaaactgtgattttgaaagatgccaaaagctcagagcaaacgccctgagcttttcttatgccattcaagccggatactatcggagagcggccgtccttccttccagaatcggcagaatgcccgccggtcccggcagtccgatccggcaaggcttgccggacattctttgccttactccttgacttcttcctgttcctttttcaaacggcggcggcccagcaggaaccacacgatggacgcgcagaaggccgaagccgcatcccagatcaggtcctccatggtgtcctgcagagcttcccggcccaccagctccacgccctgcgccgtgcggaatttctgcatattcagacccagcagcgcgtcgaaggaatattcgtaaatttcccacagcgcgcccaacgccactgcgaagcagaaggcgaacatcgccgtaaatcccgggctcagcgacacggagatctttccggagcggttcagcacgtccacgatggtaatgcccagaaggctcagcatcactgcggagaagctgtgcagaagcgtgtcccagaagggcaccagatagtagaagtcaaagacctcgcccagaaaaatagcgcagtacaggaacatatagtactgaacgtacagcacgtccggcacaggcagcttccagcgccgggccgcccgggagggcagcagcatgaccaccagacccagaatgcactgggtgagcatgagcagataatcgctgcgggtcttgccctccgtgcctgccgggagggactccggcgcgcccgccagccgaatggcggaataaacggacgctgcggccagcgacacaaacaggatgatctcgaaaacgcgggataacgtatggtgacggtttgccttggactcgggtgtttttttcatcgggcggtctccttgcacagttcggggataaagtcagtctgttcaccttccgcacggcccattccaccggcagaaagcactttatcagtatacgggaatcagtgggaattgtcactggtcagaaatccgattgtgcacaaatccagcgcaaaaatcccgaaacaggcaaagcccgttccgggaaaacttactattccgcattttttcggatcaacggggcaatcagcccggcaaagccgtggcagcagctggcccgaggactgaggaactcccacaacgtgcccgtctgccgggccatttcgccgtaggacgcgcggatttcatccaatacctgccccttgcggccgtaacgatccaggatcagcatccgcagcagcttgccgataaaagcgttggaggggtacagtcgtgaggccgccagccacgcgccgtccggggcaaagaggttttggaacaattccggcgtatcatccggggtggacaggtcgaaaaagaacgcataatactggcaggtctccgtgcattcctccgtcacggtccacccgccgtcttcctgccgcaaagcccggtcgtgccagagcgtgccgtcgaaaaacacgtcccgcagggtatgccgtacccgcgccgctttttccgccagcgcggggcgatcgtacagccgtgccaccgcttccagcgccgccgcgtagagcatattgctgggggcgttcacatcctgcaccagctcgttggccttggaccactccacgaacacccacgcttccagcttttccagcagccccagctcgttttcaaagccctcgaaataatgcagcgcgtccaacaggtgtttttctgccagttccgccatttcccgatcgccggtgcggcggacgtactcctccgtttccagcaggagccacagcatccagttggggataaagttgccgttgcgcgggtcggatgggtagcacatggggatcacgcccggtttcagccacggatagcgttccggcaggaaatagttttccagataggttttttccgtccgattggccccggtcagcgcccattcggctcgccccatgaagaagctgtcacagctccagcctgcccgttcccgggagggacagtcggtaaaaagatcgtagctgttctgccgcagggtctccacggcggcatggtcgatctgccgaagcaggccgtctcctacgtactctggcagcggcggataatcctccgccggggcggcggcttccagcaggtgcagacggcggatggtgcagcgaccctcggcgcagaccagcttgaggtattgcatcgctgccggttcaaaggccgtgaagcgatgaacaccccggctgaacgtcagcttcatagccccgatcaggctcattcggagagggttcacgtccccatccgtcagaatctcatcatacagagcatacataacaccgggttcatcccattcgatctccatcgtaaggaagcctgttttttctccatcaaaacgcagccatgcgccgtctccctttttcaggcgaaggggcggagcaaagggcacggaaacgggcgactcgtgatctggcagaatggcggaaatgtcccgggtcagcagagtcgtgcactcctcccggcggtagccgccgatcagctcccctacgccggtggtgcagcggtcgtcccatgggtgcgcgtggacaaaatcccacgaaacgggcttctgcttcaccagccagcggggcgcgatttccggcagtgcgggcaaaggccgccgcgccggaatcagccgcttgggctcacagcctgtcagctgttcagccattccccgcccgctgcgccagccgttccagtcccccgtcaggtcatagacctcgctgaagccccgctgatagctgtagcgttccaccttctgctcccggtagggcagacgcaagccaaaaaattcgccgccctccggaagggttcgggcaatacattccccgtccgcccagacctccgcctgcaggaagggcggctgatcggccagaaaaaacgtgttcacccggggcacgttgatctcgatcgccagatggctgatcctcggccccgctgcgcccgtcaggtcgatctcgctgacccggtgccagccgtgggcgcagcgcaccggcccgtaggccagatgttccccgttcagatagacgtgataatgcccggctacggccagcttcagtacggcgctgcgctttccttccagcttgagcggcgcgtaaaacccggcggtcaggtttttttcgtcctgccgtccctgcagccataccggcaaagactgttccatcatggagcgcgtcctcctttgccctgtgcttcttccgattttcccacaatttagcatatctcggccatgaaaacaagcacgtttcttatccccaaagacgacctgtgtgaacttttccagcaaaaaagcacggagagatttttctccgtgcattcgtccccctctaaggggattattgtttttcccggcgctgccccagcttttccacgcccagcagcgccagcaccagaaataccggcgcatacaggaacaaatatctcggccagacctcgaacagcagctgataagccgtcagccccagcagggacagggcgcagagctgcacggcgtactccctccgccacaaaaggacggcggcaaggcagcccagcagcaccattagccagaggcactgcatcacggcccggtaagcgggattccatgcgccttcccgatagaagattttccgcaggaacagagacagacggtcgctgcgccgcaccggctcctccaccagatagctgttgaaggcgaaggtaccatccgcgtaagccttataggctttgacggaaaagaagtgcagattttcgcccagggtacggttctgtacttcttccagcgcccgggccagattggcgcgggtgcgctccttcgccgtggcaaagctgccggaataggtcacgccctcggcggaatgaccgccccagtactggtcatccagcccgatcatgagataatgggcgctgcccagcgcttcctccggggctgtagagcccgtcagcagcttgacggagcctttttccagcgccataccgggcagaacacctacgataacggcggcaaggatgcacaaaccccgtttccaaagggcggcgtttttcttgcggaaaaggaagcggatcgtacccagcagcaaggcagcgatcagcaggatataggcgctgggcttcaccgccccgcccaatgagcagcacagcgccgccagaccgtagcgcaccggcgctttccagcccgtcagcaggatcagcagccccagcacgggaaacagacaggcataggtgtccgtgtagggcatgatgataaatggcgaaaacagcagccataccgccgccagcccaaaaccgacccgccgaacagagggacgcgccttgagccgccgcagtaccgccatggccgtggccacgctgaggttggtcagtagcgccgcgccgtaaacctccaacacgtagggctcagccagtcccagcttcatcccaagcccgtataccagtgacaggagcaccgtcagcggcgcgttgttggggcactgacggaaataggcgagccattcctcggacaggggctgacccaaggccagcgcttccgcgccctgccggacggctgaagggtcgaaggcaaaatagaaccacaaacaccgggccatcaggcattgaatagcgaacagcgccagatacagcgcggcccgcgcccacgccattcgagaggaagaagccgactgcggcagcttggccggccgaactctcagccgccagacccacaggccggtcagccctgccgccgccagcagcagaacccagttttccacgcagaagccatgggcataatacccctccatggcccgctggcccagcgtcagaagccccagcacccacaggagcatggcggcgtacagccagcagaaaaggggagaaagccagtcgcggctttctcccttcaaggttttggtcatgatttcacctgcttggcgaaggtgtccttcagccccaccacccggttgaacacgggcatttcaggggtggaatcctgatccttgcagaagtagcccacccgcaggaactgataggtgtcgcccacgttggcctcgcccagcgccttggaaagatagccgtggcacacttccaaactgttggggttcagcttcttgaggaaatcggtcttgagagtggcgctggacaccacattctcctcgccgtcggcctccgccttggcttcggcctcgctttgggcggcctcggcggcggtctcctcctcggtctccttcatcatcaggggctcgtacagacgggcttcgaagggaatattctcgctggcgctgacccagtgcagcgtgccctttaccttgcggttggcgccctcggtgccgttgcgggtgtccatatccacggtgcacaggacggcggtcacattaccgtcttcgtccttttcgcagccgtcgcagcgcacgatgtacgcgcccttgagccgcacctcattgccggggaacatgcggaaatacttcttcacaggcacttccatgaagtcttcctgctcaatgtagatctcccgggtcagcaccaccttatgggtgccccattcgggatgatcgggatggttttccatttccagttcttccgcccggtcctccggccagttctgcagaacgaccttcaggggatgcaccacggccatggcgcggcgggccttgccgcccagatcctcgcgcacgcagtgctccagcagcgccagatcgacggtgctgtccgccttggccagaccgatgcggtcgatgaaatcatgaatggcggcgggggtgtagccccggcggcgcatggcgcacagggtgggcatccggggatcgtcccagccagacacatagcccttttccaccagcatgcgcaggtagcgcttggacatgatggtctgggtcaggttcaggcggctgaactcgatctgccggggatggccgggcagcatattctgggcgtgctccaccacccagtcgtacagggggcggtgatcttcatattccagcgagcacaggctgtgggtgatgccctccagcgcgtcgccgatggggtgggcgaagtcgtacatggggtagatgcaccacttcttgccggtgcggtgatgttccttatacaggatgcggtacatggccgggtcgcgcatattgatgttggggctggccatgtcgatcttcatccgaaggatcatgctgccctcgggatgcttgcccgccttcatttcttcaaacaggcgcagactttcctccacgggacggtcgcggtaggggctgttcttgccgggcttggtcagggtgccgcggtattcgcgcacctgctcggggctcagctcgcacacataggccagaccgcgtttgatccagtccacggcgatctcgtagcacttgtcatagtattcgctggcgaagaacaaaccgcccttccagtcgaagcccagccagtggatgtcggccatgatgccgtccacgtactcggtctcttccttggcagggttggtatcgtcaaagcgcagattggtcacgccgccgaatctttccgcagtctggaaatccgcgaacatggccttgcagtggccgatatgcaggtagccgttgggttcgggcggaaagcgggtgtgcacgttctggtaacggccactctccaaatcctgctctacggcttcccagataaaattggtcttgttcgtcgtggtcgtttccattctgatcgctcatcctttcctgtattgacggctgatagcggcggttggccgcagaaagcagtcgtttcgcccattatagaacgaaaacgggcgtttggcaaggggcgcgggccacgcgcagccctatttccctcttgttctttgggtctggcaggactatactgtgggggagtttttggagcgtcaagggagatggaaattcatgtgggctgtttatgcggtgctttcctcggtatttgccgcgctgacctcgatcttggcgaaagtcggcatcgacggggtcaattccaatctggcgacggccattcgcacactggtggtggtggtcatgtcctggggcatggtgttcctgaccaacgcgcagggcggcattgccgagatcagccggaaaagctggctgtttctgatcctgtccggcctggccacgggcgcgtcgtggctgtgctactaccgggcactgcagctgggacaggccagcaaggtggtgcccatcgacaagctgagcgtggtcatcacgctgattctggcgtgggtgttcctgcacgagcagttcaacatgaaaagcctgatcggcgcggcgctgatcgcggcgggcacgctggtcatggtgctgtaagccggtcacgccctggcggcgaactcggcaaaggcgttatccaccgccgtttcaaaggcgggatagcgcatggccttatggatggctttcagggtcttgggtcccagccccatgcccttgcccagacagtcccagacttctttcattttgcacagcacaaaggcttcggtgccgatctgcgcccggtagccgtcatagagcatctggtgaaaccggcggagagcttcgacgctctccgtttttccattgtacagattcacaagccccggatgatacagaaagccccggccgcacatgacgctttccgttccgggatagcgccgtttgaactcccgcagggcttcggcggtgaaaagatcaccgttatagcacacggggagtttgctttcccgaagggtgtagtcgtaccactcccgatgcgggcttccgccgtattgctccgcccggctgcggggatgcaggatcagccgccgggccgggtatcggttgaacagctccagcagggcgggccattcctccgggctttccatgcccagccgggtcttgagggacacggcaaccggcgatttttcgaaaactccgtccagaaagcgttccagctcctccgggtaggccagcagccccgcgccccgatgcttgcgcaccactgtgccggagggacagcccagattgatgttgacctcctcgtagcccagcgctttcaacttgtccgccgcccagagaaagtcctcgctgctgttggacaggatttggggcacggccttcataccggcgttattctccggcagaacgtccgcctgctcccgatgggtcagcgactggccccgggggctccaaaagggcagaaaatattcgtccgccccatcgaaacaggcgtgctgggcgctgcgatatagccagtgcgcaatcccctccataggggcgaatagaattttcatcgggcatcttcctgttctttgccatagtcaaaaaaagtaccgtttggatgataacagaaaatatggtaaaatgaaacggagaaagtcaaaaaatgggaaaaacccactgggagggacgcgtatggagaagcaaaggcaccgggaaattctactgctgggcacgctgctgatcgtgatctacacggcggtgcagcacgccgatctggcctgggggctgctgctggcgctattgaagatcctgcagccctttctctttggcgcagggctggcatttatcctcaacgtgcccatgcggttttttgagacgaaagtcttcggcggcatgaaaaaagcgaaaagtctgcgccgcccgctttctttgctgatcgtactgctgctggtggcgctggtgatctacctgatggtagcgctgatggccccggagatcaagcgggctatcgagagcatcattctgctggcgcccaaggccttcgccaagctgaatcaatggctgctgcaatacgacatcgatctgagcgagtatgttcagagtatgctccagaccccggatcagatcaagaatcagctggaccagctgctgaatctggccctgaagggcgcggtcttctccaccggcgtgatcggcgcagtgtattcgtcggttttgcagtttttcttcaccgtcatgttcatgatctattttcttttcgccaaggagcgtctgcagcggcagctgacccgggtgggcttcgcctatctgccgaaaaagaccatggaccggctgctggaagtgggcagcctgaccctgcggacgttttcctcctttatttccgggcaatgtctggaagcgttgatccttggcggcgccttcttcctgtgcatgacgatcttccgtttcccctatgctttgctcatcagcgtctttatttccgtaacggcgctgattcccgtcctcggcgcgtggatcggctgcattacgggcgcgcttttgattttaatggtggatcccatgcaggcgcttttatttgtggtcatgttcatcgccctgcagcagttggagggcaatctgatctatccccacgtcatgggcaacgccatcggtctgccgtccctatgggtgcttttggccgtcgtactgggcgaagggcttctgggcattgtggggatgctgctgttcattcccctcacgtcggtgatctacacgctgctgcggcagcacgtgaaccagcggctgcgggagcgttcgctggagcatgtgggggaatgaaatgggggcttcctttggcggtatcccggcattattttcgtgaataaaggaagttcaggtgtacacaaacagagcgcactgtcgtgcgctccgtttaatgtttgcgttgaggaaagagcaggcctattttataaatttgaatgggatatgtctgcggctgcggcccaaaggggtgcagggggcgagcggaaagccccctgcaagcggcatgatacggcaactttgccgaaatcagttccctgtcggcgggattgacgcgccgactccggcgcgggagtgggacttgccgtcctatggggcgctcacacttttctttcgatggcgaaagaaaagtgtgcaaaagaaagcca

SEQ ID NO: 3620 - DNA, 11269 bp, Unknown
  16S sequences of unknown bacteria
cggaaggattccttcggtcacatgagccggtttccggcggatcattaactgctaaatacgcaaaaacacgtgtttcttccgcttgtttcgtttttcggctttcacgcatacgcatgaaaaaccccgggaggggagctttcgctcccgcttccggtgcgagcttccgaatccgggaacagctctgctgttcccgtttggaaaccgctcgcggtttcctttacttacggataccgagcttatcgatgatagcgcggtaacgctcgatgtccttcttctggaggtaagcgagaagatttcttctgtgaccgaccatcttgagaagaccgcggcggctgtggtgatccttcgggttgaccttcaggtgctcggtgagcgagttgatgcggttggtgaggatcgcgatctggacctccggcgagccggtatccttctcgttgatcttgttctctgcgatgatctgctgttttacgtccttctgaatcatggtttcacacctcaaaaaaaataaaattatactatcccgaaaagctgagcccgcggcgggtgtcaccggcaaaccaggcctccggtattcatacacatttattataccacacttttcccgttttgtaaagagcaaatcaaatatttccgaaaaaaactttttcgtttcccggaataaaaagcgttccgaccacttgaaaaatctctctgaatgtgttataatagatatgtctgtattttattataagggaaaagaagaaaaaggaaatgcaatcacaaaagctccgggagatcccggaaaacacattcatcgcgggacttcgtgacggcgtgccgatcgggctcggctacctctcggtctcgttcaccttcgggatcatggctcagtcgatgggtatcccgttcgtctggacgctcctcatctcgatgaccaacctgacctccgccggacagctcgccggcatcggggtcatagccgcgcacggctcctacgccgagatagcgctgacccagctcatcatcaacctgagatacgcccttatgagcctgtctctctctcagaaactcgacaagagttttaatctcctgaaccgtctcgcggtctcgttcggcatcaccgacgagatcttcgccctcgccgcctcgaaggagcacgacgtcggcgcgaaatatatgtacggtctcatcgcaatcccatacgtcggctggacgacgggaacggcgctcggagcactcgcgggcgggcttctgccggagatcatctcgaacgcgctcggaatcgccctctacggaatgttcgtcgcgatagtcgtcccggtcgccaagaagagaccgaggctgcttgtcgttgtcggaatcgcggcggggctcagctgcctgataaagttcgtgccggtcttctcgttcatttcgggcggattctcggtcattatctgcacaattgccgccgcggcggcgggagccctgttcttcccggtcgaaacggaggacgctgacgatgaataattacctcatctacatactcgtgatggcgggcgtcacatatctcatccgcatgatcccgctcgcgctcgtcaagggcaagatcagctcaacttttgtcaagagcttcatattctacgtaccctacgcggttctgtccgccatgaccattccgtcggtgttcttctcgacggcgtcgaccgtcagtgccggcgggctgctttcggcgggggtcgggttcattatcgcggttctgctcgcttactttgagaagtcgctgctgacagtcgctctgtcggcgtgcggcggggtgctcattgtcgagctcatatccggattattctgaaatatatattttaaggaaggttttatcatgaccacaaacgagatactcgaaaaattcgctctccccggaggttacgccgtcgcagagacaaagcagctgaacgccgggaacatcaaccgcacctaccgcgtaacgatggcggacggctcgcgctacatcctacagaacatcaacacgaacgtcttccgcgacccggacgggcttatgaacaacatcttcggcgtctgcgaacacctgaaaaagaaactccccgccggagccgatcctctccgcgagacaatgacgttcataaagaccgcggacggcgggcattatttccgcgacgacgaggaccgatgctggagaatgtacgtctacatcgacgccgacagctatgacagcccgacgaagcccggactcttcggcaaggcgggaaaggctttcggcgacttccagaaaaagctcgccgactacccggcggacaccctgtgcgagaccatcccgaacttccacaacacgccgtcgagataccgcgatttcctgaacgccgtcgagcactgcgcgcttcccgagaggctgaacgaagccgagaaggagatatcgttccttcttgagcgccgtgacctcgcttccctcgcgaccgaccgcctgaagaccggcgaaataccgctccgcgtcacgcacaacgacacgaagctcaacaacatcctgatggacaagcggaccggcgagggactctgcgtcatcgacctcgacaccgtcatgccgggaagcctgctctacgacttcggcgacgcgataaggttcggcgcgaacaccgcggctgaggacgagccggacacctcgaaggtctcgctctcgaccgaaaaatactccgagttcctgaacggtttcctcgagggcatcggtgacagcataacggacaccgagaagaagctgctcccgtccggcgccgctcttctgacctatgaacaggcgatgcgcttcctcggcgactacctgaacggcgacacctatttcaaagtcaactacgacaaacacaacctcgtcagagcgaaagcccagatcgccctcctcgccgacattgagaagaagctgccggagctcgggaagctcggctgacccccgcttttgtgaattgtttgtaaatgtgtgaggatcgccggaacttttatataattatcacgtcagacatcatgtcgggcaaaaaagcgtataaaaaccacgcgccggcagaaactatcaacgttcgcaaaacaagaaacccatccaaaaaggagaaaagaaaatgaaaaagataatatcgataatgctcatcctcgcgtccctcgcggccttcgcgtcctgcggaaacaacaataacggctccgacagcaccgatacctcgactggcgacacctcgaccgccgacacctcaaccaccggcgacaccacagccgccgacaccaccaaagccgacgagtccgcctcaacgaccacagtctccgccgccgacataggcaaagccgtcgccgacgaattcggagacgaatatatccccgacaccgatatccccgccgactacctcgactccacctacggaatcaaacccgactggtacgacgatttctacggtcaggttcccatgatcggcgtcaacatcgacaccttcatcgccgtcaaggcaaaggcggacaaggtctccgacgtcgaaaaagccctgaacgactacgccgaattctacaagaacgacgcccagaaatacccgaaggacctcgccaaagtcgacgcctgccgcgtctacaccaaaggcaactacgtcttcttcataatgctcggctaccccaccgatgaagtcgaaaacatggacgacgccgctcaggtcaagttctacaccgaacagaacgacagagccgtcaaagtcatcgactcgctcttaggctgaagttaagcgggggagaaggagaccttgaaaggtctcctcctcccccgcaccccctccacctcctaactttatacaaattatttattatggttttcagcagcttactatttcttttccggtacctgccgtttgtgctcgtactctactttatctgcccgaaaaaactgcgcaaccttctgctcttcgtcgtcagcctcatattctacgcgtggggcgagcccgtctatgtcgtgctcatgatcttctcgacgcttgtcgattacacgcacggactgctcgtggcacactacaaggctgccggaaacacgcgcgcggctaagctggtcgtcgcgtcctcgatgatcatcaatctggcgctcctcgggttcttcaaatactacgacttcctcgcgggaaccgtcaactcgctcatcggaaccaccctgcccctcaccggcgtcgcgctcccgatcggcatctccttctacacatttcagaccatgtcctacacgatagacgtctaccgcggcgacgccgaaccacagaaaaacatcatctccttcggcgcgtacgtggctctcttcccgcagctcatcgccggacccatcgtcgcctacaagacagtcgccgaccagctgaacaaccgcgtcgaggacaccgacaagttcgcctacggcatcaagcgcttcaccgccgggctcggaaagaaagtcctcctcgccaacagcgcgggcgtcatctgggacacgataaaagtaatggatacgtcctccctccccgccctcacggcttggataggcattctcgcttacactttccagatctacttcgatttctccggctactcagacatggcgatcgggctcggaagcatgctcgggttcaggttcctcgaaaacttcgactatccctatatgtcaaaaagcgtcaccgaattctggcgcaggtggcacatctctctcggctcgtggttccgcgactacgtctacatccccctcggcggcaaccgcaaaggactcgcaaagcagatacgcaacatctgtgtcgtctggctcctgaccggtctctggcacggcgcgaactggaccttcgtcctctggggcgcgtatttcggcgttctcctgataatcgagaagatgttcttactgaaggcgctgaaaaaagcccccgccatcgtcgggcatatttacacgatgttcttcgtcatcataagctgggtgatcttcgcgctcgacgacatgaagtcggtcaccggctatattggtgcgatgttcggcgcgggcggcgcgctttatgacaagacttcgctctatctgctctcgacaaatataatacttctcgtgatactggcgctcgcgtcgactgacatcccggcaaaactgggcaactcgcttgttgacaggctcggtgagaagccgttatcggcggtcgttcagaatgtcgtcttcgcggcggtcatactcgtctcgacggcttatcttgtggacgcgacctacaatccgttcctgtatttcagattttaggagggcggcatgaagacaaacaaaataacaacgatagttttctgcgccctgatcggctcgctgacaatcgccagtatgctgaatcccgtgaaaaaatcctccgagaccgaaaaccgagagctcgcgcagatgcctgagatatcggtgaaaaccatcttcgacggcacgttcgagaagggctacgagaccttcatcaccgaccagttcgtcgcgcgcgacaggtggatcgccgtcaagacagacgttgagcggctcatcggcaagcgcgaatcgaacggcgtctatttcgcggacgaccactactacatcgaaaacgtctcccccgacaaagaagtctctgagcgcaacatcgggtatctctcgggatttgtggagagcatgaaggacacccataacgtccgcgtcctgatagccccgaccgctctctcgataatggcggacaagctcccgaagaacgctccggtctgggacgaaaacggctacatcgaccggctgaaagcggcgtccgacgggaatttcgtcgacgtcagggacgttctctcggcgcacgagaatgactacgtctactacagaaccgaccatcactggacgacctacggcgcgtatctcgcgtacacttcccttgccgagtcgctcggttttgagcctctgaccgaggacgaaatcgtgagaacgacgctttccgacgagttttacggcacgataatcgcgaaggtcggtctctcggacacccgcgacacacttgaaaaattcgagtcgaagaatcagccgaccgtctcgctcacctacaatctcggcgagaaggaaaccgaaacgctctacgccgacgaaaagctcggaacccgcgacaagtacggatacttcctcggcggaaacgacgcggtagtcgacgtcacgacaagtgtaaagaacggaaagaccctgctcctcgtcaaggactcctattcgcactgtatgctcccgctcctcgcgaaccattacgagcggataatcctgctcgacctcagaagcttcaacatgggcgtcgggacttttgttgacacctacctcgcgaagcagggcgtaagcgtcgatgatattgtcgtgctctacaacgcgagtggattcgcggacgacaggtatcttatcaagctcacaaaataaagaaaagaggatgtcatatggctggcgtcctctctttttgctcatatctcgttttgtttgtgctctacgctcgtaggggcgaccattggtcgcccgcttcaaacaattacgtatatcgtttatttgtgcgataccaacgaaggcgggcgaccaatggtcgcccctacggggtttgtgcgtccggtgatgttttgcgggtatttgtttggttgtgttatatgttcattcgcgtggcattattcgattttgtgcgacgccaacaaaagcgtttgtgcgtccggtgatgttttgcgggtatttgtttggtggtgttatatgttcgttcgcgtggcattattcgattttgtgcgacgccaacaaaagcgtttgtacgtccggataacgttatatgtttcccattaccctcgcatcgccaattgtaacatttttgtaatattgtcgttttatcgcttgtattatttcggaatatgtgttataattgaataaattgaatgcgcgttattgcctttatcccaacattccgaacgacacggatactatctcattctgaaaggctggtaaatcccatgtatcgtgaaatccttttgaagtatcagaaagacaacccctggatgaacatcgcccctcccgcgccggtcgggcgtgtcatgtcgaccgcgaacgacctcggcgccgatttcccggaagaggaaagacagctgctcctcgagatggaaggcgacggagtcttcctcctgaacctgaacctgcttgtccgagcgaaccgcctcgcccgaagcaacgacgaacctccggacgcgaagaatatcctcataatcgccaaaagcgacttcccgcagaaatactacgggtatatagccgccgatgaacagccggacaacagcgtcgtatgctaccgccccggaatctatgtcctcacccccgagcgctcgccggagcccgtcgcgaaggatatcgggacgctcattgacctctattatcaggggctcgtttaaccgcatatcaaaaggaccgcggatttctccacggtccggtttttttagttgttctcagccttcgcgagctccgcgttcctgcggtcgacgaagttgtggattctcgtcacggggttcagcaggtcgctgatcgacgtgtccttgttgagggtgtctatgatgtaggagatgtacttgcacatattgacctcggcgtaccacgggcgcttcttcagctcctcggggcggtagatgaggtttgtcgtgaagatcttgtcgaaggtgcccttctcgtactccttgtcgaacttatcgagtccgttgcagaagagaccgaaggtggcgaaaacgaagattctctccgctccgcgggacttcagctggttcgcgacgtcgattatcgagccgccggaggaaatcatgtcgtcgacgacgattgcgtccttgccgtgcaggtcgcgtccgagatactcgtgcgcctcgatcgggttggttccgtcaacgacgacggcgtagttgcgacgtttatagaacataccgagatccagccccagcaccgacgaatagtacatgcagcggcccattccgccctcatccgggctgacgacagcgagatggtcacggtcgagctttatgtccggaacattgcggcagagcgcctttatcatctggtaagtgcacctgacgttatcgaagccggcgagcgggatcgcgttctggactctcgagtcatgcgcgtcaaaggtgattatgttcgcgacgcccatgttgacgagctcctggagagccagcgcgcagtcgagcgactcacgcgcggtgcgcttgtgctgtctgccctcgtagagcatcggcattatgaccgagatccttctcgctttgccgcctatagcgcctataacgcgcttcaggtcctggaagtgatcgtccgggctcatcggcacctgcatgccgtacatattgtaggttacaccgtaattgaagcaatcgctgatgatatagacgtcatgtccgcgcatcgactgaagtatatgccccttcgcctcgcccgaaccgaatctcgggagatcgacctccgccctgaaggtctcggtcgtctcgtgccaatccttcaggtaatagtcgatctgatcgaccatatcctcgcatccgcgcatggctatgactcttaaatcgctctggtgtgtatcgttcattactactctttcctccggtaaactcgccgcgcacgaccacggcgtccttttggcggtatacttatcggcgcgcccccgcctccggcgcgcggatttcttgtcacatctattatagcacacttttcccggatttgaaacacctttcgcaaagattttaagatttcatgaatactgcacaaccgcacggcggcaaaacacggcatgattcttcgttttgtacgacgaaaaagcgcggatttcaggggattgtgaatcctgtccgaacggcgcgtcgattttgacatataaactgaacgtatctacaaaaatttacctgtagttcaaaaatcctttaccgggtgcttgacaggacgggaaaactgtgttataatgtgttcgttatcaaatctcgcggggggtaaaactctccgcttatgaattttaaggagaaacaccatgaaaagaatcatcgcggcgactatcgccatcctgatgctcgctctcgtatgcttcaccggctgcggcagtcagagcggaagccttcaggcgatcaagaaggaagacctcaaggtcgcgttcctctatgtcggaaccatcggagacctcggctattcctacgcgcacgaccagggcagaaaggctctcgaggaaatgggcatcgaaaccacctatgtcgagaacgtccctgaaagcgccgaatgcgaagcaaccctccgccagctctgcgacgaaggctacaacgtaatctacgcgacctccttcggtcacggcgaatgggtcgaaaaggtagcgaaggattacccgaacgtctacttcggtcacgccaccggctacatccagtccgaaaacaccgaaaactacatgggcagagcttatgaggcaagatacctcgcgggcatcgtcgcggctatgaactcccccacaggcaaaatcggctatgtcgccgcaatgcagatccccgaagtcatccgcggaatcaacgccttcaccctcggcgtaagaagcgtcaacccgaacgccaccgtcaccgtcaagtggaccaacacctggttcgacgtgaccatcgaaaaggcaaccgccctcgaactcatcaactccggctgcgacctcatagctcagcacgccgactccaccgctccccagatcgccgctgaagaaaaaggcgtaaaggcaatcggctacaacagctccaccccggacgcagctcccaccgcgtacctcaccgctcccctcttccactgggacgtcttctacaagaacgacgtcgaatccatcatgaacggcacctggcagcccaaatcctactggggcggactcaaggacggcatggtctccctcgacaccctcacctccaacaatgtagcaggcacgcaggaggccgttgacgcagctaaagcgaagatcgaagacggctccctcgtcatcttctccggagaactcaaagacaacgaaggcaaagtcagagtcgaagcaggcaagagcatgaccgacgccgaactccaggctttcgactggttcgttgatggcgttatcggtactataggctaagagaacgaagacgtgggaaaggactttttgggaaaaaagtcctctcccacacccactctcaaaaaactttatacactctgtacttttttagtctgtgcgttccactcgtctggggcgcacttttttcgtccggtcggcaaaatcacaaaaaatccggagttttcaagtctcgacttcgttcgataattcccctcaaaatccgcccgaaaccattgactattaccccctttttgtggtataatataattatctattttctgaagattgcgggtaaacgatatggacgatatatgtgtcaggctgcgcgggatttgcaagtccttcggcagcataaacgccaacaaggacataaacttcgaggtgaaaaccggtgaaatccacgccctcctcggcgaaaacggctccggcaaatcaacactcatgaacatcctctccggaatctacagccccgacgccgggtcaatcgagctcttcggcaaaccggtcgctttctcctcgccaaaggattccatccgcgccggtatcggcatggttcaccaacacttcaagctcgtcgacgtcctcaccgccaaggagaacatcatcgcgaacggcaccgacaagctctcggacggcttcttcaccagcggcaggaaaatgaccgccagaatccgcgaaatcgaggacaaatacgggcttcacctcgaccccgacaaaaaggtctacaatatgtccgtctccgaaaagcagacctgcgaaatcctcaaggttctctgccgcggcgcgaaaatactcattctcgacgagccgaccgccgtcctcacgcctcaggaaatccgcgtgctgttcgacatccttcgcggtatgaagaaacagggctgctctatcatcatcatcactcacaaactcgccgaggtgctggaaatatctgacaggtgtaccatcctgcgcaaggggcgctcggtcgggactatcaacaccgccgacacaaacgcgcgcgagctcaccgaactcatggttggaagaccgatatccctcgacatcgaacgcgacgaacctctcccggcggacggcaaaccgctccttgacgtgaaaaacctcacagtcctcgacggacagcggctcaaggctctcgacgacgtctcgttcagcctctcaggcggggaaatcctcggcgtggcgggcatcgcggggagcggacagaaggagctctgcgagactatcgccgggcttgacag

SEQ ID NO: 3621 - DNA, 17598 bp, Unknown
  16S sequences of unknown bacteria
cacaatccgattttactgaaatatgcttccgtatttccgtatttgtctttgaataacctcaaaaattcttctatatacatttcgcacggagtcacaattcgcatatcaatctcgggaaagttcttatgtatcagttccaaacgttcttttccgtattcttttgttaaaacataattctctgttatatctctgtcagatacccctgcatggagcaaaagaatcgcagataccacgccggttctgtcttttcccgcggtacagtttatcataactccgctatcagcatttgctatgcaaacaaatacgtcagatacggattttgccgatgcgattctcatatagctttttggaacttcatctacagacgcaggtatgccgcttccttcgtctatcggaaagttatagtatgtgaagccttctctgccgcaaaaaccgctcggctttttcagaacatcctttgcgcctctcatatcaataattgtggtaattccgtttgttttcagaaataagcagtcttcttcatcgggacagcactgtacatcactgcggattaccgtcatttcgcgtgtaggcactccgtagactgtttgatatccgccaagttcccttgtgttctgagtagtattcagcatactgacatattttctcattaatgtgttcctttcgcgatttattcaaccgacggatatttttccgcgtgtatctgcttgacaagctcggtcacgtctccgataaagtcggtcggttcttttccgccgtcttcgtaatccgtcattatcacaatgatatatgggtgctcgtcgaggattagcgccatatcgtggaacgcgcctatgtcccatccgtatttatgcgcagcttcgccctcgtcataatgagcgcatatcatttcaaggtgctttgatcttgtcatgcaatccttcatgtgctcggcgtattcgcttcccgattcaaaatactcattgagctttatgagaaactttacgcagtcatccgcggagagagacataaaatcacgatttactcccgttacgccaatctccgccattttctcatagaaatacttatatccgaacctctgtctcagctgcgcgaacgctatattgtcgctgtagagaagcgcgtagtctataagctccttccatgtcagctcaaatccgtcctctttttccattatctcgccggagccttcttcaagcattgcagcagaatcgtaaacccacttttcgccgaggtcgtacttttcttccccgtcatgatagataatgtttccgtcctcgtcacgctccttcttgtttttctcgaactcttctatctcgcatagcactgagtatatgtacggcgcttttatcaggcttgctgaatagcgtatttcgtctgaattgtacttgatttcctctcccgaatctatgtcgtagtatgcgaatgacagctccggatacacctttacgaattcgtcagattcttcggcagctctcgcccatctcagcggtgcgccggtttcaaaaagggacatgagcttttccgtcggagttttgttctcgtctgtctcaggtgtagtttcatctgcttctgccgtgtcttcggtttcagctttggtctcgggttcagcttctgtttcagtctcatcggctgcggcttcaagttctgtttcagcttccgaggtttctttcgtttcagtttcaggctcagtctcggcggcaatggtttcgggttcatagcgttccatgactgccgcatattccgtctcgttttcctgtgcctgcgaattattgtatgcgtttccgagaacaacagccgacgcgagaactcccaccgccaatgctccgagaagcgatattattgtaatctgttttttatctttcattttttcacaaaaaatatcctgcaatatttcatgcaggaaaatgtcgtattgtcaccctaaggttaatcagtctccgcttccgctgtagtaaattatctcctgcggatatctcagcccgagcttgttgtgcgctatctccgctacatactcgtcgtcaaacggtctgtcgaggtccgcctgcagctccgagatatattcgtccatgtcgtctatctttgcgcgaaggttttccgcttttgtttcaaggtcgttgctgcgcagtcgaaggcttacaaatgtcactataaaaaatgtcagtaatacgagcagggacattcttacgacagtatttttaaacagtgctttcatttatttctccaaccacttttccattgctatgtcgtgcttcagttccgcaagcatctttctcgtcttccgctcggctttaagcttctttataccgcaaatgacgcgctcccccgtcctgctccagatgaacgccgccgctttttttatgattccgaaaagccacatacacggttttactataacaagacatatgagcttttttatgaggcgcgctatttcttcggagacaaacatgacggctcttccgacggttttacggtacaggacaaagccaaggattaccgagacaagaatatacgctctgaatctttcgttttcagtccaataatcgaaaacggaatacaccgcggtaaacaccgtaaacacggagaggtcgaacagagcgaagataacaaacggaactgccccccgcttcatgctgactctgccgccacgatacgacgcgataccgcacataacatatattattctaattatatcgtatattgcaccaaaaatcaagcctaaaattaccgaatatacgatgtttaaaatttgtttttcgatgaaaaattccatttatttcataagacgcgaccaaaagcctttttttgagccgcccgaatccttggagtagtagcacatactgtcaatttctccgtttattactatttttccgctttccaccgagaaactttcaatcttcatgccgtgcccctcgaccgctatcattccgagcgaggacgacaccgttatcatctcctccgtaaatcccgcgacctcttctattccgctcatctccatccgcttacgagaaaaaaggcatacatcctgctccataatcaaactctccccttgtcttttgtttgattatatgccgtgggagcgcagggtatgccttatattacagtattgccgtcagctttctattatttcgtacatggaggacgcgtctgccttgagtgcgtgttctcttacgtcgtttacgcggagcttgagtgttcttccgccgtaggatacttctataatgtcgccttcctttacgtcgtatgaggctttagcgcgctttccgttgacctgcacgtgctctgtatcacaggcttcgttagctacggtgcggcgctttattactcgtgataccttcaaaaatttgtcaagtctcattgtttactcctttatctttgtagtcgtttataaattcgtctgttttttcgccgaggtgcttttctatatccgcgccgtcagagagcacgactgtattgaaaactatatccgttatcagctcttccctctcgtctccctgcgcggttttcagcttttccgccagcgagattatgtcgtcttcagtcacggcaaagtcaaatccgtcttttttcgcttttttcactacttttctcgttctcatgagcgacgggagctgcttcggtacggactgcatggattcctttaccgttttgcgatccttttcagccttctttatcgtctcccagttgtcgagaacctcgcccgagccgcttaccttaacatcgccgaagacgtgcgggtgccgtgatatcatcttctcgcagacctcgtttatcacgtcgtcaaccgagaatcttcccgcttcttcctcgattctgctgtggaacatcacctgaaacagaacgtcgcccagctcttccctgagcagcttcgggtcggaattgtctatcgcttcgacaacctcgtaggtttcttcgattatatcgtttctgattgattcatgagtctgctccatatcccacggacagccgccttttccgcgaagcacctccgtgagcattctgagggagttaaagtcatgattcttttcgtttactaactgtttctttttttcttccgtggtcataatcatttttcctttatttttgattttgacttaattatgttttttatgtccgtcaggcttacctctccgagcagtatcagcattgtgaggtacactacagccgcgactaaaacagaggacacgcacgccggacttgaaccgagcacaggcttaagtatgctattaaccagcactgcggaaagcgaacacactactgcggacaaaagcggcttgtacagcattccgggtgtcaagtgaacctttgtatagcgaacggtaaacgcgaggttcatgaccgtcaccgtgagatagcagaggaaggttgacatgggcgcgccgcttattccgtacagctttatgagaagcattcccgacagcagctttactccgccgccgacaagcattgatataaccggcattttttcttttccgcagccttggagaactgaatttgttatcgcgaggatacagacaagaagtgacgacggtgcaagcagagtgagaagcatagccgccgcgtgagctgatgtgtcgttataaagcaggcacagaatagggtcggacaacgcggaaagtcccatagcgcacggcagtcctattatcagcgcgtatctcagcgacatcgttatcttctcctttgccgcctcaattttgccctctcctgccgccgccgcaactgccggtatgagagaatacgctatcgggtagatgagaaccggcggaagattgaaaagcgggactgcaagcgaggtatagttcccgtatgccgccgtagcttcttccgctgtcatgccggagagtatcaaaatccgctgtatcatggcagtgtcaagcgtgtttgtcaggctcatcaccgaggcggagagcgtcacgggaatggatatcgcgaggaaccgcctgaaaatactgccggttttgtcgcttgtgtagtctatttcatgctcggtaacaaggtcacggtcgccgcgcacaaatcccgttatgataaggtagagcataccgacaaacgagcctgccgtaagtccgaacaccgcgtatgccgccacgacatgaatctccgcgcccatacgtattgcgtagagagcgcaggctattccgataagcagctttcccattgcctcgataagctgtgacaccgccgtgggcatcatattgccgcagccttggaaatatcctctgtacgcgccggagacacagacaaaaagtatagtcggtgcggcggcggctattgacattgcggaaagctccgagcttattagaagtgcgagcttatccgaggcgaaaaacatcagcgcgaacgcaagaagtcctattgccgcgaacaccgccaaagccagatgaaatacctttttcgcactgcctatcttaccctgcgcgcgtttttcggacactgtaaccgatatcgcgacaggcagacccgaggttgagagcatataaaacaaggtataaatcgaataagcggagttatagtaccccattcccgtgtcgcccatgatatagttcataggtatcttaaagagaagccccgtcaccttaacgagcagattcgacacggtgagtattattattcctccgacaaagccgttttttattattccgtttgcgcttttgtacgtcttatcccgatgttctgccgtctttctcaatcggcgtcctcccgaagcttattttcctatggatagcatacaacccctaaatcagaggtttcctataaattcacggaaaacagagttattcgggatcatgcagtcctcaaaattatcgctctcgaaagccgatatcttctctttcagctcttctgccgccgcgtgatatctgctgtccttcggaacggtatcaagaagcggaagagcgtgtttattcagaataaacggctcgtaagcaaggcaggagtcgatgtacacactgcaattcttggcgttcgggaagatgttttcctcctcgttcgccctcactccgtcccaaagatgcagtgtgaactccgccgtagctccacggaatctgtggtcgcggataatacgcctgagaagtcttatatcgtttttgtctataaagctctcgtggtatcttattccgcagttgacgcatatgaaaatgctctcgtgccgtccgagaagcgatgatatttcaggatagactgcctgtatcccttcaaaaacatatatatcgttttcgtttggaatatattcattatatcctgttcgcgcagtcttaataaagtcgtaggtcggcacaagcacgctctcgcctttcatcagtctttcggtaaagtgcgcgaaatagtcgatgtcgatggcttttacggtatcgtagtcgggagcttcatcgtttaccacattgcggttgttcctgtcgatgaaaaagtcgtctattgacatcacgacagcgcgtctgccttttgtttcaatatgttctgttagcttttttgccgttgttgtctttccggaacaggtcggccccgacaaagttacgatttttgtgttattcgagcttacaagtgattttattgcatcgtctatctcctgcccgaaaacgtcttcacattcgccgataaagcttcttgcttcatccttcgttttcacatcaagatcaatgcttttcatattatttacctttcaaaaaactcttgtgcggctttcttcagttctccgagcttgtagtcctcctcggcgcagtctttaaggtattcatacggatatttcggtctgaaaaatctctctatccttacgtttccgttttcatccggcagtgacacgagttttgttaccgatgacgcaccggaagcaaagatagaatgcacctcttccatcatataaacgttgtacagtccctcgtgaccgggcttggagtatcctacgttctcgagattgccgacggtattcttctgcctgtacatataatacgggaggtatccgccttttgccagtgcagtctgagaataatttacgctctcggcggctgtgacggaagcagggtcaaacattccctcggccttgaattcggacgacttctttacgctgaacgtgtgaacggttatgttctcgggatcaagctctatcacgcggtcgatggaattcttgaacgattcggttgtatcatacggcagtcccgcgattaggtctacgttgatattcttgattccgctttttttcgcgatttcgtatgcatggaggaacatttttgagtcgtgcgcacgtccgatttttttcagcacctcgtcgttcatcgtctgagtgttcacgctcattctgtcgactccgtgctcatacgcaaccttaagcttgtccgcggttattgtgtcggggcgtccggcttcaagggtgaattcttccgtcccgcttgtgtttttgttcacgcaggagaggagaaaatcaagctgcgacgcgtcaagtattgtaggagtaccgccgccgatatagacagagcgcaccttcatgccaagtgagcggattatgtcaaacacaccgtctatatccctctcaagcgcggtcaggtagtcggggatcagcttgagcagtccgggagatgtgtacgagacaaacgagcagtatgcgcatcttgtaggacagaacggtattcctatgtatacgctgcactcttttctcacgctgtcggttatgagctttttctccgccacggaaacatccgccgcgagctttgcttttaccggggagacaaaatagtcgcgctctatctcttctgcggcttcttccggcgttcttccgttttcaatgagctcggtggctacttttgcgggacgtactcccgtcagtattccccacggcggagtaaatcccgtgaatataactcccgctttcatgaaggctgaccctgcggctatttttcttgttttctcgtcgtcatgagcgccttttttcacgctttcatgtgcagtgcatgacttttccccttggcttatcgtgacctctgccgtcacttcgtcttcgctttctgtcatgtcgagggtggctttgagggtgtccggcgtttcttcctcgtcttcgggaaactttactccggggaagaatatcatggagagcgtctggatataatacggttttacatttccgttaatctttaaaatcatataaatgcctgttatcttttaggttgtttcagaacatccgaatacatcggtattgttatcggtccgtcaagtgtcgcggagattatcatgtgcgcgccgaaaattccgcttgataccttgctgttgtgggtggaaagtctctcgacgaatttgtcaaacagcggttttgcgacatcgggggaggcggaactcatataatcggggcggtttccttttctgcacgagccgtaaagtgtaaaattcggcactaccataaatccgccgtcaacatccgcagcggagagattcatttttccgttttcatcggtgaacactctcagcttcgctatcttgtccgcaagcaggtttacgtcctcttcggtatcttcatgcgtcactccgacaagaacatacagtcctattccgcattccgcgacgacttttccgtcaacgacgacatttcccgacgatattctttgtattacagctatcattttgtttccttttatcatgcaaatcctctctgtatcgagtggacgtggtttatgcttttcagccttgacattattgagttgaagtggtcgatattcttgcagcctacggtgaggtttattataatatcgttctccgtacggcgctttgtatttatcgagaggagcgacaccttcatatccgcgagagccgttgtgatattggcgagtagcatgatatcgttttcggcgaaaatttgcagcatgacctcatacagcgatttcgggtctgacgtgggagatgcgatatcccattcggtattgacccatctgtccttcgtctcgggattctgcattcctgagataacgttcgggcagtcgcgcttgtgaatggagataccgtagccttttgtgatgaatccgataacggagtcgccggggagagggttgcagcactttgcgaattttacgtcgcagccgtattctccgtcaactataatgccgccggtggattttatcttctttggcttctgcgtctgtacctgatcggtatcggtgataatagcaagctgctcgtccggtttgaccacacgctcgtactcacgcttcagcatagtcgaaacctttgagagtgcgattccgttatatccgagggcgttgtagaggtcgtccacgtcgttcatgccgagtttatgtgcggttgacgagagtatctccgttttctgcgcttctgtcggcttaactttgaatttcgcaagctcacgctcaagctcggcattccctatgcggatattctcgggacgctgttctttcttgaaccactggcggattttggtgcgcgcttcgctggtcttgacgattttcagccagtctctgctcggcccttttgctgcggaggatgtaattacttcaacgatatctcccgtttcgggagctttgtctatgggggctatcatgccgtttatcttcgcgcctatcatcttgtttccgaccgcggaatggatggcgtaggcaaagtcgataagcgttgctccctgcggaagtgcgataacgtctcctttcggagtaaacacaaacgtctcgtcgctgaaaatatctatcttcaaggcgtgcatgaagtcttcgctgtctatagcaccgtcttccgtgtcaatgagcttcgatatccatgcgagctttttgtcgatatcctccttgctcttgtctccggacttatacttccagtgcgccgcgataccgtattcggcgacatggtgcatctcgcgcgttcttatctgaacctcaaacggaatgccgtctcgtccgataacagtggtgtgcagcgactggtacatattcggcttaggcgtggagatatagtccttgaatctgccggggatgctcttgaacagctcgtggattatgccgagtgaggtatagcattcaagctcggtatcaacgataattctgatggcgtagaagtcgtatatttcgtcaaagctcttgttctgcttgaacattttgcggtatatcgaatatacggttttaactctgccttcaagggtaaagtgaatgttgtattcctcgagcttttccgagacatacgcgcgggtgttttcgatgaagttctggttctgaccgtatttcttttcaatatcgtttgaaacctcggcatatcctatggggtcgagatattgcagcgcgaggttttcaagctcctgcttcattctctgcataccgagacggtgagcgagaggtgcgtagacatgcattgtttcaagagccgtggcgcgtcgtttagcttcggtttttacgccgagagtacgcatattgtgaagtctgtcgcacagctttataaaaattactcgtatatccttcgacatggcgagaagcattttacggatgttttccatattcgcttcttccttgtcctcgacgtttattaccttcattttggtaagtccgtcgacaagcatagcaacgtcatcgccgaaacgctgtcttatcgtctcgatattcgtcttatccggacagtcctcgacagtatcatgcagaaaagccgcgcatatcgagtccgtgtcaagtccgagagacgttactatttccgcgactgctatgggatgggagatatacggctcgccgctgacacggaactgtccctcgtgcaaagcctttgcgtaaagatatgctctttcgattttttctacgtcgtaatgcttttcgctgttctttatcaccgacatgagcttgtcaatattgactgtgttatacggtgaattatgttcttgtgttttttgttcttctaagtttgacatatttattattcttccgagtacggacattattcagtcatgccgaagtcggactttaactttctcagtatattggaattatcaaggtttgttttggttttagtgaatactaccttgaacgcgtatatttctcggtctgcgtcaagctcttttatttcaagcagattcatctcactgaacacgagcatgatgaacctcagcttgacgtacccgattttgtctccgacagagccgagcagattgataagcgctcttatggagaaaacctcgtgttccagtcttgcttcacggcgtatcgcgttgtagactgccgcaaaatcagcgtgtgtggggacaatgcctgcgggtttcagtcggcttagctcttccacgctcattcctccgcgcagctttgcgaaaatctctcttgcgttcatctcattttcgtattcagcctcggacagccgtatgtcttttataatcatttggagcgttttctgattctggaactcgtttatgtcgagcgagaacattacgtcaacggtatctccggggtaaaggcaaatgtcgtcgagcgtatgacggaagcacattgcattcactacattgtttccgaccttgagcatgattctggtatgctttccgccgccgacaagtgaggtttccgctatggtcagacggcgcataacgaatatcggaatgggatttgaaactccgaacggctcaaggcagtacagctcctccgcttgtcccatcgttatgtccgcgggagaaagctcgcattccgcttcaagcgtggtctttcgttctattcccttgaagctctcccttgcgcagtcgttcagtcttctcttgaattcggggagattctctcgttttattgtaagtccggctgcaagctcgtgtccgccgaatttttcaagcaaatcggagcattcggacagcgcgtctacaaggttcagtccctttacgcttcttcccgagcctttgccgaagtcttctccgctcttttcactgccgtttccttcaaatgagatcagtatcgacggacatgcgtatttttcggttattcttgacgccactatgcctatgattccgtggtgccattcttcatcgtcgagaataattatcgggtcgcgctcgaaatcatgctctgcgtcaatgcgtgcgtatgcctggtcgacgattttgttttcctcgttctgtctttcgcggttgatgtcgcacagttttttcgcgatgggagcggcagtttcgcagtcctcagccaaaaacagcttcacggcaatagacgcgtcgcttattcttccggcggcatttatcctcggcgctatcgtatatcctatgaacgaggtggtaatttttcgcttagtttgatattttgagtcgcttcttgtggcttcgataagctcaataagtccggggcgggtcgtgttctcgataagggacagcccgtagcttacgataaggcggttttcgtcgtttatcggcatgacgtccgcgattgttcctatagcgacaagatcaccgtattcggctgagattcgccttacgcagtctatcatttcgtcctcgggattcatgacggattcgacggcgcacatcagcttgaacacaactccgactccggcaagctctttgaaaggataggggcagtcgggtcttcgcgggttcactacggcttctgcgtccggcagctctccatggcactcgtgatggtcggtcactatgatatccatgccgagctgtctcgcaagttccgcctcagccaccgccgtaattcccgtatccaccgtgataataaggttgtttccttcttcatggagttttttaactgctgcttccgacacaccgtaaccttctccgaggcggcacgggatatagtacgacacgtcagcgcctttttccttcagatacaggtaaaggctgcttaccgatgtcactccgtcaacgtcatagtcgccgtagataacgattttgtctccgttttcaatgccttcgatgattctgtacgcggcattgtccatgtcgagcatcataaaggggtcgtgcagctgttcttcctctttagtgagaaaggcttttgcttctgtcggggtcatgcatccgcggttcacgagaagctgggctgtcggcagtttgattccgagtttgtttgctatttcgttcactatcgggctgttccgcattttctcctgcgttgcttgaacaagccacttattcttgtattgcatcagtattctctcttatatattaaaaaattattttattcgtcagcgtttttcttgatttccactattttaatatcttttttcttgttctttcgcgttctgtcaaaaacagctattccggcaaagcaaagtacaaatcctgccgccgcaccgataactcccgcgctctctgtaccgaatatactgtaggttatataataaaacaacgcgcagaccgctatcggcagaataaacacaagcgcggcatatgacagaataacaccgctctcgctctcaatctcaaccgtatctccaacctttgcgccgagcttgttttcgacttcggcacgcatttttccccttgacgcgacaagtcccgtgatttcgcaatgcccgccgcagccgcctcccttggcacatccgtcgcacattgtacgtctgcttgtttctaccgtggcgtattcgccgtgtacttcaacaacaaccgctctctgccgcattgcacactcactttcgtttaggaagcctctgttccttagtatggtttatatctcgttataatcttcgacgcaactctcagtccgtcgacagccgcgctcactattcctccggcatagcctgctccctcgccgcacgggtatattccgtcgtgtccgagagcgcacaggttttctccgcggattattctcaccggtgacgatgttcttgtctcaactcccgtgaggggaacatcgggcgcgtcgtagccttttatctttttgccgaaattaacaagacccgctctcagcatctccataacaaacggcgggaacagctttgaaaaatcggcgcatctcacctttccgccgcggtatgacgggactattctcttgtattccgtgccgcttttgccggaaataaggtcgccgagagtctgcatgggagcgtagtagtcctcgccgcctgcaaaaaacgcacgcttttcgagatttctctgaaattctatcgcggacagcgggttattgccgtaatcctccggctttaccgatacacacacggcggcgtttgcgttcttcccgtctcttgcatggcggctcattccgtttgtcaccactccgccctcttcgcttgccgacggaaccacttcaccgcccggacacatacaaaaggtgtagcatcctctgtctccctgacgccacgaaagctggtattccgcgtgtccgagctgactgtctcccgcgtgagcaccgtacattgcagtatcaatatcgctttgcaaatgttctgcgcgcactcctacggaaaacggttttgcttcgaccgagaatcccgctccgataagctccgaatacgtgtccctcgcgctgtgtccgcaggctaaaatgacagctccgcacggaattctctctccgtttaccgtgaccgagcttgacgtgatgttctccgctttggacttatatcttatctcgccgccgagccttgttatctctttgtccgcgttttcgactaccttgcgcagtatatcagttccgatatgcggttttgctttgtacataatgtcgtcaggcgcaccgagctgatgaagcatatcgagcacatacataatcagcggatcgtttattcttgtggtgagcttgccgtcggagaatgttcccgcaccgcccgcgccgaactgtatgtttgtagaggtatcgagcacgccgaatttgatgaagttctcgaccgcttccactctttccgcaactgacgctcccctctcgagaatcagcggcttatatccgtatcttgcgagaagaagccccgcgaacattccggcaggtccgaagcctattatcacgggtctttccgtcaggctctcgtctccgcattcaagctcaaaggagggcgcggagtattccttgatatcgggggaagaaatgacgcatgaagtctcgacctccgcgtaaacgctgtatacgaaagaaatatcacgccgcgcgtctatggattttttcgatattttaaggtttgttggcgtacatcccgtttctttttttatcaactgcgcggctttatgtacagcctcggcttcatagtcgcatccgccgtttttgtactgtactctcacgccgctgacgagcagttttttgttttctttcatacaagcgtccttagtttatttaaaaaatgttaccgaaatttcgtagtatcctatcgcgagaagctcatccttgtagtcggagtcaattataacctcggctctgacctccgtggttcccgtgtttgtttcggaatacgggctcatgtcgaatctgagcgtaatgtcgtctgcgctgagtgaagacactgcttcaagactgcctatcacgctaactgttaccggagtatgatcccatgtatagcttactccggtctttcctccggtgtcaatgatatttttgccggggactgttatcttgcgcagcttgattgaagaggacgggactgatactatctcgaccgtatctgtgtcaagctccacgccgtccactgctttaagcgcgacctttttcgtacatttcagctcgtcgcttcctgtggtaagatagtcgtttgcttcatcgatttccacgcgctcgatgaggtttccggcgtctattatctccggctctcccgttacgcggactgtggaaggtgttaccgtggtgtatgtgttgtcgtagttaaagaatccgtttttgaatacgacctctatcggcacttccgctgatttcagtacgggaatatccaccgtgacctcctgcggatagtatttcacatacgggctttctattttgtttccgtaggcgtcgacaaggtacacgcgctgagttacagtcaccgactttgttatgccgttcatgtcgttgtcaaatcttgcctcggctatccttgacactattttctcaggtccttcgactgttatcatgtcaacgggaaagtcaattgcgccgacgtagcatccttcggggaggtttgtgttgtctctcttctccgtcagttttacggaagccgttgaagcagtgtcgacatacacggatatcgtctcctgcgacaggcttatgagcttgcatcccgccggaacgtcaacgcttagcttgcagtcgtatcttccgcttccgcccgttattttgccgacgtccgccgttacaacgatatcgctgtcacttagctttgagactatgctctttttgcccgagactgtcacaccgaccatgtttccgtatccgctgtagagcataagcccgctgtcggagacgagtgaatccgtgttgataagctccacagtgacgttgccgaaggtctgctcatattcgggactttcaaccgtcatgacgtatatccaaaggcagaacgccgcgaaaacgcacagtatctttacggcaacgttcgtgcggttgtagccgattgatgagctgtcatcgttctttttcttatttttcatatttatctgagccataactgcacctttctcctgtcgtgcgggaatcacttattcttttgctgaaggcggcgcaccttatccatgaggctgtttttcttttcgtcttcacggtctccgagaagctctgcgcgaaggaatttcgtaaggctttcacgcgtgtagtttctcacgagctttccctctaccgctgtggatataactcccgtttcctcagagacgataattaccacggcgtcgctgttttcgctcattcctattccggctctgtgtcgcgttccgaggtcttttatgatatccggattgttggagagcggaagaagacatcctgcggcgagaagtctgaaatcacggacgataagcgcgccgtcatgcataggagctttattgaagaatatgttctttatcagaaaagaggcggggtatgcgtcgataactgttcccgttaaaatcatgtcgccgagctttatgtctctctcgaacacgatgagcgcgcctgtcttggagtctcccatgtcgccgaccgcggaaactatctcgtcaatgaccttttcgcggtacgactgatcctttgtttcgctgatgcttctcagtccctttataggagttgttccgaccttttcaagcaccgagcgaatctccggctgaaagagtatcacaagggttataaatcctatctggaatatgttctgcatgatgtactgcatgagatacatatcaagaagcttcgatattatctggataacaaacagtagaagaactccgaccgcgagctttcccgcacgtttgtctctgatgaatttatagagataataaagaagcacggacacgcaggctatatctataacatcgacaaaggatatcgtttttattatgtttattacatcggttatctgttccggaagaacggcggcaacggtattcatgctaacgcctcctctatataataaagtaaacttttaaaaatcacgtttgagtatgagcttatagttaatcaaattatattatatcatacacatttctttttttcaaatactttctcggcaaatcattgtattattatgttaatttttcgtcacgggcaggattacattgttaaaaattaaattataaatatatgt

SEQ ID NO: 3622 - DNA, 32759 bp, Unknown
  16S sequences of unknown bacteria
ctatctggacgggaacgactggcatgcccgccgtaaaatgcacgtggcgtcctgtttggcgggattggctttcaattccgcgtctttggggcttaaccacggcatggcgcatcagttgggcgcgaatttccatattccgcacggccgcgcgaatgcaatgcttttgccgcacgtcatcgaatacaacagcggcatcaacgtacattcgagaatgcagaaacaatatcccaagcaggtggaaaaatacgtttcgctcgcccgccttctgggacttcagaacttcaacacgatcacaacggtgcgcgcgctcgtcaactgggtacaatttatggataaggaaatgaatattcctctgtctatctctcagatgggaaacatcaccgagagcgaataccgcgaaaaaattccagccatggcggacgctgcgcttgcagacgcctgcacggcgaccaatcccaaagtgcctaccaaagcggacgtcatcgaaatatacgaagacctttggtaaaagtaaacgttaaggagagaacggtatgaaagtgttagccttcgatttcggcgcatccagcggaagggcgatcctcggagagtttgacggcaagaagatcgaactgaaagagatccatcgctttttgaacgaacccgtggagatcaacggcgccctgtattgggacatcctgcgtctgtatcacgaactgaaacagggcattttaaaggcggaccgcctcggcggtgccgacagtatgggcattgatacctggggcgtggacatcggctttatcggcaaagacggacaacttcttgcgaatcctttccattacagaagcccgcacaccgaacacgctgtcgaggaattggaaagcaagatgagccgcgaggaactcttcgcggaggctggattggcttttcaaaagttcaatacgctgtgccaactcgtcgtcatgcagaaaaacggcaacgtcgcgttggaaaacgccgaaagcgcgctgtttattcccgacttattcacttattttctgacgggcaaaaaaatctgcgagttttccattgctagtacttcgcagttgatcgttccgggaaaaaatcagttcagcgaaaaaatctttcagacgttcgggcttaaaaatattttccccgaaatcgtatcgcccggaaagatcgtcggcgacgtcaaagaagacgtcaaaaacgaactggatcttcgtcacgatctgaaagtcatcgccacgtgcgggcatgacactgcctccgcctacctcgccgttcccaaggatagcgaaaattccgtatttttatcgagtggtacctggtctttgctcggcatggaactcgacgagccgattttgagcaaagaggccatggatgcaggctataccaacgagggcgggctgaataattccattcgttttctgaaaaatatcatgggactctggatcatccaggaatgcaaacgcacctgggataaagagggcaacgtcatgtcatttgccgagatcgcggacggcgcgtccaagatcgaaccctgtaaattcttgatcaatcccgatgcggacgaattctattcgccgcacgatatgcccgataaaatcgtcaatttctgcaaaaagacggggggaaacgttccttcgaatcctttcgagatcgcgcgctgcgtgtacgattcgctcgcgctcgcttacaaacacaacgttcttgcgctcgaaaagatcacgggcaaaaaagtcgacgtgttacatatcgtcggaggcggcagcaacaataccatgctgaacgtcgcgaccgccaatgcgctcgggatccgcgtgaccgcgggccccggggaagggaccgctctcggcaatattttgtgtcaactcattgcactcggcaaggtgaaggacgcaaaagaagcgcgcgagatcgtcaaaaattctaccgaaatcaaagagtttttgccttccgattgcgcggtttatgaaaatgcttacaaattgtttcttacaatactctaactgcaaaacgaaagcggcggcgctgtaaagcgtccgccgctttcgttatataaaaaaggagccgtttttacggctccttttttatttatcgtttactttttcctgttgtcggtaagcgtgcggcgtcatgttttccacgtttttaaacgttttgataaaagaattaatctccacatatcctgcgcgtaaggcaatttcgccgatgggaagttcggtcgtccttaacagttctttggaaaaatcaatgcgcttttgaatgatatatttcaaaggcgaaacgccactatattccttgaaaaggtgcgtcagataaaagcggctgatatacagactgctgcaaatgtcgtctatacttctgatatcggcgtaattttcgtcgataaattttttcgcctgcatatacgattcgttggtcttgaaatagttcttatctccgtaggcgagaatgcggagtatatggctcagaatcgctttgacaaggctgtcggaaatgtcgtcgtaataatagagttttcgttcggcttccgaaaccaattgcgaaaaataaaattccagcacgggcgccgtatttcccgtatgtatgacaggggacgcgcttttttccaaaagataattttcgggaaggttttccaactttatcttatgtacgccgaaaaaataaaaggacaaatcgtttcccgattcataatgaactacatgcgggttgtaaacgagaatatcgccggcattgatctctaaattactcccttggaagtgcacggtaccgttccccgaacggacgtagagtatttcgcaaaattcatgctcatgaggctgttcgttccagtttaccgtccgtttcaactcgcccgcatataaaattttcggccgcaatatctgcgcgctgctcttgttgaacattaggtgttttctgatttcgctgttcttacgatggatcatgttactcatggaaatattatatcatatccttttgttaaaatctatacttttatgaaaaaatcatacttttttgctcttatttttcagcaaaaacgagtgttgaaaagcggtattttttatgatactattaaatcagtaatacaaggggtggaaacagagatggaacaggaatttcttcttgaaatgaacggtatcgacaagcgtttcctcggcgttcacgctctcaaaggcgtcaatctcaatctgaaaagaggagaggtattggcgcttgtcggcgagaacggcgcgggaaagtccacgttgatgaaagtcctgaccgggattcatcagccggacggcggctcgatgacgttcgaagggaaaccctattcggttcgcaatatccgcgaatcgctggaactgggtatcgggatgattcatcaggaactgaatatgatgaaccacctgacggtagcgcaaaatatttttatcggtcgggaaagcatggttgcagatttctggatcaacgacggcgccatgatcaaaaaggcgcgcgaacttttcgactatatcggtatcaatatcgatcctactgtaaaactcggttccctgacggtagggaaacagcagatggtggaaattgcaaaagcagtatcgcataatacgaaattgttgatattggacgagcctacggcggcgcttacgcagtcggaaattgaggaattgttcaagatcatgggcgatctgaaagccaaagggatcggaatgatctatatttctcaccgcatggacgagatcaagcgtatatccgacagggtcaccgtcatgcgtgacggcgaatatgtgggcacggaagatacggataaactcacaaaagatcagatcatccaaatgatgatcgggcgcgtagtctacgaggatcccaaacaaaagagcaacgttgcggacgatgccgaggtggtgctggaagtcaaaaatctttgcagcggcaataccattaaaaacgtaagttttaaactgagaaaaggtgagatcctcggcttttcgggcttaatgggagcgggaaggacggaagtcgcccgtgcggtttttggggcggatcctttcgacgccggcgagatttttataaagggacagcgcgtacatatcaagacgcccgccgatgcagtcaggcacggaatcggttatctttccgaagacaggaagcgctacggtctgatgctcattaaatcggttgcggaaaacacggcgctcgcatccctggaccgctatatcaaatacggatttatcagcgacagaaaaatgaagaatgaggcgcgtgacatgaacgcgaaactgcgcacgaaaacgccgtcgatggatcaactgttgaaaaatctttcaggcggcaatcagcaaaaagtcatcattgcccgctggctgatcaaaaacagcgatattctgattttcgacgaaccgacacgcggaatcgatgtaggcgcgaaaagcgagatttacgctttgatgtccgaacttgcggcgcaggggaaatcgatcattatgatttcttcggaactggtagaaattttgcgtatgtccgatcgggtactcgtcatgtgcgaaggcagaaaaacgggcgaactcgatatttcggaagccaatcaggaaaacatcatgcaattatcgacaatgagggaggaagtaagttatggcaaagaaatcagttagcgaatacacggtcgccttgaacctgcgaggaagaacccgccagttcggggtaaaatccgtcaataatttgaaatccagcggcaaacaaagttttatgatcattttggtcacgttggtgctctttgctctttttacggttatcaatagtagttatgcaagcaccgataatttgcttgcgatggtcaagtctttggttccttacgcgattttaggtttaggcgtaactttcgtgattgccacaggcggtatcgatttgtccatcggcacggttttgattgcctcgtcggtgatggcgggtacgatctgccgcactacgacttccgtcacggcggcattggcggtaaccataccgttaatggtaatcttcggtctgctattcggtatcttgaacggatttttggtagctaaattgaaattgcctccgttcattgcaacgcttggtacgatgatgttatcccgtggcgtttcggcagttttagcaaatatcgtcaacaaaacttcatccgcaatcaaatatccgtctacaggttggttccaaagtgtttttacaaacttaaacggttttcctatcggtattatctggcttttagcgctaaccttggtgtgtatgtatctaatgtataaatgcaaggtcggaagatatattcttgcaatcggtagtaatgaggaagcggcgcggctttcgggtattaacgtagatttttataaaatgatcgcttatgcgattgcgggcttatttgccggtatagcggcgcttttttacacggcggcaaatccgtcattgtcgctcgctagcggcaacggtatggaactagatgcgattgcaggcgtctatatcggcggaacgagtacgaccggaggcatcgcttccatcgtcggaacgatcttcggcgcgatgatcttggtcgtcattcgtcaaggtttaaatttcacgttggcagtattcaacagcggtgtcagttctacgttcatcacctatgcggtgaccggtatcatcgtcgtgtttgccgtgttgatggatatcttcaaaaataaagcggcgaataaggtcaagatcaatgaatctgcgtcaaaatgcaaatcgaggttccgcgaagttgtggaagaacttcgcgtgaaacaagattacatcttatccgataaacggctatctccggaagataaaaaatcaaaatgtgctgcgatcgatgtgcagatcgccgaattgaaagaagttttcgtagaggagtatgcaaagtgcaaggtagcggatcaggaaaattctcagcgtttgaaagagagccgaatgaaagcaaaggaggctgcgaaagcggaaaaattgaacaaaattaaataataacgcgaaagcgatattaaaaaatccttaaggaggaaaacatgaagaaatttttcaaaagggtgttgtgcgctgtcttcgctatggcattggtcggcgcgctggtagtaggaatggtcggctgcggcgaagcaaagcaaaccatcgctgtcgttgcgaaaggcgaaacgcacgctttctggcagagcgtaaagaacggtgcgcaagccgcaggcgaaaaatacggttatgcgatcacattccgcgggcctacggcagagtcggaagagcatgtaaacactcagcgtgaaatggtcacgcaagcgctcaataacaagaataccaaagctttggtattggcgacgatcgggctgggattcaaagacgaattggtatcggctttcgataaaggaatccccgttgttgaattcgacagcggtctgtacagcaacggagcagatattacaaaggataaagatcccacagtttcgtcggttgcctccgataactatgctgcggctggcgtagcggcagaaaatttatacaagacaatcaaacccgaaattgaaaaagccaccgcttccgataagtattatgtttggataattcagcacgatagttcggcgactggcgtagacagagcaaaaggtttcgaagacaagattaaagaattggtcgaaaaagataacttatctgatcgtttccagacaaaaattgacgtaaaagcaaacaatacaggcgagtataaaggctctttacaagcagcacagaccgaaggcgccgatgcgatatttatgtgcaatgaaggcgttgtgaacgagtgctatcccgaagttgccgacaacgttgcaaaatacaaagatatggttttctgcggatttgatgcgggtaccaaccaaatagaatggatcaaaggaaaagttgcaggtgcggctaaattggtcggctccgtggcgcaggattcataccagatcggttatcaagcagttgaacaggctgtgttcgcagtcgaaaagaaaaatgttacaaaagaagtcggtatccccggaacttggtatgattcgacgaatattgatgaaatgattgcgaaaaacatcgtgtacgaaggttaaagtttaaaataaattttctttaatctccaattaaagatttaataagcggggttttcccccggaaaaccccgcttatataaaatctaacagaatcaagagggaatgaatatgttgaaaggcgttccgaaaattttatcgccggagttgttgaaaattttgtcagagatgggacacggcgacgaaatcgtcattgcagatgggaattttccttccgaaaactacggaaacagagttgtgagagcagacgggcatggcggggcggagatcctcgatgccgttttgagcatgatcccgctcgacacttatgcggattgcaatttcatgctcatgcaggtcgtgccgggagatagggtaaaaccgacgatctgggaagattataaaaagatcgcgaacgaaaaagacggtcacgtaaaattgggcagtttagagcggttcgcgttttatgaaagggcaaaacaagcgtatgccgtcatcgcgacgggcgaaagcgctatttatgcaaatataattttaaaaaaaggagtgattcagtaatatgaaaccgaagatcggaattcggccgaccattgacggaagatggttcggtatccgcgaaagtctggaagaacagaccatgaatatggcaaaaaatgcaaagaaactgatagaagaaaacgtcttttattcggacggaacgcccgcgcaggtcgtcatcagcgaatgcacgatcggcggaggcgccgaggctgcgcgctgcgccgatcagttttccaaagaaaacgtgaccgcgactctgacggtgacgccttgctggtgctacggcagcgaaacaatggatttggacccgcttacgacgaaagcggtttggggattcaacggcacggagcgccccggcgccgtatatttagcggcggtcatggccgcgcatgcgcagaggggacttcccgcattcgcgatctacggacaggacgtacaggacgccgacatgacgggcattacacccgacgtggaggagaagatcatccgctttgcccgctgcgcgctcgccgtcggacagatgcgcaataaggcgtacgtgaatatcggttccatcgctatggggatcggcggcagtttctgcgatgcgaacgcattgcaaaaatatttcgggatccgcgccgagtgggtggatatgagcgagatcctgcgccgcatggatctggggatctacgataaaaaagaatacgaaaaagaactgaaatggatcaaagcaaactgcaaagagggtaaggattggaacggcgaggcattcggtttcaaagactttaccaaagaagagcgcgaggcgcagtgggaatttgtcgcgaaaatgacgctcatcgtcaaagacatcatgcttggcaatcccaaattggacgagatcggctggcatgaagaggcgctcggcagaaacgcgatcctgggcggtttccaggggcagcggatgtggacggattataagcccaacggcgactttaccgaggcgattttgaacagcacgttcgactggaacggaaagcgcgaaccgatcacgctggcgacggaaaacgacggctgcaacggtcttgcgatgctcttcgggaaattattgacgggccgcacctcgatctttgcggacgtgaggacgttttggagccccgccgccgtcgagcgcgttacgggttggaaacccgagggacttgcggaaaacgggtttatgcaccttatcaacagcggcgccgccgcccttgacggtacgggcgcaagtaaagatgaaaacggaaattccgtcatgaaagagtggtggaacgtgaccgagaaagatatcgacgcgatgctcgcggcaaccgagttttccagtgcgaaccgcggttacttccgcggaggcggctattcttcttccttctcgacgcagggggaaatgcccgtcacgatggtacgaatcaatcttgtggacggtatcggctacgtgatgcaactcgcggaaggctggacggtggaacttcccgaacaggtcaatcataaactcttgtaccgtacggacagaacgtggccttctacctggttcgtgcctcgtcttaacgatacgaacgctttttccagcgtctacaacgtcatggcgaactggggcgcaaatcacggcgcgttcgtctacggtcatgtggggaaagacctgatcacgctcgccagtatgctgcgcatccccgtatctcttcataacgtagcggaaaaggacatctaccgtccgcacgcttggagcgcgttcggtaccaaagatgcggaaggggcggatttcagagcctgcgctcactatagggaactgtataagtaacccatttctaacacccttgggaaaggcgcggtttcagccgcgccttttcgctttttcggcacaaacggaaacagaaggcgcatagatatgtaaagaggaaattctacaaaggagaaacgttttggagtggttttcatctttacaaccctggctgcaatcgctgctggcaacgatctttacatacggcatgacggcggcaggcgccgcgctcgtattcttttctaaaaaattcaatcaaagagttttaacggttatgatgggacttgcgggcggcattatgatcgccgcaagttttttttctcttctgatgcctgcgatagaaaattgtgaaagcacgggacgcagtcccgcgcccatactgaccatcggttttttggcgggcggcgctttcatcgtggtatcggatatcgtaatgaatcgtatgaacacttttaaaaacgcgcggagcaagagcggctttctattgaccgccgccgtgactctgcataatattcccgaagggctcgccgtgggcgtggcgttcggctcggtcgtcgcgggcacgcagtcctcgctgattgcggcagtcatgctcgctgtcggcatcggaattcaaaatttccccgaagggctgtgcatttcgctgccgctgagaaatcagggcatgtcgatcggaaaagccttttttatcggtcagatgtcgggcgcggtcgagatcgtggcgggcattatcggcgtatttgcggtagccgccgtttccgcgctgctgccctgggcgcttgctttttccgcgggggcaatgatcgccgtcgtctgttccgaactgattcccgcaagttttgccgaatcgaaatcttcggcttccatcggcgtgatgctcggttttgcgctcatgatgtttttggacgtgtttttgggctgagggtataaaatttctgcggaaatgcaatacttgtgtatgatatggaacagaaaaaaaagaccgtcaaagcagaacagaccgaaacttcctttcgggaagcgttaaaggaaaagtttcccgaatccgaaagcgaacgaaaactcgccgttatcgtgggtgcctcgtcgggtataggatacgaaacggcaatcaaactcatcggcagaaattaccgtatcgtcaatatttcccgcacgacgtgccgcctcgaacaggtcgcgaattaccttgcggacgtatccgaggccgacgatatggaaaaggggatactggagatcggcgctgctatgaaaaatatcgacgcgctcgtatactgcgcgggattttcgatggctgcgcccattgaaaaggctgaatcggaagacgtccgttatctcttcgaagtcaactttttcggggcgctgcgcgcgatacaggcggccgttccctttatgaaagaaaacggcggcaggatcgttctcgtaagttcgatggggggcatccttcccattgcgtttgactgtttttacagttgttccaaggcggctttgaatatgctcgccaagagcgcgaattccgagttgggagaattcaatatccgtgcgacggcggtccttcccggcggcacggcgacgacttttacctttaagagaaaagtgtatggcgccgccgcctgcggggaatacgcatcgagggtggagcaggcggcgtcttctcttgcggatatggaacaggacggcatgagtgcgggagaggtcgcaaaggtgatcgtcggttgtctggaaaacaagaacccgcccgtcgtcgtgcactgcggggcgatgaataaaatgtatgcggccgcagagagaatcttaccgaataaagcgacgctttatctcaatgatcgcaaatatttttcctgatacgaagtactttgcgtgacataaatgaaaagaacagggcttttgacaagccctgttctcttttttgtcatacgatcaggttgaccaacctgtcgggcacgataatcacttttttgacgactttgccttctaaaagggggcgtatcgcgtcgctctgcatcaccgcgtgctgaatatcttctttgctcatatctttcgagagcatcattttggtcttcattttgctgttgatctgaatggcgtattccgtttcgtcccgaacgagcgcgctttcgtcgcatacggggaatgcctggtcgaatactgaatatctgaagccgcactgttcccaaagttcttcggcaaaatgcggggcgaaaggagcgagcaaaagcaacagatctttggaagtttctttgagcaggggcacgtttttgacttgattgttgtcgtatttgaagagcgcgttcacaagttccatcaaccgcgcgaccgctgtgttaaaggagaaattctccatatctttggtgatctgtttgatcgcgtaattcttcgcgtaggcgagttctttttcatcggcgccgtagggggcttctttgcccgctttcatgtcgcgtatcttcaaaacgatgcgttccactctgtcgagaaattttgcgaccgatttgatgccgtcgtcgttccatggtccgccctccgtataggaaaagccgaacatcagatacattctgaaaacgtccgaaccgtaagcgttcacgaactcgtcgggggaaaccacgttacctttggatttgctcatgcggttgccgtcgggaccgaggatcacgccctgatgcacgagcgatttgaaaggctcatcgaaattcagataacccatatcgcgcagcgctttggtaaagaagcgggcgtacaaaaggtgcatgcaggcgtgttccgcgccgcccacgtacttatcgacgggaagcatcttgttgacgatctcgggatcgaagggcatctttgtgttgtgcgcgtcgggatagcgaagataataccaactcgaacagacgaacgtgtccagggtgtcgggatcccgctgcgcgtcgccgccgcagtgcgggcatttgacgtgcatgaattcttcgctctttgcaagcggcgatttgccgtcggggttaaattccacgttatagggaagtttgacgggcagatctttatagggcacgggcacgatcccgcatttcgggcagtgcacgacgggaatgggcgcgccccagtagcgttgccgggaaaccagccagtcgcggagacggtagttgacttttttctgtcctttgccctgtttggcgagataattggcgatctcgtttctcgcgtcctcgccgaaacgcccgtcgaattgcaggctgttgacgcagatgccgtcctcgcagaaggggagcaccgtttcgcccgctttgttttcgatgacttttgtgacgggaagattatatttctgcgcgaaagcgaaatctctctcgtcgtgcgcgggaacgcccatcaccgcgcccgtaccgtaggaatacagcacgtaatcggcggcgaaaatcggcacttttttgccgttgatggggttgatcgcgtaatgtccgataaatacgcccgtcttttcgcgggtagaggacaagcgctcgatctcgttcgcctttgcggtttccgcaacgtacgcttcgaccgcctctctctgttcgtcggaaacgagttttttcacgagggggtgttcgggcgctaaaacgacgtaggaaacgccgaatatggtgtcgcagcgggtggtgaacacgttgaacttgtcgccgctctcgcattcgaactggacttcgcagcccacagatttgccgatccagtttttctgcatcagtttggtcttttcgggccaatcgacggtatcgagcccctgcaagagttcttccgcataatcggtgatcttaaaaaaccattgcgtaagattctttctgacgacgggggagttgcagcgttcgcagcagccgtccacgacctgttcgttggcgagcacggtattgcagtcggggcaccagttcacgggcgcctccttgcggtacgcgaggccgttttcatacagtttcaaaaacatccactgcgtccatttgtaataatcttcgtcgcaggtcttgacctccgcagaccaatcaaacatggcgccgatggcttttagttgtttttccatggtctcgatattcttttccgtggaatctttgggatggatcttcgtcttgatcgcatagttttcggcaggcagcccgaacgcgtcgaagcccatcggctgaaacacttcaaaaccctgcattttcttgaatctggcataactatcgctcgggccgtaattataccagtgcccgatatgcagtttcgcgccggaagggtacgaaaacatttccagaacgtagtattttttatccgcgttctttttgttgaaaacattttctttggatttctcccagcgctgctgccatttgctttcgacggatttcatatccataataaaaaaacatcctccaagcgcacaaagcgcatcaatttttcttcttaacgcatcggtagacgaggtaggtcaaaggcccgatgacgggaatcagcaaaatcacgagattccacggcagaatgccttttacgagtcccttgtctttgaggagcagatagaccgtaaatattgccagaaaatagtggacgaccaataatatgatcagcgcaagcaaaagcggcttcataaattcggtttcctccccgtcggttttcatttgattatatattgttttgcttttttagtcaagtttaagagcgctttttgccgaaaaaattaaaaatccgcgcagaatcggtttttgatgcaaataaaaagagggttagtgcatagactataattatggtaaaaataaccgtttcagaaagcaattcgaaaaatttgaacgtggcttatatttacaattccatgacgcgctatttgagcatctgcggcgccgatgcggacatcaccttcgacgattcgcgcaccaacctcgtgatgacggcggaaaaccgctttcattcttaccttcgcaaatttaccgaagagagggtggctgaatccgtcgccatcggctataagtacgcgctgtttcagaagaatatccgaccttcgggtttatccgaaacggacagggaagtacttctttgcgcgctcgtgagcgcggatttcgacgaggataaacgatatgtcgccgagcggctcaaagatatccgcgtctattccatcgacggtttttttaatttccgtctgcaggcgctcaaagaaaaatgggcgggcatcatcgactgcatcccgtgctgctttaccgagcgcgatctgaaagatttcctcgattatattctttccgagcgcgagccttcgatcgtgcatttcaaggacggggaactctatgacgcagactacgtgcgacttaaacgcgcggcgctcatcgacgggggcctggacgacttttccatcgtgcgggaagtgcttttgagcggcgcgacggaagtggagtgtctgaccaatccgccgcccgtcttatgcgacgtgctcaaaaaatatttcggaagccgcaccgcgttccgtttcagttgaaaaattttaaaaagatccgcgaaatatcttgacaaaccgcgcgaaagcgcgtaaaatcatactatattcaatttgcttaaaaagacaagtagcggctttacacacggaaccaagagagcgggatctcggctgaaaatcccgtttccgtcaaggcgcgcgaaaccgctttgtatgcaacgggcgcggcgccgcactgccgcaggaaagaggccgaaaattttttcggcaattaaggtggaaccgcgcaatttcagcgtccttaaacgtttttgtttaaggacgtttttttattcggtacggaggtaaaatttatggaaatcacattgaaaaacggagacaaaaaacatttcgacaaggcggcgtcctgcaaggatatcgcgctttccatcagcgaggggcttgcccgcgcggcggtctgcgcgaaggtggacggcacgctcgtggacctgagcgccgtcgtcgatcgcgactgcgaattcgagatcgtcacgctcaaagataaagaggggctggaagtgtatcgtcacactgcgtcgcatgtgctcgcgcaggcggtcaaagcgatcttccctacctgtaaacttgcgatcgggccgaccatcgaaaacggattttattacgatatcgattttaccacgcccatctcgcaggaggacctcggcaagatcgaagaggaaatgaaaaagatcatcaagagcaattttgccctggaacgctttacgctgccccgcgcggaggcgatcaaactcatgaccaaatattcggaaaagtataaggtcgaactcattaaagaccttcccgaggacgcggagatctctttctacaaacaggggagtttcaccgacctctgccgcgggccgcatcttccgagcacgggcaagatcaaggcgtttaaactcaccagtattgcgggcgcttactggcgcggcaacgaaaaaaataaaatgctcacgcgtatctacggcaccgcttttgcgaaaaaggacgagatggacgcgtatttcaccatgctggaagaggcgaagaaacgcgaccatacgaaactcggcaaagaattgggactgttcgcgctcctgaacgaggggaaaggctttcctttctttttgcccaaaggcatggtgctgaaaaaccttctcattgactattggcgccaactgcacctccgcgaaggatatgtggaagtgagtacgcccgtcattctgaacaggagcctttgggaaacttccggacattgggaccattacaaggacaatatgtacaccacgaagatcgacggggaggactgcgcgatcaaaccgatgaactgtcccggcggtatgctcgtatacaaacttacgccgcacagttataaagatcttcccatccgcatgggcgaactcggacttgtgcaccgccacgaaaagagcgggcagttgcacgggctcatgcgcgtgcgctgtttcacgcaggatgacgcgcatattttcatgctgccctcccagatcaaggacgagatcaagggcgtagtcaaactcatcaacgaagtttatacgctgttcggctttaaatatcatgtggaattgtccacccgtcccgcggacagcatgggtacggaagaagactggaacaaggccacggaggcgctttccgacgcgctgaaagacatgaatcttccctttgtcgtcaacgagggcgatggcgcgttctacggcccgaagatcgatttccatctggaagattccatcggcagaacgtggcagtgcggcaccattcagttggatttccagatgccgcagcgtttcgaactcgaatacacgggcgaggacggacagaaataccgcccgatcatgatccatcgcgtggtgttcggttccatcgaacgttttatcgggattctgatcgagcatttcgcgggcaagttccccgtatggctcgcgcccgtgcaggtcaagattttgcccgtttccgacaaatctctcgggtatgccagacagttggaaagcgagatgcgcgcgcagggcatccgcgtggagaccgacagccgcaacgaaaaaatcggctacaagatccgcgaggcgcagttggaaaaacttccgtatatgctcatcgtgggggataaagagcgcgaagagggaaccgtttccgtgcgcaagcgcgacgaaggggatatcggcgccctcacaaagaaagactttatcgcgcgcgttttgcaggaaaacgccgataaaacgatcttttaaaaaaactgttcaaaacgattgacaaaaaaaagcgtttctgttaaaataatctaagaaagcagaagttacttctcgccttacggcaattgcgttgtaagtgctcaaattattacagaatacaggcgcatattgcgtacttttaggtaatttgaagcgggttgtgacttacgacccgctttttttatcaaaattatttcaataaggaaggtacatcaatatcaaagaccagcatcaaatcaactcggatattcgcgacgcggaagtgagagtaatcggtggggacgggcagcagctcggtatcatgagttcttcggctgcgctcaggcttgcggaggagagcgaaatggatttagtcaagatctcgcctacggcaaatccgcccgtatgcaagatcatggattacggcaaattcaagttcgaactcgccaaaaaagaaaaggaatcgcgaaaaaatcagaagatggttgaactgaaagaagttcaactttccatgacgatcgacacaaacgatttgaatgtaaaggcccgccaggcgcaaaagtttttggacggcggaaacaaagtgaaggttgccatcaaaatgcgcggcagacagaacgcgcacgcggtactcggctttgaggttatgaataaatttttcgacatcttaaacggcgccgttatggacaaaaaacccgcggtagagggaagaaccataaccatgtttttgtcgccgtctaagcaataaaacagtcatcacgacgtccgcaaaagtcaaggacaagcattttgcggaaaaaataattttcggaggatacaactatgcctaaacagaaaacacacagcggctctaaaaaacgtttcgacgtgaccggcagcggcaaggtcaagagagcacagtccggcaaaaatcacaagacgggcgataaacccagaaagagaaagagaaatttgcgtcagacggctttcgtcaacgaaacgatggaatcgaatgttaagaatctgattccttacaagaaataagtataaggagatagtatcatgcgtattaaaagaggtgtaaacgcggttaaaaagcgcagaaaaatattcaaattatccaaaggatatttcggttccaagagtaaatcgtacaggatcgcccgcgaagcggtgatgaaatctttgatgtatgcctacgtcggcagaaagaacagaaaaagagatttccgccaactctggatcgcgcgtatcaacgcggctgctcgcctgaacgggctttcttacagcaagttcatgcacggtttgaaggttgccggtatcaatttgaacagaaaagtcctcgctgacatcgcggtcaacgacgcggcaggttttgccgctcttgccgagaaagcgaaggctgccaacgcttaatcgataaaaagccttcttacgtcagttaggaaggctttttgcatagtataaatatgattacgtcgaaaagcaacccgaccgtaaagagagtcaactctttaaaagagaaaaaatatcgcgccgaatacggcgaatacatcgtagagggcataaagcagatccgcgaagcggtcgccgcagggcaaaagatcgtttccatctattattcgccgcgctatcggggagaactgaccgaacacgaacggtctgtacccgtttcggacgaggtgttcggaaaactttccgaagaagtatcgccgcaggggatactcgccgtgctcgaaatacccgaaaacgcgcccgcagccccgcagggcaacgcgctgtttctggacggcatttccgatcccggaaacctgggcacgatcatccgcaccgcaaacggggcgggctacgccgatatttatctgaaaaactgcacggacccgtacgcgcccaagtgtgtccgttcggcaatgagcggactctttttcgttcgcctgcattttttgagcgaaaacgtttatccgtttttggatgggattcctttcatttgcgcggatatgggcggagaaaacgtgtattcttttcggccgccgcaaaaattcgtgctcgttatcggaaacgaggcgaacggcgtgagcgaggaaatgcggaaagtctgcgaatatacggtcagtatcccgatgcgggaatgctgcgagagcctgaacgcgggcgtttcggcgggtattttgatgtatcatttaaagtacgcgaacaagatcaattaaacaggaggaacagtcatgtcgggacatagcaaatggcacaatatacaggcgaaaaaaggaaagacggacgcggcgcgcgcccgcgtatttaccaaactcggaagagagatttccgttgcggcgaagggcaaccccaaccccgataccaacagcaaactggcggacgcgatcgccaaggcgaaagcgaataatatgcccaacgacaacatcacccgctgtataaaaaaggctgcgggcgaattgggcgccgtgaattatgaaaatcttacctacgagggatacggcgtcggcggcagcgctttgatcatcacaaccctgaccgataataaaaacagaacggtgggcgatatccgcagcacgctttccaagtgcggcggtatgctcggcaacagcggctgcgtttcctatatgttcgacaacaagggattgttggtggtggaaaagacgctggatatggacgaggataccatcaccgaatacgccatcgaggcgggcgcggacgatatcgtgtcgcaggatgacgtgttcgagatttttaccgaccccttgaatttttccgaagtgcgcaaatttttggtggaaaagggcgtcgagtttctggaagcggatatccgcatgatcccgcagaacaagatcacgctgaccgacgaaaatgtggaaatctttttgaaattattggataaactggacgaactggacgacgtgcaggacgtctatcataacgtggatttgcccgaggaagaggacgaagattgatttttcccgattggcaaagtactatgcgtgacacaaaccgtaaaaacgaggtgattttatgacggtacgggaaacttgcctgaaagcaaaagaaaacagcggcgttatcgcgacggcttgcgaaaaggacatgaatgccatgctcgccgcggccgccgtcgcgctgcgcgcgaacgccgaatatattatcggcgaaaataaaaaggacgttgactcctgtacccgcggcgaacagtttaaagaccgcctgatgctggacgaaaagcgcatcgacggcatcgcgcggggattggaaaaactgaccgagatcgaatgccccgtaggagaaattttagaggagcgcacgctgtacaacggtttgaaattgcagcgcgtgcgcgtgcctatgggcgttctcggcatcatttacgaggcgcgccccaacgtcacggcggacgcgatcgccctcgcgatcaagagcggaaacgcagtcgtactgcgcggcagcaaggacgcgtatctttccaacgccgcggtcacgaaagtaatcaaggacgcgattggaaatatcggatacaatgccgaatttattcagttgatcgaggacgtttcgcatgagggagcagcggaactgatgcgtatgaacggcgtcgtggacgttctgatcccgcgcggcagcgcggcgctgattcagaacgccgtgcagaacgcaaccgtacccatcatcgagacgggtacgggaaactgccacgtttatatggagaattccgccgacctttccatggcgctgcccattctgatcaattccaagacgcagcgcacgtcggtgtgcaacgcctgcgaaagcctgcttttggatgaggatttcgcaaagaaacatttggctgagatcgtcgccgctttgaaagaaaagggcgttgagatcgtagcgtgcggccgcagccgtaaaatcgtgcccgaattacaggcggcgagcgaagaggacttctatacggaatttctggatatgaaaatttcaatacgcatcgtggacggcgtggacgacgcgatcgcttgcgtcaaccgttacggcacgcaccattcggataccatcgtcaccaacgacgagcgcgcggcggaaaagtttttgcagggggtagacagcgcggcggtgtactggaacgcgagcacgcgctttaccgacggtttcgaattcgggctcggcgccgagatggggatctccacgcaaaaacttcacgcgcgtggccctatgggattaaaagagttgacttcctataaatacgtggtgcgcggaaacggtcagatccgcggataattttaccagcggaaaaattttcggagccgcatattctcggacaaggtgcagataataatattgtcagcagcggtaaaacaatcggttgtgaagagataagtaatgatagattgaatcaatggtttttattgttttacagttgcttgcatatatattgttgcacggaaaatagtttcgagaaatgatatacattttgaattacctttgcatgatttaaatttttgtaacgtaatttgcagagataattgagattgtatcgagtgtccgaatatataaaaagtgtgacgaaaaaagagggaagacgtagagaaatttatggatttcctctctttttttatgcaaatttttttgcgcgattgtgtttacaagccaattattttgtgctacaatatttgcaatttcattttggaggtgcgaatggcaaaaaagagcaaagcgcagaaacaagtggaaaaaaccgtaaaaaagacgcataaagtgaccgttgttttggcggttctatttttgctcatcggtatagccgcgggcgtcggcgcgtcatggtttttgacgaaagacgatacgttcgaactcaacggcgaaaaggtgatccgtctgacggtgggcgatacgtacgaggaacagggcgcgaaagcgatttccttcgggaaagatatttcttccaaggttcagatctcgggcgacaaacccgatcttgccgtcgcaggcgagtatcagatcgtctataaagtcgatgatttccgttataaagattatcaacttgtgagaagagtgatcgtagaggacgcgggaggagaaaccaatggctaaaaaacaaaaaacgttttctctgcctctcaccatagcggcgtgcctgctcgcgttcgtgatcggcgcggtggcgggtttcgccatgtggacggtctataaaaatcccaagggcggcgacgtgtacgtcagcggcgatctgcaaattcattttatggaactcggaaacaactacacgggcgacagtatctacataaaggctggcgaaacggatattctcatcgacgcgggttcccgcgcgaacagcaccgatgcgacttcggaatatatcgatacgtactgcacggacggcacgctcgaatacgtcattgcgacacacgccgaccaggaccatattgcgggctttgcggggagcaattcctcaccgagcatgttcgaacgctacaaatgcgaaacgatcatcgattttgcactcacgaacaagaccacgcaggtctatcagaattacgtgaaaaagcgcgatgccgcggtcgcacagggcgcgaaacattacaacgccctgcaatgttataagggagaaaacggcgcgcagcgcgtgtacgaactttccgacggcattaaaatggaaattttatatcaggaattctacgaaaacaagtcgagcgatgaaaacaattattccgtgtgccttatgttcaatcagggcgacaagcattttctctttacgggagatctcgaagaggacggtgagatttcgctcgtcgaatccaacgaacttcccaaagtcgaactgttcaaggcgggacaccacggctcgaaaacttcgtccaacgacgttttgctgaaagtcatagagcccgagatcgtatgcgtctgctgctgtgcgggcagtgtggagtacacgcagaattttgaaaacactttccccacgcaggcgatgatagaccgcgtttcgctgtataccgaccgtgtgtacgtgacgaccgtgggcgaggtcgtatataacgcggataaggaaaaatacgaggataacggtttcggtccgctcaacgggaacatcgtagttacctcgaataaaagcggcgtaaacgtgcagtgttcgcacgataacgcggtcctgaaagacacgaaatggttcaaagataaccgaacgatgccgagcgcgtggtcgtaaaagcgtaaaataagcaggaatgacgaaaaatatcgcctacctgctttttttatacgtaaaattcttgataaatcgcccgaaaagtattaaaatagatatgttattcagtagtattaggagatttattttgattcgaaacgatttaagaaacgttgccatcatcgcacacgtggaccacggcaaaacgacgctcgttgatcagatgctgaaacagagcggcacgttcagagaaaatcaggtcgtgcaggaaagagtcatggactcgaatgatctggaaaaagaaagaggcatcaccattctcgcaaaaaacacgtccgtcaactatcacggcgtgaagatcaatatcatcgatactcccgggcacgccgatttcggcggtgaagtggagcgcgtgctgaaaatggtcaacggcgttctcattctcgtggacgcggcggaaggccccatgccgcagacgcgtttcgtcatgcagaaagcgctggaaatgaaccataaactgatcatcgtcgtcaataaggtggacaggcccgacgcgcgtatcgcggaagtcgaggacgaaattttagaacttctgatcgatctgaatgcttcggacgaccaactggaaagccccattctcttctgttcgggccgcgcgggcaccgcgtcgcgttacgccgacaaagacggcaaagatctcaccccgctgttcgataccattttaaaccacgtgccgcccatggaagtgaacgagcgcgcgcctttgcagatcctcgtgtcttccatcgattacaacgaatacgtggggcgcatcggcgtagggcgtatcgagcgcggcaccgccgtcgccaaccaggagatcacggtctgcaattataacgattttaccatgaaaaagcgcggtaaactcgtcaacctgtaccagatagagggactgagccgtacgcccgtacagtcggctgcggcgggcgatatcgtctgtttttcgggactggaaggcatcaacatcggcgataccatctgcgcgaacgactgtgtggaggcggtcaaattcgtcaagatcagcgaaccgaccgtggagatgacgttttccgtaaacgattctccctttgcgggcaaagaggggaaattcgtcaccagccgccatctgcgcgaaaggctgtaccgcgaacttttaaaggacgtttccctgaaagtggaagataccgacaccgcggaggcgttcaaggtgagcggccgcggcgaaatgcacctttccattctcatcgagaccatgcgccgcgaggggtatgagtttcaggtgagcacgcccaaggtcctgttcaagaccatcgacgggcatctctatgagcctgtggagcgactgattgtggacgtccccgaggacagcaccggtcccgtgttccagagcatgggcgagcgcaaaggggaactcgtgcacatgggcgcggtgggttcccgtatgcgcctggaatttatcatccccgcgcgcggactgttcggctataagagcgactttctcacttcgacgaagggcgaaggcgtcatgaactccatattctacgaatatcagccgtataagggcgagttaaagcgccgcgacacaggctctctcgtcgcgtttgaaacgggcgaggcggtttcttacgggctgttcaacgcgcaggacagaggcgttctgttcgtcgatccgggcacgcaggtctatgaagggatggtcgtgggtgtttcccccaaatccgacgacatcaacgtaaacgtctgcaagaaaaagcatatgacgaatacccgcgcttcgggcagcgacgacgcgatgcggctcaactcgcccaaaaagatgagcctggaagaatgcctcgaatttttgaacgacgacgaattattggaagtgacgccccggacgctgcggatccgcaagcggattttggacagcgaacttcgcgccaaagccaaggcgcgcgagaaaaaggcataattctttgtttttcggcatagaataacccgacaagacttcgggggtattttatggaagaaaagacgcaaacagttacgatcgaacagcagaaaaagattacgatgacgagcgtggagagcgtggattctttttctacgcagcagatcacgctcaccgtcgaaggcggacgggcggtgatcacgggcgacgcgctcaaaatcgtcaatttttccaaaaccaacggaaatttcgctgcggaagggaaaatttcgggactgaaatatctcggcaagcgcgacaaactcgccaaaaggctgttccgctgatggaagataccgtcaatcagatctatattctgatcgtatgcctgttttcgggcatactcggcggcgttttgtacgagcctttttatctgttccgacggctgataaacaaacgcgccgcgggaatcatcgcggatattctcttttttctgttattcgcgggaattttcgttctgttgtccgtcatatacgatttccccgcaacgcggccgtatatgcttatgggtgcgctcggcggactcctgctgtacctcgtaagtttacacagaatacttgcttttttgacagaaaagttgtataatagcgccaagaaactaatcttgcgtattaagcgcaatttttcgggaaaaaggaatgaaagaagaaaagtttaaaaaaatcgtcgtcgccgctacggtcaccgccgtgacgctgctgtttattttaatcgtattctgggtgtaccaactgatttccgtttccgtgcgcaaccgcgagatccaaaagttgcaagacgagatcgcctattatcaggaactgatcgaaagcggaaacttgagcatcgacgaagtgtataccgcgcgttggtggatcgaaaagcgcgcgcttgaactcggcatgaagtatcccggatattcagcggaatgaggatgatttaaatatgaaatgttcggtcattgatatcggttcgaattccgtccgcctgttgttatgggcggacggaaaaactttatataagaaactgtgcaccacgcgcctgggtgaaggtctgtcgaaaagcggcgttctgacgggggaagcgatcacgcgcacggcaaacgccgtggcgcgcttttgcgaagaggcgaagacagagggggcggaacgcatatttgcgtttgcgaccgcggcggtccgccgcgctttcaacggctcccggttcgtcgccgctgtgaaagagatctgcggactggacgtggacgtgctgtcaggcgaacgcgaggcggagatcggctttctgggcgcgctcggcggcaacgacggcggcgttctggatatcggcggggcgagtacggagatcctcgtcgggcaaagcgggcgcattctctatgcaaagagcctggatatcggcgcggttcgtttaaaagacttgtgcggcgaggataaaggaaaacttttgaccgtcatcgacgaaaagatctcgccttttgcaagcgtgccgcaatgtccgatgttcgccatcggcggcaccgcgaccacgctcgtttccctgcataaaaaaatgaaagtctacgagccgtcggcggtgcacggcagcgttttgacgcaagaagaagttcgggcgctcgcggacaaacttttgtcgtgcacgcaggatgaacggctcgcgatggacggcatggaaaaggggcgggcggacgttatcggcggcggcgcgcttttgatgagccgcgtcatggaaaagatcggcgcacggcaaattaccgtgagcgtgcgcgacaatctcgaaggctatttgatcggcaaaaaggagcggggcgaactatgagaaaactgcataccgcgtataaagttttcgacgcggccgccgcgatctgtatcgccgttctgatcgtatgggcggcttatgcgaaattcggcggggaattcggatccgtactcatcgccgcgagcctcgtgctcggagggctcgtatgtagttttctctgcgacgtgttgcacgaggcagggcatctgctgttcgggaaaatctgcaatttttccttcaacagcgtgcgcgtcgggtttgtgaagatctacaaaaaagacgggtatatccgcgtcacggcaaaggaacttcccgaatccgtcgcgggcgcgacggagatgctgccgcgtaattccgaaaagttgtatccccgttttttatggacggtcgcgggcgggctgctcttttcttttcttgcgtttgccgcgctgtttgcctgtttccttttttaccgcaggctcccgtttgccgtctttgcgctgacctgcacagggctgccttatgcctttcatctttttttctataatctcctgccgctcgacaacgacagtctttttacggacggcgccattttctgggggcttttgcacagggacgcttcttaccgcacggcagtcaatatcctcgccgtcgagggctatctgaacgaggggctcgcgcccgcggagatcgatgccgaactatatttcggtctgccgcagttgcctgaggacgatatcaactttatcatccttacgtcctatcggctgatgtactatctcgacgcggacgacaaggccaaggcggtcgccgcctgcgaacggttggaaagcctgatggaatacgttcccgagtattacgagaaagatatcgcgtcggacatactcttttgcgaatgttctctgaaaagggacgcggcgctcgcggaaagtatgtatcccgcgctcgcaacgcatctgttgcgggaagacacgctcgcgtcgcaccgcattctggccgcctatgaactgtacgtgaacggcgacaagactgccgcgctctcgcacgtgaacgaggcgcagaagaaggcggaaacgcatcagatcccgggactcgtaaaatacgaaaaaaagttgctcgcccgtatccgcggcgatatagtaagataaaaaaagagaggagtcgtttaaaacgcctcctctctttttttaacagagtttggacattgttccgctgcaatcgggacacatatcgctttgcgcattcatgcattccttgcagacgtacgcgccgcattcgtagcatacgtacatgtcgttgggttcgacctgtttttggcattttccgcataataatttcataaaagaaacctcccgttcccgtttgaaacaagtattggcaaatttttcttttttattccccgaaaaaagttttttgcggattgtcaaaatgtagtggtttatgtcaagcgtttgcctttcgcggcttgtgcggctgatttcgcgccttaaaacgcatcgctgaaaatttatttatacaaaacgaacgcaaaacgctttattttaaacgcaaaatatggtataataataccaataaaatccgcaagtgaaagcacttgttttcaggagaaacaacatatgtcagaaaaagtgcaaggcgaatacggcgaggagcagatacaggttctggaaggtctggacccggtacgcaaacgccccggaatgtatatcggttctaccgatgaacggggacttcatcacctcgtgcaggaaatcgtcgataactccatagacgaagcgttggcgggctactgcgataccatccgctgcgtgatcaataaggacggctcctgctccgtgcaggataacggccgcggtatccctacgggtattcaccccaaagagggtgtatcttccgtcgaactcgtattgaccaaactccacgcgggcggcaaattcggcggcgggggctataagatctcgggtggtttgcacggcgtcggtctgtcagtcgtcaacgcgctctccgaatggctggaagtggaagtctatcagaacggaaatatttataagcaaatttttaatcgcggcataccgcagaaagcgctttcgatcgtcggtcaaacggacattacggggacaaaggtcacgttctatcccgacgaggaaattttcgaaacgctcattttcaattacgaaaatctgaaagtgcgtctgcgcgagttggcgtatttgaataaaggactgactatttccatccgcgacgagcgggaagaaaaacccaagttcgacgagttctgctacgagggcggcattctgcacttcgtggaagacatgaacaaaaataaagaggttctcttcggcgagcccgtctatttcgaagaggaacagggcgacagcgcgatcgaagtcgccattcagtacaatgacggttacagcgaactcatcatgagttacgccaacaatatccataccgaagagggcggcacgcatctggaaggcttcaaagccgcgctcaccaaagtcatcaacgacgcgggacgccgtctgaacatcctgaaagaaaacgacaaactttcgggcgacgacgtgcgcgaaggcattaccgccgtcgtttccgtcaaactcaccgaaccgcagttcgaggggcagaccaaaacaaaactcggcaacagcgcgatgcgcgcgttcgtcatgaaggcgacgaccgagcatttgggcacctatctcgaagaaaatccctcggtggcaaaagaacttattctccgctgtatcaccgcgcagaaagcgcgcgacgccgcgagaaacgcgcgcgaactgacgaggcgtaagggtatcctggaaagcacgacgctgcccggcaaacttgccgattgcagcgaaaagcgggcggaactgtgcgagatctatatcgtcgagggcgacagcgcaggcggcaccgcaaaacagggccgcgatcgccgttttcaggcgattttgccccttcgcggcaaaatattgaacgtggaaaaggcgcgtatcaaccgcgttctggaaaatctggagatcaagagcatgatcaccgcgttcggctgcggcatttccgaagatttcgacgagagcaaactgcgctacgaccgcatcatctgcatgaccgatgccgacgtagacggcagccatatcaggattttgcttttgactttctttttccgctatatgcgtcccctggtccagaacgggcacgtttatatcgcacagccgccgctgtacaaggcgacgcgcgggaaagaggaaaaatatatgtattcggaccaggaattggacgagtacagaaattccaatccaggaaaattcgacttgcagcgttacaagggcctcggcgaaatgaacaaggaacaactttgggaaacgacgatgaatccctccacgcgcacgctgcttcgcgtcaccatgaaagacgcggtggaagcggatgaaatgttttcgctcctgatgggcgaaaagcccgaacttcgcagacagttcatcgaagagaacgcgaaactcgttgccgaactggatatctgaggtaaaagaatatggctaaaaaagaaaccagtcccgaacttaccgaagagtttaaaaaaactcttgaaatgaccaatatgatcaacgtcgaagtggacgacgagttaaaaaaatccttcatcgcctatgcgatggcggtcaacgtcagccgcgccattccggacgtgcgcgacgggttgaaacccgtccatcgacgtattttgtattccatgcacgaaatggggctgtacaacgacaaggcgtaccgcaaatgcgcccgtatcgtcggcgacgttctcggtaaatatcacccgcatggcgactcagccgtgtacgacgcgctcgtgcggcttgcacaggatttcaccatcaattttcccttggtagacgggcacggaaacttcggttccgtcgacggcgatcctcccgcggcaatgcgttataccgaggcgagaatgtccaaactcgcggcggaaatgctgcgcgatctggataaggaaacggtggattattatcccacgttcgacgatacttccatgcagccgtgcgtattgcccgcgcgctttcccaacctgttggtcaacggcagcgacggcatcgcagtcggcatggcgacgaacattccgccgcacaatcttgcggaagtcatcggggcggtcatcgcgcagatagacaatcccgagatcaccatcgacgaactgatggaatacgtacccgctcccgattttcctacgggtgccattctgatggggcgcgcgggcgtaaagcgtgcataccgcacgggccgcggcagtttcgttctcagggcgaagtgcgaaatcgaagattacaattcgggcaacaccgtccgttcgaggatcatcgtcaccgagatcccgtatcaggtaaataaggcgcgtctgatcgaaaatatcgccgaccttgtcaaagaaaaacggatcgagggtatttccgatatccgcgaggaatccgaccgtgacggtatgcgcatcgtcatcgagatcaaaaaggacgcgaacccgcaagttgttttaaatcttttgtacaaacataccgcgttgcagacttccaacggcattattttcctcgctttgcgcgacggcgagccgaaagtcctcaatctaaaagagatcatcgactgctatatccgtcatcagatcgatgttatcgtgcgccgtaccaaattcgatctgaacaaagcggaagagcgcgcccatatcgtcagcggactcgtgctcgctctggcgaacatcgacgaagtgatcgccattatcaagggatcgaaagataaattcgtcgcgatcgacaagttgatggctacgttcgaactttccgaaaagcaagccaacgccatcatggaaatgcgcctgcaaagactcacttcgctggaagtcgataaactggaagaggaactgacgcagttgcaggcgaccatcgccgatttacgggatatcctcgccaacgaaacgcgcgttctggagatcatcaagaccgaccttcgcacgatcatggaaaagtatccttccgagcgccgcaccgaactttcctacgactacggcgaaatcgatatcgaagatctgatcgagcgcgaggacgtcgtcatcaccatgacgcattcgggctacatcaagcgtcagcctgttgccgaatacaaggcgcaaaggcgaggcggcatgggcattacggcgcataagcccaaggacgaggactttgtcgaacgactgttcatttcttccacgcacgacgaaattcttttcttctccagtttcggaaaagtgtattccatcaaggcgtatgaaattcccgaagcgcagcgccaggcgcgcggcagagcgatcgtcaaccttctgcagatcgagcaggacgaaaaaatcaccgccgtcattccgctgacggaagggaccgaaggctatatcgccatggcgacgcacaagggacttatcaaaaagacggcgctcgaagaatttgcgaatatccgcaaagtgggcaagatcgccattaagatcaccgagggcgacgaactcatttccgtgcagttcaccacgggcgaagacgaattgatcatcgcttccaaagagggcaagtgtatccggttcagcgaaaaggatgtgcgcccgatgggacgcgacacgcagggcgtcaaggcgatgagcctcaacgacgacgattatctcgtggatatgctgatcgtgaaacccgactgcgagatcctgacgctcacttccaacggctacggcaagcgctccgacgtggaggattacagattgcagggccgcgcgggcaaggggatcaaggcgggcgtgttcaacgaaaagacgggctatctcgtcaatctgaagatcgtcagcgagcaggaagatatcatgatcatcaccggcaacgggacgatcatacgcatgcacgtggc

SEQ ID NO: 3623 - DNA, 3919 bp, Unknown
  16S sequences of unknown bacteria
gagccgcagcacgggtctgcgagaatgcgtccggcgcgccaaaacgacagctgcaccattgcagctgcaagcgtctctttcattggcgcagccacatccattactctgtacccgcgtttatgaagtcccgctccgctcgtatcgagcgtgatcgttgccctatccttgagaagcgtcacctttatcgtatactccgcccccgtttccggaaaagtatccataccataaacttcggaaaggcgcgacactacagctttttttactatgctctggcaggccggcacgctgtgcagcttggattttacagatgtcccgtttacggtaaatttaccgtcaggcggtatccattcttcccaggcgatgccctttacctgctgaaacagatcttcaaattcgagcgcacgaaattctcccatctttatgagcactctgtccgcacttctgagccacagattactccttgccactgcacgctcatcgccaagaaatgttatcttcgcgtcttcagacttgattattttatatccgagctgttcaatttctctttttacgaccgcttccagaccaaaagtcgcggtcgctatcaattccagcttcatatttctcctttattcaatatccgtgtttaataaagcatcccaaaaccctttccggatttcagaatgctttttcgtctactcgcatttaacatccattatttagatatacggttttcttctgttcatagaattgttttcgatgttctctatctgatcgagcgccttgcctgtaccgacagcaacgcacgattttggatcatccgcaatcgtaacttctatgcccgttctgtcctcaatacgcttgtcgatgccgttaagaagcgcgccgccgcccgtgattataattccgagattgctgatatctgccgaaagttcaggcggtgttctttcgagcacgctgtgcacagcttcgcatatcgtctgcagcggttcatcgagcgcatcgagcatatccttcgacgttatctctatagtcttcggcaatcccgttacgaggtcgcgcccgcggcattctttcgtcagaatttcatcagtcggatatgctatgccgatggacattttaagttcttccgccgttctttctccgatgtagagcttgaattcttttctcatatgtttaatgatagcttcgtcgaatttgtcacctgcgattttaactgacgtgctggcaacaatgccgccgagtgaaatcaccgcgatgtccgtcgtgcctccgcctatatctattaccataacgccgtcaggctttgatatatcaagccccgcaccgatggctgctgcaacaggctcttccataagataaacggccttgccgcccgcagactcagccgcttcttttacagctcttttctctacttccgtaacaccgctcggcacacagatcataattctcggcttaaaaaatctgctgctcctgcatgatttttttataaaatgcttgagcatacgctctgtgatatcgtagtccgatatcactccatcgcgcagcggtcttactgcaatgatattagccggtgttcttccgagcatcagccttgcttcctcacccaccgccagaatttcatttgtatccttatttatcgcaactaccgagggctcatttaaaactacgcctttgccttttatataaaccagaacattggctgttccaagatcgatacctatttcatctgtaaatcccatactgtattctccttgtaaaattttttctatcaatattataatatattcacgcaaaaataccaacacaaattatgacaaaattttatgacgcgcacgttttttaacaagcatatccacttcatccgcttcatatatttcagtataaccaaatccggtttaatctcatacaaatataaatgtgagggcggtgaaatataaaaaatgaaggactacatagaggaaagagtgctggagcttgcccggtacataattgagactcaggctacggtaagaagtgcagcccaaaaattcagagtcagtaaatctactgtgcacaaggacattacggaaagacttcttgaaataaatcctgcgctggcagccgatgtaaaactaatcctcgaaaacaacaaagccgagcggcacatacgaggcggcaatgccaccaagaaaaaatatcaaaacacgcacatcacaaaatagcaaaaatataaatacataacataaagaatgcgcctgcagaactttcatcgaaaggctctgcaaaaagcgcattttatttttctttattgttttcagctttatttttgattcttaaatctgtattcttaagccatttttttattaagtacgctaaattttatgccgcttcatcgtcgttttctttagcgttttttgctctctgtaccgttatagcggttgctacagcaagtataatcggaataagcattacaaatatgctcacatccataggtataaatgcaaacgtacctttgttgtacaaaagtgtaaggattactgccgaagccacagatactattgcagcaggtacatttcccttaaggaacatcgcaagtatgcagccgaacaatgccgggagcagataatttagcgccgatgaaatcgaaggcggaagtgccgaaagcagcgcgtctcctgtaagaactccaagtgcaagtatgataagatttacataaaccgacattgcaagtcctataatcgccataatagaccctttttccgtgcccatttcggtctttgatgctttctgcgccgctattaccgccggaatacgcatattggcaatatttcctgataagaaacagagcagcgtacccggtactccgagaatcggaacataagaaataggatacgaaatccaccaaggtatattaagtacaagccatgggacgagtgctttaacaagcatcggccagtccggctgcacatcgtaaacaaaccacagcgctaaaaacggaacaaagaatataagttgcgaaagcggaagaataatgtttcccaccaatactgctttaggttcaaatttttctttataagcattattttgattattcattacttacacctccatttatgctacaacagcgccggcgcccataccgacaaacattgcgataatcataccccaagcattaagccattcctgcttaaatttaacctgtattgactggagtataagcattgccaaaaatcctactatcatcgccacagttccagcatttaatgcaataagataaggtgcatcgacatatgcgtagcagcctataacagccgcaatggcaataattcccgttgtgccggctccacctttagaacccagttttttaacaaatacctcgattttgcctgccaaaaatacaggaatcgtaagatatccgatgcaagctatagccataaggaaaaccgcaatttgcaaaatttccggtgtaattgattctgccgtagctgtaagaccgtaagcgtcagttgaaaaacccaccgccatcagttcctgcgtaatatctccgataaccgaaagccgcatccatgctgtaggcgcgcctaccattaccagaagtgatatcatccctacgcaaattacaatagtaggtccgatagaagcaatcgccgatgttttcgcagcatccttcaactgtttctgagttattcccatttcctttgacaccttgacggccttaaccaagtaaaatgtggcaagaatcaaaacaagagaaattgctgtgattgttactgcccataaaataggactataggccaattccctaacttcttgtgacataatgatgcctccttttaaataaaaatagtataattccgggtataaagataaaatattctatactttgatactttaatactctatgctttacactttgtacagtatatgatatatcattttgtatttttaatcaagtaat

SEQ ID NO: 3624 - DNA, 29552 bp, Unknown
  16S sequences of unknown bacteria
ctgcgatgtcttcaaatccaaatcatcaagtgactgtatatagtaagtattttcgcactcttttctgcatatttcaaatagcttctgcgtatttgaactatggcttccgccaatcacgatcatggcatctgcctcgtctgcaatctgacgtgcttccgtctgtcgctcttccgtcgcattgcaaattgtatttacaacaactctatcatacctctttttgtcaagaatttcaactaaatcttgaaatttcttgtagttaaatgtcgtctgtgagacaatgcatacagaactgttctccgcaagctccagagcctctgcctgctctgaggattccactacaattgccggggtatgacaccagcctttgattccctccacttccggatgcttatcatttcctatgataatgatctgccggccagctgcactctctttttccacagtccggtgaatcttctttacaaacgggcaggtggcatccacacagatgagtcctttttcctggatcagatcataaatctctctgcccactccatgggaacggataataactgtaccttcagtcagagcctccagttcttcctttgagtccagaacccgaacccctttctcttccagatcctgcaccactacttcgttatgaataataggaccatacgtatagatggggcggattcctttttccacctgctcatagactgtatccactgcccgctgtacaccaaaacaaaagcccgcactcttagccacttttacctgcataattcaaggatcctttctaccacctgatcaatggtcatgtcagaagaatctaccaatgttgcatcctctgcctgacgaaggggtgatatatcacgatgcatatcccgataatcgcggtcttcaatatctgctgcaatctttgcaagatctgcaggttcacctttttcctgaagttccagaaatcttctctttgctctggtctccacactggcagtcagatacactttcacatccgcatccggcaataccacagttccaatatcccggccatccatgaccacatcggtctctctggccagcttctgctgaagttccaccagcttcttacgtacttccggtactacagatgagacagatgccatatttccaaccgcttctgttctcagatatgcatttacattttccccatttaacagaactacctgctctccatcctgataacagatggagatatccgcatgctgacaggctgcagcgattgcttcttgatctgcagcatctacctgattctggatcagataataggccatggcacggtacatggcacctgtatctacataaatataaccaagtcttctggcgatttgctttgcaatggtactttttccggctcctgccggtccatcaattgctacattatgactcatagtgtcctccctttttcttttcaaaacatatcttagagtgcatttgccgcagccactgccgtggaccaggcaatctgcaggttgaatcctccggtcactgcatccagatccagcacttctccgataaaataaagtcctggaatatttttacactccatagtacctggatcgatctctttgactgagacacctccctttgtgatgattgcctcattgtatccacgaagtcctgtcactgtcagctccagttctttcatgcaggacaaaaatctctcccgctcttctttggtaatatcgtggattcgtttctccggttcgataccacacagcctatacataactcccaccagcttggacggcaggaaggatggcagcacattgcggaactgcttgttggcattggcatcaaactctcttagaatccttgcatccagctgctcctttgacagggctggtttcagatccaggatcagcttcacctgcttttcacgaatctttctggcacagacgctgctggctgtgaggatcagcggacccgttactccgaaatgagtaaacatcatctctccaaagtcttcgtacaacctcttcttcccatccaggatcttaatggaaacatttttaagtgaaagtccctgcaactccttcacccagtcttccttcacattaaaaggaaccagcgatggcacacaatccgtcactttcaggccaaagctttctgcaaaccggtaaccgtctcccgtggatccggtactttcgtaagagatgccgccggtggccacgatcactttatccgcctgctcaagggttttatctgccagctgcagggtaaatccatcttcctgcttccgtacactttttacttctgtattcagatgtacctgcacccctgctgatctcatggctctgcgcaaagcatccagaacatccgccgaacggtcagacattggaaagacccggttaccccgctccaccttcagcttcaccccttctgcttcaaaaaaatcatatgcatcctgattggtaaatccataaaatgcactgtacaggaattttttgttgctcttgacactctccagcagttcctccatatcacaggcattggtcagattgcaccggccttttcccgtaatatataatttcttgcctgtcttttcatttttctcatatacatggacttccattccccgtcttgctgcaaaaatggaggccatcataccggcagcaccgccgccgatcactgctattttttccattttattgttctcccagacgttgaatcatttcctcacaaatcttctgtgcactttttccatcagtctcaataatcatgtctgccgctgcttcatatttttcccgtcgtttttccatcaactctgcaatatatgcaactgtcttattgttttccagtaacggacggtcatggttattttccactctttccagaattgtctctggcttcgcagtcagaagaaccacttttccattcttcttcatctctgtcacattacattctcgcagggcaacaccaccaccgcaggagacaactgtgttggtcttctcctgcaattccactaaaagtttcgtttccagatctctgaaatacaattctccgtgtttttcaaagatatcggagatgctcatcctctctctttctgcgatcacctgatccatctcaaccacatccataccaaacttttcacaaagataatcagccacagtactttttccagatcccataaatccgatcaaaaaaatattgtatgtaaattgcatcttcatttctgctcctctatcacactaagttatcataatatgataacccttttgtattatactttgaaccattaccttatggcaacgatattttttatttcaacaaaaaagaaccaccagtatacaccagtggttctccttgtgtctgtaataattaaaccggatatgctccgttctcggtgtctgcaacatttgcatccatcttggtctgctgtgcttctctgtatttgaagaagtcagtagcaacctgcgggaacagtgcgtaggacagaacgtcctcatcctgctgtttgtatttttccatctcagcttccagcttcggcagctcgttgccgatcaggtctgccggacggcaggtaatgatctcaccatctccgatgcacttcttctgtacttccggattgaacggttttacagtctttccgtattttccagagagaacatctttggtctctttggttaccatcttgtaacgctcacccatgattacgttgaatactgcctgagtaccaacgatctgagaagacggagtaaccagcgggcactcaccaaggtctttacgtacacgcggaacctcttccagtacgtcatagaacttgtcttctgcatgctgctctttcagctgagaagtcaggttggaaagcattccacccggtacctgatacagaagagtcttgatgttaacgccaaggttcttcggattcagcagaccggtctcaagagcttcgtcacgcatcggtctgaagtaatcagcgatctcagccagaagcttctgatcatatccggtatcatacggagttcctttgaaggtctcaaccataacctcagttgccggctgggaagtacccagagcaaacggagacattgcacagtcgatcacatccacgccagcctcaacagctttgaggtaagtcatggaagcaacaccggatgtataatgagtatgcagctggatcgggatcttaacggtctctttcagtgcagtaaccagctcggttgctttgtacggaaggagaagtcctgccatatctttgatacagatagaatctgctcccatctcttcgatctgttttgccatggaggtccaatactcaagtgtataagcatctcccagtgtataggaaagtgcgacctgagcatgtccgccctctttgttggatgcctttactgcggtctgcaggttacgaaggtcattcagacagtcgaagatacgaatgatatcaataccgtttgcgatggatttctgtacgaagtactcaaccacatcatcaccatacggacgatatcccagaatgttctgtccacggaacagcatctgcaacttggtcttcttagctctttcacggatcttacgaagtctgtcccacggatcctctttcaggaaacgtaaggaagcatcgaaagtagctccaccccagcactccagggaatgatatcctacgttgtcaagcttttcgatgattggaagcatctgctcagttgacatacgggtagcaatcagagactgatgtgcgtcacgcaggatagtctctgttattttaatcggctttttagcgatttcagtcattttctattcctcctacaaatttgtccttttccgtcagcagcttagaatactccgaaaatagccatgaaagttccggctgcaactgcagtaccgataacaccggctacgttcggtcccattgcatgcatcagaaggaagttggtcggatcagcctctgcaccaaccttctgggatacacgggctgccataggaactgcagacacacctgcagaaccgatcagcgggtttacctttcctccggtcagtttacacatgatcttaccgaagagaacacctgctgcagtaccaaatgcaaatgcaatcagacccagagcaacgatcttcagggtatccaggttcaggaatgcttctgcacttgtggtagctcctacagaagtaccaagcagaataactacgatatacatcagggcattggatgcagtctctgtcagctgacgaaccacaccgctctcacggaacaggttacccagcatcagcataccaaccagcggagcggtggtaggcaggatcagagaaataatgatcgtaacgatgatcgggaacaggatcttctccagtttagataccggacgaagctgctccatcttgatcttacgctctttctcagtggtcagaagcttcatgataggcggctggataaccggcaccagtgacatataggaatatgccgctactgcgattggtcccataatagccgtctgctgcagcttacctgccaggaagatggaagtcggaccgtcagcacctccgataatggagattgctgctgctgctttatcagagaagccaagaagcatagctcccagataagctgcgaaaataccgaactgagcagctgcaccaagcaggaagctcttcgggtttgcgatcagcggaccgaagtctgtcatcgcacctacacccatgaagatcagggacggaaggatcgcccactcatccagtgtgtagaaatagtagagaagtccgccgactccgttggcagaatcctcgattgacaacataatgtcaggataaatgtttaccagcagcattccaaaagagataggaaccagaagcagaggctcaaactcttttgcaatagccagatacaggaatccacaagcaacagcgatcattacgtagtttccccaggtcaggttaaagaacgcggtctgctgcaggagatttcctaatgtttcagcaatatagctcatgttgtaacctccaatgattaattagaataccagtcgtatatgttcctagttcatggtagctaatacatcaccggactctacagcgtcaccaacagatacgttgatgccagcaacggttccgtcttccggagctacaaccgggatctccatcttcatagcttccaggatcacaatcggatcaccagcttttacagcctggccagcacttgcttctactttaaatactttacccggtacagatgcggttacttcgatggaaccagcacttgctgccggtgctgctgcagccggtgctgctgccggtgccttcggtgctgccttcggagctgctgcgcgaaccggtgcgcttcctgcgccaccttcttctacagatacttcatatacagtgccatttacggtaatggtataatttttcatcttaatatatcctcctaatttccttatactcttttccaggttgcggaatctgcacgacggatggaacgtactacgaatccatcagatgagcttccggtatatgcacagatcgctgcggtgatcgctgcgactaactcgccctcatccacagtcgtctctgccggtgctgctactggagctgcagccggtgctgctgccggttttgcggctgctgctttctcttctttcttctttccgaattttgcctgaatattcggaatgaagttgaagcagtagatgatcagactgatcaagatcagtactgcgaatacagttcccataccaaggagtgtattcattcctgcttttgcaagaatctcacccagagaatactccggatttacagttacactctgtgcaacactcttcttgttgaatacaatttccagatccgctttgcgctgttcgtaagtcaggtgagtgatcaggatcacttcatccttcttagtctcaaactcataaccatccgtacttacataagcacccagctcttccatagaaccttcgtaacctgcaaaagcggtggtaaatgcttcagcggtaaacggaagtccataagagtccagcatagactgagcatcttcctcatccatggttgcatatgtatcaagatcagcctctgacagaccattccagcttccgatcaggaaatcagatacagactgaagatacgcactgtcatactcgatagtctcactgtcctttgcacttccgcaggcagtcagacccagaaccgatacagaaagcactagcagcgcaaggatctttcttaatttctgtttcatatgattcacctcgctctacacggttccatgttttttaaagggacggtcttctctcttggtgtacagcatctcaaatgcaccgatcacgtattttctggtatcctgtgcttcgatcacactgtcaacataacctctctttgctgctgaagcaacactgttctgaagttctgcataagcagcttctttctctctcagctcttttgcgtcagcttccggatacattactttcactgcaagttttgcacccatcataccgatttttgcattcggccatgcgtatacaacgtcagcgccaagacctttgctgttcatagtcacatatgcgcttccgtaagcttttccaactactacatttaccttcggcacagttgcctctgcaaatgcataggtaagtgctgcagcagctgcagccatcttcttctcagagcatttggttgccttgaagccagctgcgttggtcagagtcagtaccggaatattgaaagcatcacagaactctacgaattttgctgctttttcgcatcctcttgcagagatctctgcattaaactcttcaactgcattgccttcctcatcgtacagggtggaacggttagcaactgctcctacggtggttccgttcagtttgatgaatccggtcaccatatcttttccatactctgctttggtctcaaagaagattccggagtcagagatcatcggcagggtaattgccggatctgcagcagaagcttccagatctgcacatactctgttcagatcatcctcgcagtccatataggaaagatcatcttcgttgttagccgggagcagagataccagatcacggatcttggtgatcagttcagcctcttcagctacaacatcaacatttccaacttcctcgctctggaattttgcagaagcagtatcacatttggatgcatcgtttccttccagtgcattcggggagtttacaaaaagttttgctttcttggactccataaaggtaaagtcagacatagcagatgctactgccataccgccgccgcaggttccaaatactgctgtgatctgcggaacaacgccggatgccattgcctgtttcaggtacagctctccaaatgcattcagtgcatcagttgcttcctgaagacgaagacctgcacagtcgacaagaccgatcaccggtgctcccatcttcatagccatatcatagatttttgtaattttctttgcgtgcatctcgcccatggagcctcccagcacggaagcatcctgactgtacacatacacaagactctcattgatcagtccgtaacctgtgattacgccgtcagaaggagtatctgtgttgttcatgttgaaatctgtcgcacgtgcagtaactgctgcgccaatctcaacaaagctgttctcgtcaagcagcgctgcaattctgccacttgccaaggtctgtgctgtattactcatttttagccctccatcacatatattattaaataacgcaaattctgccgttttccattgtagcaactagccgccactttttcaagcggtttttcacagaatctaacaatatatgttcttactgatgtaacatattttttgtcattgttttctgtaacaaaaataaaagaaggcagatgttgcaatagaacattctgccttcctgtatggattttccttataaaccagaattaaactctggacagatactcaccggttctggtgtcgatcttgatcttgtttccggtctcaacgaacagcggaacgttaacaactgcaccagtctcaacggttgccggtttggtagcacctgttgcggtatcacctttgaagcccggctcagtatctgtgatctcaagctctacaaacagcggagcctctactgcgaatacgttaccgttgtgagaacagatcttaaccatctcgttctcttttacaaacttcagggaatctcccacatcttcgctgttcagtgcgatctgatcgtagttctccacgttcatgaagtggaacagatctccatcactgtacagatactgcatgtctacacggtcaatacgtgctgccgggaatttctcggtcggacggaaagtcttctcaactacaccgccgttgataatattcttaagtttggttctcacaaatgcagcacctttacccggttttacatgctgaaactctaaaatctgataaacgttaccttcgatctccagtgtaacgccatttctgaaatctcctgcagaaatcatgttaattcgtcctccttatgttatacggggcaatgcgcagtccccacactttatcctattttataatagaacatccattatttcaactgttttttcaaactttcttcattctacttcagcatttttttcagttcatccataaatgtattcacatctttgaactctctgtacacggaagcaaacctgacataagccacagaatccaggtctttcagcttttccataaccatttccccgatctgacggctggagatctcacgttcctctttgctgaaaatacttgattccacatcatcgatcatagcttctatctgtgtggctgataccggtctcttgtgacaggcacggaacaccccgccctcaactttggcccggtcataagtctccctgttattatcttttttgatcacgatcatcgggatcgtctctaccttttcataagtagtaaaccgtttatgacattcatcgcattctcttctccggcggatggaatccccatcatccgcaggtctggaatcaatgactcttgtattgtcttttccgcaatatggacacttcatgaaacccctccttctttgttgttcagtatataacaggctgcacttttctgtcaatgaaagactcaaagaagcatatgctttaacaaacaatggtgcatggagatattccgatgagattctgtgaattaaaagaaaaagatgtgatcaaccgatgtgactgcaagaagcttggtcagatctgtgatctggtcattgatgagtgtagtggtcagatctgttccatcatcgtgcctggtcccccaagactgtgtggtcttctctgtccggatcaggaatatatcattccctggaactgtatctgtcagatcggtcctgatattgtactggtggagatcacagcagaaaaggtgctctctccaagaaaaatatggaaatagttttttctgtattttctgcataacccatttattttgggaaatgcttttaacaagtcaggagggaactgtatgcttatcaacaaggtggaaatctgcggagtcaacacatccaaactgccgctccttaccaatgatgaaaagaagctgttattcgagcggattaaaaaaggagatcaggaggccagggagatttatattaaaggcaatctccgtctggtcttaagcgtgatcaaacggttctcatccagcagtgaaaatgccgatgacttatttcagattggctgcattggcctcatgaaagccatcgacaattttgactgtaccatggatgtaaaattcagtacttatgcagtgcctatgatcgtgggtgagatccgccggtatcttcgggacaacaacagtatccgggtcagccggtctcttcgggatacagcctataaggccatctacgccagggaaatgcttatgaaagagcatgcttccgaaccgaccattcaggaaatctccgctgccaccggcatcgctgccgaagatattgtatatgcactggatgccattcaaagcccggtgagcctctttgatccagtctatacagaaggcggagacaccctctatgtgatggatcagatcagcgataaaaaaaataaagaagacaactgggtggaaaatctgtccttatccgaggccatgaagcggctgaccccaagagaacatcacatcatcgatcttcgcttctttgaagggaagacccagatggaggtggctgaggagatccatatctcccaggctcaggtcagccgtctggaaaaaaatgcgctgaagaccatgcggaactatctgaaataatcccctattccatctactcgtatcttacgatctcttttttcagtcttccgatgatcttcttctccagccgtgaaatataggactgggaaattcccagaagatccgccacttccttctgggtcatctcctgcccggaaggatgattaagtccaaaccgcagttcgatgatcatccgctcccgtctggataattttcccaacgcttttcttagaagctttcgttccacttcattttccagatctcggtaaataatgtcttcatccgttcccagaatatccgaaagcagcagttcatttccatcccaatccacattcagcggctcatcaatagatacttccatccgaagcttgctgtttcttctcagatacatcaggatctcattttcaatgcagcgggacgcataggtagcaagtttgatgttctttccactgttaaacgtattgatcgctttgataagtcctatggttccaatggaaatgagatcctccacacccactccggtattgtcgaattttttcgctatgtagactaccagccgcaggttatgttcgatcagcgtggcttttgcctgctgttcctgttctgttgaaagattgtgtatcgcttccgactcctccaccggattcaagggcggtggaaggatctcggaacctcctatataatggatttctcctttctgagccagaaacatacttttgaatctgggtacgactttcaattggatctgattgggtattgctaccttgatgatcatgttgcctcctcctgggaggacagaagctcctgatgaagaatcagctcatactgtctgctggccataggcatgcctgcaaggatcggatgcctgcacacacagattcctgtatttgtggtaatttccatgcgatccagcacatacgcttttaaaagtccatgctccgcaacggtctgataaggaatgagtcgcggaaaaagctcttttccggacttctccacaagcgcctgcagcaccggttccgtacagacgctgaccggccgaccgctcacaggatcccgcagggaatttcctgtatccacaagtccctcggtgctgatcgatgcctcccccagatacaatgccaccggacagatgatatcctctcgctcccgaagcttcaccagcacccactcgacagccagcaggatacctgcaagcaccatcgaacctcctgccagcataagccccgccagcacgtagaactgttccagataccggaccgtaccgccaagcagccatccttccagatataacacgaccagacactttatgtatgtgttcctttttccgtatgcggttcggatcatgactgccgccgtaagaatcgtccccagaaaccatcctgctgttgtcagataagccgaacctgtttccagcagacaggctcccatgcttcccagtgctgctccggctgcgatccgttttctgtctgtctgataccccatcagtctggatgtgagaagcaagagacacacgttgacccacagattttccacaaacagtacatctacataaacttcataatacacttgctgtcctctctcttatgatagacaacattataaaaaaagcaggccgcgaaccgtgtcaaacggtgcagcctgcttttctatttcatagacaaaagctgacaaaatactctcatctgctcgatgggaatctgacccggtgcggatgcttctcccacacttgcaaaggtcatagctgaacctgtcagggttcctgccagacgacttaagactcccagacgacccatggacatggtcactaccggaatatccagagaatggtctgcctccatggttgcttccatcagtgtcatcacatcttcccggctctgtggcatcactgcgatcttcgccacatctgctcccatctcctgcatcctggtcagacggcggatcagttcttctctgtccggtgtccggtcaaaattgtgaaaagatgcgatcacatgaacacctgcgctttgaagttttctgatctcttctgatgtccgttcctcctcccggaatgcttccacatctatcagatccacatagccggatctggcagcccgttcattcaactcatagtaagtatctttcatcactgcaagctgtccaccttcatagactgtccggagcgtgaaaagcagtgctttttctctgatccgtccgcggattccctgtagcacttcgagcagttcatccctgtcttccacacggtcgaaccagtctccccgccattccaccacatccgcttctgtcttcgcaataacctctgcagccttaaaaatatcttcttttgtcctgcctacgataggcgcacagattttcggatctccttctccaaaaacacctgtacttaatttgaatgttcgtttcatctctttatccctacttaaaatacttattttttaccagttctaccggcatcggtttaccggtccacagttcaaacgcataggctccctgatagagcagcatatacatgccattgaatgtcgggcatccaactgattctgccatctgaagaagtctggtcttcctcggctggtagatcacatccgatacgatcagttccgaatgaaagtaactcacatccggcaccaggcatccctcctcatggggactcatgcctacagaggacgcattgatcagaatggcactctcatcgatgctctttctcatctgcacctcatccttcagttcatacatacagaccttacagtctgtccggctgttcacccgatggatgacctgctccactgcgttccatgaattaccttttctggcaatcacatcgattttcggcactccatccagcgccgcctgagtgatgatcgaagccgctgctcctccggtccccagaagcgtcatcttctttccgataatatcgaagcctgcatctgttaccgcagtcatatatccttttccatccgtattaaacccggtcagaacaccattttcctgcactaccgtattgactgctccgatcagttccgcttctttggagagcttgtctacccgttcaaacatccgccgcttgtgaggcatggtacagttccatcctctggcattaaaggtaataagcccatccactgctgcctcaaattgttccggtgccacatcaaatgccagatatacataatccagtccgtgataacggaaggattcattgtgcatctcaggcgaaacgctgtgtgccaccggctgacccagcaggcaggttagtcccgtatgtcctgtaatcggtattgttcccatatagtctatcctcttcccatatatctattcaaagaaacacccattacatgcccacgcctcaggcgttttcggcacacagtgggtgtctgatatatcctttattatctatctgtttttctgaaagaactgcggaatcttgatctcctgttcttctatggtactctccggctttttaaacgtcttcagtcccggaagcggctgtaccggtttggtcttgaactccgattttaccggattctgtgctgctgttgaagcggctgcagtcggctgcggagttttctgagttaccggacgataattcggcagaacagacttgttggcattatcctgcagacctgttgcaattacagtgatgcttacttcatcagaattggtggagtcatacattgcaccaaagatcacgtttgcatcctcgcctacctgctcctgtacatagcttgctgcctcgttggcatcaatcagagaaatatctccggatacattgatgatcacatgagatgctcctgcgatggtcgtctccagaagcggactggtgattgcctgttttactgcctccagagccttgtcgtctcctcttgcagtaccaataccaatatgtgcgatacccttgtctgtcatgacggtctgtacgtctgcgaaatccagattgatcagtgccggcagattgatcaggtcagtaataccctgtactgcctgctgcaatacttcatctgctttcttcagtgcctccggcatggtagttctgcggtccacgatctccagaagcttatcgttcgggatcacgatcagagtatctacggaagctttcagcttctcgatacctgccagtgcattgttcattctctgctttgcttcaaaacggaacggcttggtcacaacaccaaccgtcaggatccccatctctttagctgctcttgccagaacaggagttgcaccggttccggttccgccacccataccacaggttacaaataccatgtctgcaccctggatcgcttctttgagctcttcaatactctcttctgccgccttttcaccgatctcaggctttgcacctgctcccagtcctttggtcagcttctcgccgatctggatcgccgtcggagccttgcagagcttcagtgcctgcttgtccgtgttcacaccgataaattctactccgccgatctgttcctctaccattctatttacagcattatttcctgcaccaccaacgccgatcacaatgatccgtgcagctgcttctgtttcattcgtcatgatttccaacaaggctatatcctccttcaaatagcgatttcccacgccatcttacattactttatatcatagcttcttttcttaaaatgcgcaacaaatttttgaaaaaaatcataattactgctttactttgccgactccagggaaatatgcgttgtctcgtctgtatagttttccatatgaagcgtaccggacttgtccttaagatctccctccagctgtttgagtctggaaatcttctcatccagattctccccggttcccagtgccactttcacatctcccagttgaaggaacagttcacctcctgctccaaaccggatttcatccggatccagatcatatttggtcagaagctttgtaatgcttagaatcgtatcaaaaatcgtcggatcttccacgcttaatggctgatgtatggcaagactgtcaaaggtcacaccgctgatctgtgggattccctccagttcctgggtagaactctccaccacgatgccatctttgtcaaaatacacatcctgccccagatagcgcacataacctaccatatttttctcatagacccggatcttcaggctctgccaggaatccatggtcacttcaaaatcatcgataaacggaatctccggatgctcctgatatttataccgaagatataccagaagcgtattctgaagacttccttcatccagcagcagatccactacttcttccttggtatagtaggcatttccggtcacagtcacctgccgcacccggaaaacacctgcaaaagataatcccaatatgaacagtactgccagtgccgccagtaccacgatcaatttttttactgtctttgtttttgtttcttttttccacatgcgttcagtatatcacgattcccagtgatttcaaatccccttttatatcttcatagccccggcgcacatattccatgccttccataacagtctccccttctgctgccagtgccgccataataagacccgcgcctccccgcagttctcttgcctgcaccttcgctcctgaaagtctccggactccctcgatcagcgcaaaactgtcctgatttacaatggatgcccccatcttcacaagttccggcacgatctgaaaccgggcttcaaatattttttcttctacaaaactgatgccatccgccgtggacaacactgccatcaatgccgactgaagatcggtggaaaatcccggaaacggagctgtcacaatattcgggattgggcggcagcgtttctccatctgtacatggatccagtccttcccgctctctacgactgctcccatctgttccagcagatggggcagtgtccccagatgctgcactggcagatgaagaagctttacgtctcctctggtgatcagcgcaccaagcagataggttcctgccacgattcggtcagacggaatgatatattccactgcatccagctttttcactccttcaatggtcacacaaggtgttccatctcccctcacttttgctcccattttccgtaagaattctgccagcacacagatctccggttccatggccgccccacgaatcactgtcacaccctctgagagtaccgccgccagcatcaggttctccgtagctcccacacttggaaaatgaagacagatctgcgctccgtgaagccggtccgctgatccgcacagggtatgttcctcctggcgaaaatccgcgcccagcagtctaagaccgcttaagtgaagatcaatgggccgctttccaatggtacaaccgccgggataagggatctctacctgatgaagccttcccagcatacttccaagcaaggtgatggtggaacgcatctttcccgctcctgatcctgtgattctgtgattatcaagacttctggtgtccagaatcaccatatgaccttcccgtctgacccggcagcccgctgtctgcagcagttccagcatatgatccacatcggagatttccgggcagtgatgcagaacaaagattccgtcagccaacactgctgccgccaggatcggaagcgccgcatttttggaaccctgtaccagtaattctccctgcattctctgtggtccgctgatcacaattctgttttcgtccacatccctctcctttggacccgccttcaggtcatccgttatataccagtatatgcaaaaaatgcctgtcagtgttccttccgcacacccctggacacgcttaaagcaatccccatctccagcagcaaaaaaacgacagatgtaccaccatagctgacaaacggaagagtgattcccgtattcgggatcgtattggtcaccactgctacattcagaatcacctggatcataatatgccccataactcctgccgccaggagagctccaaacagatccttcgtccaagtggcgatcaccatgagccgccagatcagaagcccgaagatcaccagcactgctactgcacctgtaagccccagttcctcacagatgattgaaaagatcatatcgttctgtgcctctggcacaaagcccagcttctgcatgctttctcccaatcccacaccgaagagtccaccagaaccgatagcatagagtccctgcatggtctgatatcctttttcgtataattccggattccgccagatggccagccgttccagccggtaggattccagactcagaaaaataccgatgaatcccactcctgtgccgccgatccatagaaaaggtaaaaactgtggatttgcaacaaagatcaggatcactgcgattccaagaataataattgccgtactcaagttgttggatcctaccagccccacaaccggaaggatcagaaggatcacaagaaacatatatttccatgatttcatatgagatgcattgcggcttacaatagcagccagcagaacgaccaccgccagttttgcgtactcagaaggctggaaggacagagggcccagtgccagccaccgtttggatccattatattcccgtccgacaaacaacacggctgtggacagcatcagcgcaattccatatccgatccaggcataattctgaagcctccgataatccatacaggacaccagatacatggaaaagagtccgatactggtcgcaaaaaactgtttacgtaaataataggcagggtcagcaaatttgaccctgccattgtaagcactggtactgtacagcaccacaagcccgaacaccacaagaagcaataccagaatcagaagtacataatcaatggattcttttgtatcaccatttctttgatgcaggtctgtcatgccatcagatccctcacatattttttaaataattctccgcgctgctcaaagcttttgaacatatcccagcttgcacaggccggagacagaagcacagcgtcaccggatccggctcttgccgcacactctttcaccgcatcttccagagaatctgcaaacacaatatgctcaaatccgtgctttcttgcacagtcagcaatcttctgcgctgtcacaccgatcagcaccagttctttcacttttccatcaaatgcctcgatccactcatcatactccgaacccttatcgtaacctccgccgatcagataggtaggacggttcatagcctgaatccctttgatcgccgcatccgggttggttcccttggaatcattataatatgccacaccatcaatttcttccacgaattcgatccggtgttccaccgcacggaactccaacagtgtcttacggatcacatccacaggcacgcccattcgatgggtaatggcgatggctgccatggcattttcatgattgtgtccaccgagaatatgaagctcatccacatggcagatctgttcttttcttccaccatctttcagcacaagataaccatcttccaggtctacgccctgttccagtttatgcagtcggctgaaaaacagaacatctgccggacagttttccccatatgcccgcagcaattcatcgtcatagttcagcacgcaagtatctgccttcgtctgattctctgcgatccgttccttggccgcaatataattatccatggtatgatgacggttcagatgatccggcgtaatattaaggatcgcactgactttcgggtgaaactctacaatactctccagcataaagctgctgatctctgctgccgtcatagcatccggctccataccgtccgccacatctgcatatggcatgccgatatttcccaccacataggtatgtggattataatttttcaagatctgccccacaagggttgtcgtcgtggtctttccattcgttccagtgatcgctgcaatactcccctgtccgcaacgatatccaagttcgatctcaccccagactggaatctcacgccttctgatctccagcatcattggaatatccatcgggactcccggacttgggatcaccagatccaccgtgtccagcaagccttccggcagagttccgatcacgatctgtgcctgactgtctgcttttaattttgcttttacatctgcacatttcagtttttcattggcatcaaacaggatcacctgcgcaccttttcgttccagcagagataccgctgacaatccactgatcccggttccaatgaccagcgcctttgtgtctgcaaattccatagtgcctccttacattgctgccagtgcgatcagacagcaaaatgcttctataatagaaaatactgttaccacacgagtctcagaccatccgcatttttcaaaatgatgatggatcggagccatcttgaaaaaccgcttaccatgagtcgctttgaaataagtgacctgaatgatcacagatagcacctcaaccatatagatcagtccaaccagcagaaggaacagtggcatattcagcatatatgccactgatgccacgaatccacccaacgccaatgaaccggtgtctcccatgaatacacttgccggatatacattaaacagaaggaatccaagaagtccacctgcaactgccagtgtcaccggtgcaatgcctgttcccgttcccagtgcaactacagagaaaaatacagcaacgatcaccgtaacactggaagccaagccatcaagtccatccgtaaagttggttccattgactgttccgatcacgacaaagaacagaagcggaatggaaagccagccaagatcaatggtcagtcccgggcagaacggtaccagcatcgtcagccctgcttccgaatatttcaccatataatatgcaaatacagccgtcaccaccagctgtcctgccatcttctgtcctggtgtcagcccttcggaacgcttcaggaccactttaatatagtcatccaaaaatcctacaataccaaatcctacagtcataaataataccggaatgatctttggataatcttttacataaaacaggcaggtcaccaccacacccagcaggaaaataatacctcccatggtaggagttccattcttcttcagatgagtctgcggaccatcgtccctcaccgtctgtcctgctttcagcctcctaaggattccgataatcttcggacctgcagccgcactgatcacaaaagagatcagcaatggggcaatcacaccaaaattcaacataatcaacacctcatattcatttgttttctttttttcattttgaaaatatatattactgttcagagccccattcccacgactctgaacagtaatcagtatacgtctttcaggcaaatttatcaaccatcggtcttgcatttttatcagtacaggtgtaagataatcttatatgcggatatagttcatcggtagaatgtcagcttcccaagctgaacaggcgggttcgactcccgttatccgctttcagaaagtcttctcaatccccagataaggtaaaatattttcaaatattgtccgcaccacaggtgcacagacagttccaccgtagtagatgccctgaggatcatggacaatgcacacggccagcacctgtggatcattggctggtgcaaatccaagaaatgaagaaatatatttatgggcacttctgggtaaggtctgagaagttgctgtctttccaccgatccggtagccttccagataggctttctttcctgatccttctgctactactttttccaatatttcccgcatctgctcagacaccttttctgtaacgattcctttcttcgctggataagaaaattccttcaagatctttccttcctgatcctgtactgctactccaaaatgcggtgtgatccgacgtcctccattgaccaccgagcttgccatcaccgccagttgtaccggtgtgatctgaaacgactgtccaaaggtcatggtcgccagttccacttcgccgatgttatcaagcttatgcataatggtgcctgcctcgcccggaatatcaatgccggtcaatgacagaagtccataatctgaaaagcactgataaaacctgtcaacgcccatgcgaagccccatttccatcaaagctggattacagctgttctccaaagctttggtaaagtcctcactcccatgtccacctgctttatgacagcggatccgccggtcttccacgatcttataacctggacagtaatactggtctgtcagcttggatgtacccgtcagcaaggccgccgaagaagtaaatattttgaaagtggatcccggctcataggtatcattgacgcactggtttctccacatctggttcaaggcatcctgcttttgctgatctgtcatggccgaagtatccactcccgtattcaatgtaaaaggatcattcaggtcaaattccggcacattggcacaggcatagatttctccattctgggggttcagtatcagaattgacacatagtctgcccccttggcttccatgactttctccgcctcctgctgggcatacatctgaatattataatccagactgatcaccagatcgttacccggcaccggttctacccggtcttcctttgtattttcaagttcgatccctcttgcatcagtcagcgtaagaatcgtgcccgggattccttccatatattcgtcatactttacttccagtccgatgattccctgattatcgcttcccgtaaatccaagtactttggatgccagttctccgtaaggataatatcgtttgaaatcttcatctacttttacaccgtcatatccataggcgcgaatagcatcccctgtttccttcttcacattggatttgatccgttcaatagaactgatcttttccacccgtttgcgtacagtctcttccggaagctttagttcctcacagagcatatcgatcacaccttccggatctttgatctgactgtggatcacggaaatggtgcagactgtctggttatctgcaagaactgtcccgttccgatccaggatccgccctctggccgccttaatacttcgttctctttcgtgaagatccttcgccagattctgataatactctgcctcaaagatcatcagatacaccagtcttcctgccaggatcgacagcagaagcaggcagatgccaaatacgatcacaatcttttttctatgaaaagtcctgcaatgcaaaaaaacacctcattatatggttttctccattttatgaggtgttttgcattcttattcagtaggattggcgtctgccgtatcttccgtagcatctgccggttccacattttccagattttcattaaccggtgcgtctcccagcacagagtcatcactctgatccacactgtccgggtcaggcatctgtacggtctcccctgtctgcggatccactaccgttccttccggaagggcactttcctcttccgaagattcctcctcagaagctgccgcctctgcagctgctgcctgttctgcctccacttcagccttcatatcctccggaatctcctctgtcggatagatattcaggtatggaagtgcctgtttcataatatttttccagatctcctgtgcaaaggagctggtagactgcttcggtgcattcggttcatctacaaccacataaagcaccacctgcgggctgtccgccggtgcaaatccaataaaggaaaccaggtagttggtcttatccctcgggatcttctctgcggtacccgttttaccacccatagcatatcctgcgatccgggcagcacgaccagttgcattatttccattggcatcctgcgcaccatacatggttgcatacagatactgacggatcaatgcagaagtcttggaagaaatgggacgtcttaaaaggatcggctctacattttttaccgtacctccattactgtccataattttcttcactacatggggctgataataataaccgccattgatggtcgccgaaaatgctgagatcaactgtaccatagttacattaaagttctgaccaaaggaattggttgccaggtctgtggctcccatgaccagattatcactgggtgcaagatccttggcatagtagatcagactgtctgtacgtgcttcacctggcaggtcaataccagtacgaagtcccaggttgaacagattctgatatttagaatactcctcttctccaagctttgcggcaatctgcatcagggcatcattgcaggaaaacttcaaagaaccttccaggtctatcacaccatgaccgatcttttttgcacaccagatctcatggccgcccacattctgacgtccatcacacagaaatgtatcgccgtcatgaaccacaccactttccagcgccgctgccactgtgatcggctttgcggtggaacctggctcataagtatcactgacacagaagttacgccacagctcattgagcttatccagccgttcttcctccgtcatggcatctgattcttcctgtgtggcaattccatttgccaccagatcataaggttgattcagatcatatttccggttgcttgccatggcaaggatctctcctgtattgggatccatcataatggctgctgccgtcttacttccaacttctccctcacgaaaattattcgtatatttttcctggaaatcatcgattgctttttccacgatctcctgcagggtcacatcaatcgtggacatgacagaatctccatccacggctgcacggacatttttctcctgctccaggtcttcattcaaataattgtaggtacgcccatcctcaccgttcagtgtatcagaatactgctgctcgattccgtactgccccacatttccggataccgtgtatccgatcacgttacatgccagagaatcataaggataccttctgatgtaagtatcttccagccacacaccttcgatcctgctgtccttatcatccattgcttcttcaaaatcctgcacttccgatttggtcagctgctttttcagcatgacataatgactgtcctttttctcctgcataatcgtattcaattcgctccgatccagatcgaagtactccaccaacgcacttaaggttggctccacacagtccttcttggcatcctcgtcatagtttttccataggacacccggatccaggatcagattatatactttttcactggttgccagaacagttccgttccggtcataaatatctccccttttataaggaagtgtctgacttttggtatcctgctgtgcaagaactctcttcttatactgctcgccgctgactctgttgatatagaccagtcgtacaatgattcccataagaagcagtacgatcacaacaaacaaaagtgccagttttcgtttcatcttcagaatgccacgctgtctcctggacagccgtctgcgatgtcttgacatagattactcctactttccatttttgccaagaaactgatccatcaatgaagttttactgtctttcggaacatcctgactctgtcgtacatagtctttggtccctccatcgtataagatcacctgatcttcatttgcatagaccattcccagctcattgattgccacatcgcggatataatcaagatctaccgaagtcatgattctcgtatagttatcatcgttttcttttttcagatcttccagctccgtctccagcgcagcaatattcttcactctgctggtggtctctgcctgaagctgaaggtaagttacacatgaccacagaaccatagcagccgcaatggtcagaaacagcatatagatcacagtcgtatactgtattttctgatcacgttctaccctgtatgcatgagattcttcctgtctccggtaatgtctttcttcccttacctggagtttccgcactgtatttccttcaatcactcgacgttttctccctgtcgacatatgcggtcttcctttctgccattttatcgtctcaagccgcttcccttagcttcgttcaaacactctgagcttcgcactcttggaacggctgttctcttccagttctccctctcccggaaggatgggttttcttgtcaccacttttcctttcggtgtttttccgcatacacagaccggaaagtccggcggacaagtacacggatgttcatttttgcgaaatgcattctttacgatccggtcttccagtgaatggaaggtgatgatacagagtcttccgcccggattcagaaaatcgatcatatcgtccagggaatcccgaagcacttccagctcccggttcagttcgatccggatagcctgaaaggtctgctttgccggatgtcctttctgcatgcggatctttgccggaatcgccgccttgataatctccaccagttcaccggtggtttcgatcggctgtctctcgcgagcctgtacaatatgtttcgcgatattttttgcaaatttatcttctccgtaatcacgtatgatccggtataagtccatctcactgtagccattgacaatatctctggctgttttctcctggcgctgatccatccgcatatcaagagctgcatcttccctgtaagtgaaacctctgtctgcttcatcaagctgataagaggatactcccagatccagaacgataccgtccacaccggtcacccctcggtcccgtagctctttacacatttcgcagtaattgctgcggataatcgtcacacgatttccaaattctgagagtctctgtgacgctgccgcaatggctgccgcatcctgatcgatcccataaaaatgtcccgcatccgacagtctcttacatacctcataagcatgtccgccgccacccagcgttccatccacatagattccgtccgacttcaccttaagttcttcaattgtctctttcagcataacggaataatggctgaattccatgggttctctcctcactctcttccgcttacctcattcagatgactggctatggtatccatgtccccaaaatcagcattttctttccagcgttcttcattccagatctcgatatgatccagcatacctgccagcaatacatccttttccaatcctgcaaattcccgaagtgttgccggaagaagaattcgaccctgcttgtccagttcacaggtgttcgctcctgcgatcagaaaacgcatgaaaagacgggcatttttatctgtaagtggtaacttcttcaatttgtctacataggccgtccagctgtccataggatacacgaaaaggcaaccatccagtcctcttgtcacaacgaactctgttcccagaagctcgcggaattttgagggtacgatcagcctgcctttgggatctaccgtatgtctgtattcacccatgaacatgcgtcttcaccctctttcgttctgtcagttcctccactttctaccatttcagaaccacaatacgccactttttaccacttatgcacttataataccccgaataagtaaaaaaagcaatatctgtcttaagaaattcttcagatttacacacaaaaaaacagcccacatcatctctgatgcaggctgtcgctttacagtgactgttcctgttcccagacctcaataagtctgtccattttctgtgcttccgtgaccagtgacgtaagatcacaagtctcttccgccatacgatccagctctttgcgctgtttctcgatcaattccttattcatttgtcttcgcctgttctttcctctttgcgttacttctgccccatagaattgttactgcggaaaaaatcacaagtatacatgccagcatttgggataccggtattccggtcatgccaatctgaagctgatctgtacggagtccttcgatccatgctcttccaagtccatatccaagcaaataagtcagaaaaagttctccctggaactttttccgtttccgataccagtacaggaaacagatcacacccacattccacaaagattcgtacagaaaagtgggatgtacctgtataaactgttcgccgcctatgatctgtacatgtgcccacatctcatctgtaatctcatggacacgcactgcactgaccggaagctgcatagcaaacagattgtctgtataaccgccaaaggcttctctgttgaagaaattaccccaccgtcccaggatctgacctgctaccagtccgatacaggccgtatccagcataaccggaaatgacagcttcttcaccctgctatatacatagaccgtagcaactgctccgatcacagctccatagatggcaattcctccctgtctcagattaaaaatgctcagaagatcatttttataactgtcccacgagaagatcacatagtatgtcctggcacagatgatcgatacgacgatggcataaataaccagatctgtataagtgtccggattctgtccagttctttttgcctcacgctctgccaggtataagcccagcaggatcgagcaccccatgataattccataataggcaatactaaagccatggatggaaatggattttcccacatgttccagataaattcccagatgtggaaagttgattgacatgttcatcgatgaatatttcctttccgtctcacaatctcattttatggtagtttctgtcttttcgcaacttgatttcatcgacagatttcgacaatccccaagtccttatacattaaaacggaacaggatcacatcgccgtctttcaccacgtaatcttttccttccataccgacaattcctttttcttttgctgcggaaaggcttccattgtcaagcagatcctgataattaactacctctgctttgataaatccacgttcaaaatccgtatggatcttacctgctgcctgcggagctttcgtacctttcttgatagtccatgcacggcactcatcctcacccgcagtcaggaagctgatcagtcctaacaggctgtagcttgcagccaccagcttgtcaagtccgctggattctactcccagatcctccagatattcttttttctcatcctcatccagttcagagagttcctgctcgatctgtgcacagattacaaatacctctgcaccttcttcttttgccatctctctgactttagccacatgcgggttggatgcaccgtcatctgccagatcgtcttccgctacatttgcagcgtagatggtcggttttgcggtcagaagattgtaattcttaaaccacgcttcatcatcttcatcatccgggacttcaaaggttctggccatctttccctcttccagatgtgctttgacagcttcaagaagctccagctctttggcataagtcttgtccatctttgcctgttttgcaatcttagagattcttctgtccaggatctcaatatcagagaagatcagctccagattgatggtctcaatatctcttgccggatcaatggaaccatccaca

SEQ ID NO: 3625 - DNA, 9951 bp, Unknown
  16S sequences of unknown bacteria
tgcgaccgggaggattcgaacctctggccttccgggtcggagccgaacgctctatccagctgagctacgatcgcttatatatgaaaaacgcgttacagcgtatttcaatcttgtaaagtagtcaatttccaatagtggtcaattcgtggtctgactaccgttgaccaccgcgtttttgtgagcgtaaatcacgctgcatcggacaaaaacaggccaaaaacctgccatgtcgcagttgtcggagaactacgacaaggcagtatagaccgacgataaagcgtaaattttgttggttctgcccaactgctcccaaaaccagaaaaagcccattgttggttgtcacaacaggcttttctggcattttacaaggtaactgcacagtagtggtcaaatggtggtcaacgattcgggaaaagtatgcgagataaagtggtggtaacttgaattctaaaaatcctgcaattcgcgctaaaaaacgggatttcgcgctaaaaaacagaatacattatccgaaatgctacaatatagacaaaataaacgcggtcatgttggcaagtatcatgcgatatggtagaaaggagggcgcactgccgcttcccgcgttcttgaagggagaaaaacggatgataaaacaacttaaaaacagatcccgtgcattttatggaacactgatttgctccggagtctcggtaatcaccatgatcgtgtatgctgcgatctatgcaagcacacgcttcatggctcgcgaagccctgctgtgtatgacagggggcgtgctgttgggcttggtgttgctgtttacaaatcacgaacgctttgcaccatcggcacttctggtaggaaacttcttgggtttactcttttatatttaccacatctatttttttgtatcctctgtagttaccggtattcagttttccggctttccgcctgagttctttgtcaacgccgttatgtttggcattgcgctggttttaagcatagtctgcgtatttttgccttgctcgtgcccaaaggaggaaaactgatgaaacaaaagattgcaagaaaaatcctgaccgtaaccagtatgctgctgtccggcgttatggtcacagctaccgtgatttgcaacgaaaatgcaacggccatcagcagtgtgctgaatgtaaaaacctttgatgttgtagagaccggggatacgaatcaggattccgaatattacaagagcaattttgataatctgaccgatcttatcaatgccggtcattctaaggcaacagaggttttggaagaaggcgctgtgctgctgaagaatgaaaacggtgctctgccgttgagcaaaggcagcaaggttagtctgctgggcgtaacggcatacgaccctgtatatggcggtaccggctccggtaatatttctaccagcgaagcaacggatttttgcaaatctctgcaggatgcggggctggaaatcaacccggttctgacaaagcagtatacttccgaggattgggcacagtacaagcgcagaaatgcaggctcttacagcacctcgcggttgctgatcaatgaagctccctggtcggttgtagacgctgccgcgggcgactcgctggcacaatatggcgatgccgctatttttgtggtaggccgtgtcggcggcgaaggctatgaccttttgggcattaccgaagacggcattgacaatcatgacggcctgggcaaggattacctgggcttgaatgccaatgaatggtccgttcttcagggtctgaaagagaaaaaggctgccggtgaaatttcccgcattgttgtgctgattaactattccagcatgattgagggcgatttcctgaacgacccggatatcgatgctgccttgtgggttggtgcgctgggtgtcggcaatgaggccaccggcaagctgctgactggcgaggtttctccgtcgggtcgtctgccggatacgatgtgggttgataacgccaaaaaccctgtaaatgcaaacttcggcagctgggtctatgaaaatgcgggcgagtacggcatttctacggaaaagcctaaaacggagaccgatcccgaaaagaacggtggatattctaccagcgacattactctttcttcctatgttgtataccaggaaggtatgtacatggggtaccgctacacggaaacccgttacgaggactatgtcctgggcacagcaaatgtaggcgaatacaattatgacgaggtcgtggcgcggccctttggctacgggctttcgtatgcagattttgacctttccgatgtgaaggttgaaaaatccgacgaccgcaattatgtggttaccgcaacggtaaccaatgtgtccgatacctactctggcaaatattctgttcctgtgtatgtttctaagccgtatggtcagtatgcgcagcaaaatggggtacaggttccttcggttgagctggtcggctttgagaaaacggatacattggcaccgggtcagagccaaaacgtgacgatcacgctggatgaaaaatactttacctcgtacgatgcctacaacgccaaaggctatgtgttgatggacggtgactactatgtagctgtaggtggcagtgcccacgacgcggtcaacaatgtgttggcagcaaaagcgcagaatggcgtttctgttgacaccagcaaaatgaccggaaatcccggagatgcaaccaaagtagcaaagttcggcttgtcctttaacaaggataagtatgcctattcggatgcggtttccatgattgatggcagcagcaaccagctggtgacgaacttgtttgactttgcagacatcaacctctatgagggacgcggtgacaaccatacggagtattacagccgtgacaactggaatgctgtttccctggatatggccaacggtcatcaaacactgctgatgacggaacaaatggcaaaagaaatctttgcccaggttcccgaaggcagcggtgaatacaataacacggtcggtgtacccgcacagttcaagcagcccatccccaaggacgatggcacctatcctacctacggagaaaatgcgggtctgatgctgatcgacatgcgctatgacgaggacggcaacgaaatcagttactttgatcctgtgtgggatacctttatggatcagcttacttgggatgacaccgtaaagctggtgtctaacggctggcatatgacggaagctgttgaaagtgttgccaaaccggaaaccagcgatgaaaacggtcccaacggctttggtggctgggccttccgcaatggatatctttctaaccagggcattgcctaccgcattgaaaaagaagctggtcatatcaaaaatgacggcacctttaccgatgatgtggattctaatgcactgcgtaaaatgaccggcttcccggcaaacggtattttggcagctaccttcaataagcagttggcaaaggaagtcggcaatatgattggcgaggatggtctgtgggccggctgttccggtctgtacggcatcggtctgaacctgcatcgctccccgtataccggacgtagctgcgagtattttagcgagtgcggaacccttaccggtatgatcggtgccgcggaatgcgccggcattgaggaaaagggcgttcatgtctacaataagcactgcgcgctgaacgatcaggaaaacaaccgtcacggtgtgggtgtttgggcaccggaacaggcaattcgtgagttgtacctgcgtgccttcgaaattcccatcgaagagggcggagccttcaacaccatggcttctttcagccgctttggtgtgcagagtgcggcagcttgcccggctttggcaaccgacttcctgcgtggtgaatgcggcatgaagggctttgttatcacggatgcttatcaggatatggacggcagccaaaatattgacccctactatgagcaggtttacggcaccttggttggcggtagtgatctgccggatggttctacgcctgcgacccaaggacacttcgacaaattcaaaaccggttacagtgccatggcatgggccatgcgccagtctgctaagcgcatttgctatcagaccgtatggtccagcgcgatgaacggtatctcctccaatacccgtgtcgtaagcctgaccccctggtggcaaaaggctctgtacacagcggatatcgtgctgagtctgctgtttgctgcctcgctgatttggacgctgtacgcgttgatccaggaggaaaggaaaacagttaaaaaagcacagaaataagcagtaaaaaccgcaacaggccgcggagtcagcgcgatactgcgctgactcttacggcttgctgctgtattgaaacatgtgcggcatgtatgatatactgagcaaaaaagggagggaagccctatgttgcgggtggctgtggtagacgacgatgcgcaggatcgcgccaaaattagtgccgggctggattttgtcgcggcgcaaaaggatgtatccttcagtatcagcgagtttgactcgggtgatcaattcctggtgaaatacgagccgaattatgacatcgtctttatggatgtggagtttctttccggtgcaaacggtatagaagcagcgcatcagcttagaaaaattgataaaaccgttgtgttggttttcgttacccgcatggcgcagatggctgtgaaagggtatgaagtagatgcactggattttatcgtaaagcccgtggacaactattcctttttgcttaaaatgacacgcattttggaccgggtcgcaatccgacccgatgatatgttctgcgtatgtgcagagggtgaaattatcagccttcatatacgaatgctgcggtatttaacggtagacggacattatgttatttaccactccaaagaaggaacctttgcggaatacatcaccctgaatgcagcggaaaagaaattgaatgatcctgcttttttccgttgtgacagagggtgccttgtaaatctgcgttatgtagagcaaatccgcaaaagcacctgcctggtagacggtgaggaattgccgatagctaggactcaattcggaaaattcaagcaggcgtatgcccgatatttgggcggcctgattgagtaaggaggcggagagatggacattctgattcggttcgattatatcgttgaaatcctattggctgaatgggtgtttttacatatttacccgaaaagacgttgtttttttgtgaggctgcttgtaaccactgcggtttcattggcagtgggctacggctgttatccgaaaagcatcagccagcaggtcgcagccattgtttttgtacagatgctgtttacgattttggtttctgttatagggatgtacgtgtgctgtaaaggaacccttttgtctgttttgtcagcctgtatttccggtgtcgcaatacagcatattgggcatcatctcagccggttgatttccctgttaccgggcatgggaacctggaatcgatatatggcggcggtcgtctgtctgtttttgtatgcggttgtgttttattttattcatacctctcacattaagttttacgagaactacgatgtctgccttacagtgatatcgattgtaattgtattggtgtgcattggcattacacgtttttcccgcatggggggctacggagcccaaagtgaaaatccgtatctgaccatcagtattgccttgtatgctataacatgcaatcttttggcactgtttattcaattcttcctctgtcggtttattcggctgaaaagcgaatatgccgttttgcaacgaatccgtacagaagaaaagcgccagtacgaaagcagctgtgaaaattcggagctgatgaacctgaaatatcacgacttaaagcacaaattaaccgcactgcaaacacgcttgccggaaaaagaaatcgaatccatgcaggaacttctgcaggtatacgatactacataccacaccggtttggatgtattggatattatattaaacgaaaaatgccgccaggcactggcaaagaaaatttccattacctgtatgggtgacggaaaagcgctgcgttttatggatacgatggacatttactcactttttggcaatattttggaaaatgccgttgaagccgtagagaatatagagcctgcggaaaaacgtgtgatcagcctgacaattgaacaaagaggtgagatggtttttatagatgcaatgaattattgtggaaataaaagcctgacctatgagaacggactgcccatcacaacaaaaaccacagaatatgggtaccacggctttggattaaaaagtatccgcgccatagcagaaaaatacaacggcgatgtagaaacctcactgacagacggtgtgtttaaggtcaacgtatacatgatggtcaacgacagcacaaactagaaggaaaatcttttatatgcaaatagtggcacatatacccgcagtatgactgattacggtatgcctaaaagcgacaccgtacgctgtaatatataaacggggcgctgtgcaagccgtacctgctatgtcggaatcggcaaaagcagggtagacggaaaatacatttttagccattctctaattccttgtttttttttccttgtgaaatcggctcgttcatcataggctatctgccgcaacagatatgtcctgcggtgggcgggctgatttccttatatttttgtgcaatcaggagtaattgcttatgaatgaaaccaaaaacggcaacgcggtcaaccgcgccaaaccttatcagctggtcttgttcccgctgaacaacggtgccacgaacgtgtattacgttctggtgctgtcttatattgcgaccttcggcagcaaggttctggctttgtctatgatctttgcctccgttatggtcacgggtatgcgtctgtttgacgccgtcaccgaccccatcatcggtgcgctgatggaccgcaccaacggcaagttcggcaagttccgcccgttcatggtcatcggcaacctcatcatggccgtcagcattctggcgctgtactgcctgaccccgctcattcccgacacgatgatgtgggcgcgctacgccatgtttgtggcgctgtacgcagtgtgggtcatcggctacaccttccagaccagctgcacccgttccgggcagaccgttctgaccaacgaccccaagcagcgcccgctgttcacgatttttaacaccgtcggttctttgctgggtatgggcgcgatgcagttcttcgcccccattctcgccaaaaattatgagggcggctacggctctgccgggttcttccgtatgctggcgcctgtcggcatcgttatttctatcctgctcaccctgctggcggtcgtcggcatctgggagaaggaccagcccaagtacttcggcatcggcggcgaaaagatcgagaagctgaaagtttccgagtacgttcagatcatcaaagagaacaagcccatgcagcgcctgatggttgccggtgcgggctgcaagctggcgctttccatcgccaccaacaccaccgtgctgtgtatgctgtacggttgcatgatgggcaactatgatgggctgtacctgccgatgatggtgctgggttacgtctttagtgtccccttcttcctgctgaccgtccgcacgagccaaaagaagggccagaaggccagcctgatgcgctatgtcagcgtggcgctggtgtgctatgtcggcgtgttcgtcctgctgctgctctggaagcaggacagcgcagccttcagcctgagcctgctgggtgagggcggactgtctatcaacctgtacacggtcctgtttatcctgctgttcggcatcggctacggcgcgtactacgccaccgccgatatgcccatcccgatggttgccgactgctctgactacgaaacgtatcagtccggcaagtatatccccggcattatggggacgctgttcagcctggttgacaagctggtttccagcctgtccgcaacggttgtcggcgtggctgtcagcttcatcggtctcgagagcctgcccacccagtatgacccctacacccccggcatgaacgtggtcgtcatcgtcctgttctgcgtcatcccgatggtcgcctgggcggccacgctcatcgccatgaagggctacagcctgaccggcgagaagatgaaggagatccaggccgtcaacgcctgccgccgcgacgccgtggcaaacggcatgagcatggaagatgctatgcgaaattatgtaaaaatggaggatgttcctgacagctataaataatggtgaaaagatttcactttatgagcgtcgcaggcggttgattacggttttgtatgagcggcagaatgataccattggtaatctcgcttttgaattttccgtaagctcacataccatccgaaatgatattcgggtattagaattggaatatccaatttatacaaagatgggagcgggtggcggtgtgttcattctggattcgagccgcttgcaacagcgatggttgacggtacgtcaacgggaactacttatggatgtatgcggtattttggacgatgagcaaactttgatgatgaaatctattataggcgggttgtcgccttaaaactatttaacgacggcgcgaaaatgaaatcttattcttccgcttcggattgaagcagtgcctcgatatctgcagacaggggagaagaatgtgtaatcgttgagccaaaagaccattgcagtttccactcaaaatacttttcatgggtgattttgcccgtatgatatctgtactgcattacggcgtaggtgttaagtaggcaattcagtaagtcgttctcagaccaaagcatggttggctgtgtgttgaacggaacagtttttgcgtttgtctgaatgacaggcactgtagcactgcctatctcagctggacgtttgtccaaaggcatggtcaatgagcatctgagaacatccggcatatcctcatccaaccaaaacagtgtttccataataccttccaaattgccggtatccggctccagcagcgcgcactcctcgacttggagtgccgctgctattttttttaccatatcctctttcggaacgcgaaacccggattcatattgtgcaatacggttggcggcaccatcggtaaagccaaccagttcgcctaactcgcgctgcttcatgtggcggtgcaggcggattcgtttgattttttctccgattttcatgggatgacctctttagcaattttatgctgtcattataccacattggaaagaaaaatcaacaatttgataacatatatgtaaaatcgttgacagaaatactgcggtggtgtattatcaatacaacagatatgatgtaaaaaacaagtaaggaggtttccatatgaaatccatgaagttacccaagaaccgctgcgtgacggtttattactttgaaaattctatttgcaagtaaactttgtttacttgcgcgtgggccgcccatacaaaatgatttatcatttttgttgtaatgaatcaaatctgattcactattcagaggatgaggcgtaaaagtgaatcaaatctgattcactcctacatttcgcccaaacaagccccgtgtggggcggcagctccgcatcgcacacggacgcgacatcacccgcaaaaccgccgtttggcgcgtttgtggggctgtggggcggcgcaagccgtacaacttaacactggagagtaaaacttactacacacaaaattacgatactatgagataatagatgtacaccaaacaagaaaggatgatgcaaatgacttttacgaaacttccgaaatcaatcaccgcagaagaactcctctctacgccgctgccacctgtaaagtggattatccccggtctactcccagccggattggcgctgttcgcaggccccagcaaggcgggcaaaagctggctgaccttgtggctgtgtttgcagattgcgcagggcaatcctgtctggaat

SEQ ID NO: 3626 - DNA, 32759 bp, Unknown
  16S sequences of unknown bacteria
ttttcttgtaactcgtctcttgacttgggtttaattttctcttatcaactgttcagttttcaaggatcactttgttacttttttaactgtctctcgatgacagcttagttagtatatcatgtctttttgcttttgtcaagaacttttttaaagttttttaaaaagtttttattctcgacagcgtttccgcttcagcaagaaatatattaactcatttttcatcatttgtcaacaccttttttacttatttttttcttgttattaacatatttagaaataagttactaagttttgacaactgatacgtttatttattatactcagttaaatctatttgtcaacacttttttgttatttttttaattattttaaataatatagcctgaggtacaaaaacctcaggctatatcatgtttatttatctgcaattgctttccttattcgactgcttgctgcttttctttccgctgtttcttccggtttcaatactatattcctcggcaaactctgttctgttactgtttctctctgcatttctttctgcattttttgaataactgtttttattactgttcttatccactgtggttcaccctttctattataatgtgctgttatttatcgcacatcaatagtatggtaactctatttcttttttattcaaaaatatttaaatatattttattacaggaacaactatcttttgaccggcttcaatttcatcattgactgcaccgttaaagtccattatgtatttactatattctttcctactcattccatctgcattatatttctttgcaatatcccaataagtttctccctttgacacacatatctcttcataatgtatatccactttgcttttatcagctcttccaaatgccatatcaactgtaccgaccgataatacaaataccataatcataaaaacaaattttctcatagacacccctccattaaaatatatgttcgcctttatattttcatattatacgaatttttgtttgcagtcaatgtttttttctagttttagaaacatttgtttgatatttttctatttatatgttattattattaaaaagattactataaggagcgaacgtatatggaaaaactctctcaaaagcagtttgaaatattagagtatatgaaaaaagcagtacgcgagaagggttaccctccttcggtaagggaaatatgcgatgctgtcggtcttaaatctacatcaactgttcatggtcatcttgaaaggcttgaaagaaaaggatatataagaagggatcctgcaaaaccaagagcaattgaaattttttcggataatgacagcggcaattccgacggttcctctcgcgaacttatagaggttccaatcgttggtacagttacagccggcattcccattttggctacggaaaacatcgaggatacatttcctattccgtccgactatgctcctaacggaaatatatttatgttaagagttaagggcgacagtatgattaacgcaggtatatttaataaagatttgattatggtaaggcagcagaatacagctgataacggagatattgttgtcgctttgatcgaggactttgcaaccgttaaaacttactataaagaaaacggatacatacgacttcaacctgaaaatcctacaatgtctcctataatcgtaagagacgtatccatacttggtaaagtagtcggtttatatagaaaattttaattctaaacgcagcacaatgctgcgtttttcacataatttttttatttgtcggttttacacatttctgtataattatccaattgacaggtctagggcttttaatgataatatcattagaatataattagacttatgtcatttgaaaggcagtgatattttgagtacatataaaattgtttctgatacggcaagtgatattttcccttccgttatagattatgcaacaatgccaagagttcctttttatgttacgtttgataaagaacactatcaaaaggaaatggcagaactttccgttgatgatttttataatcatatcgcaaaggacaaggtttttccaaaaacatcgtgtcctacaataactgattatatagatgtatttgaacctattcttaatggtggaaaagacattctttgtttttgcatatcatcttttttcagtgcttcttatcaaagtgcggtaaacgccgctgaaatgcttaaagaaaaatttcccgaacgtcgtatagaggttattgacagcgctcaggctacggcaggaatgggccttgttgtctatcaatcatatcttatgttagaagccggctatactttggacgaaaatatatccgtatctgaacaaattaagcacgacaccgttattaattttaccgtaggctctttatctttcctccaaaacggtggaagaataggaaaggccacagcgcttgccggcacattgttcaatgtcaaacctattatctgtatgagagacggcgaactcttccccattgaaaatgtacgcggcataaaaaaagcggtaaaagcagtaataaagaaaacagatgatgaaatcgacgggcatgaatccgattatttgatttccatgttttatgccgacagccgcgccaatataatggatacaatcgccgaacactacagtgattcaaaatatagcttcagcgataatcttttccgtgtaggcgcaacaataggcgcacatacgggtcccgatgtcattgctctggcgtattcaaaaaaatataatctgtacactaaataaattttttcgtaatcataatgacagctgataaaaaccattttttcagctgtttatttttgtcttaaaatctttatatatacatatttatatgataaaatcaatcaaagggagatgatagttatgtttaacctaatagattttcaaaattgggaacgaaaagaacattttgaatattaccgtacaaaaatcaaatgcgggtatagttgtactgttcagcttgatgttacgaactttttagaaaaagtaaaatcaaacggtttaaaattctatccttcgtttgtctactgtgttgccaagattgtgaacagtatgaaagaatttcgtatggcagtcgatgaaaacggtcgaccggggtattatgatacttcaaatccaagcatgacaatatttcacaaagaaaataatacgttctctgatctttggacagaatatatgccggatttccaaagcttctatgataatactgtaaataatatgaaaaaatacggtaatatacttggaattaaagcaagggataatcagccgcctaattttttctgtatttcctgcgttccctggcttgattacacagcttataatacaagcactcccggaggagaaccaaatatattcccaataataactttcggtagattcaccgagcataacggcgtatacactatgccttttactattaacattgctcatgccgctgccgacggttatcacacgagcaaatttataaatgaccttcaggaacttcttaacgatataactttataaaaaaatcagagctgatatgtatatcagctctgatttttattttcttataaaacttttgcaagaaagcttttaagtctttctgtttttggatgattaaatatatcgtcgggcgttccctgttccattattattccgtcttcaaggaaaaatactcggtctcctacttctctggcaaagcccatctcatgcgtaacgactaccatcgtcatattgtcatctgccaattctttcataacgtcaagtacttctcctaccatttccgggtcaagcgccgatgtaggctcgtcaaaaagcataacgtcgggtttcatacataacgcccttactatggcaatacgctgtttttgtccgcccgaaagctgcgacggatatgcctgcgccctgtttgccaatccaaccctttcaagaagtttcatagcttctgccgttgcttcctcttcgctctttttctgcaacttcataggcgcaataatcatgttttttaaaattgtcatatgcggaaaaagattaaaatgctggaaaaccattcccattttctgtctatgtatattgatatttacatttttatccgtaatatcaacgccgttaaatgttatagtaccactagtaggcatctccaatagattaagacatctgaggaacgtgctctttcccgatcctgacggtcctatcataacgaccacttcgccttttttaatatcggcgcttacgcttttcagcgcagtaactccgttaaattttttctcaaggttttttacgcttataagcacttcattatcgctcactgtttcttaacctcctttcaagtactcctacaaagtatgtaagaaccattaccataacaagatatattatggctacggcaatcaaaggcataaatgcactgaaagtctgtcctcttattatgtttccggctcttgttacatcgacaaccgcaacgtatcccgaaacagacgtctcttttaagagagcaatgaactcgtttgccaaagaaggcagcacatttttaaacgcctgaggtattataatataacgcattgtctcaatatagttaaaaccaaggcttctgccggcttccatctgtcctttatctatggacattatgccgcctcttacaatttccgcaacataagctccggagtttataccgaaagccaaagcggcaattacaacgccgttatcagacgatgcaaaaattacgaaataaataatgagaagctgtataactacaggcgtacctctgataacagtgaggtataccttcgcaattgcatttaaaaaagtcataacaccttttttaaatcctctcatttcgtccttagtcaaatcataggtagatctgatagtggcaagcactataccgattatgataccgattacaatagctatcaaagttattttcagcgttactcccaaaccattgagaagaagcttccatctgtcatctttaacaaagttaagaataaagtcagccttaacgccagcaaaccactcagccaaaaaaacacgccctttcccagtattaaaataatatcccattttattttctgccttctgacagaaaataaataaaacagtcataaaatgacggctttattcattcgctgttcaacttttcctatactgtaataacaccatgccgaattgttcggcatggtgttttccaaacatttattactcaaaatattttgctgttaattcgtcaataaatccgtcttctttcatttcggcaagcgcaccgtttaccttttcaagaagttctgtgttttccttagcaattgctataccgtagttttcggaatctgtagcttcaccgaatgtacctacgactacaaggtcgtttgcagcggcaaatgcgtcggcaacgcctgtgtcaagaaccatacagtcattttttcctgcaagaagagcagcaagcgcatcgccgtatttctcatactggcttactcttccgcttatcttctcggaagccataatgtcgcctgttgttccaagctgaacacctgctgtatagtctccgtttacaaggtcttcatagcttgttataggagaatccttaggaacaagtattgactgagaagctacaaagtaagggtctgagaaagctacgctttccttacgttcatctgtgattgtgataccggaaacacctacgtcaagctttcctgtctgaaccgctgttacaattgcgtcaaaattcatatccttgatttgaagctccatgcctaatctgttgcatatttcctgcataagatcgatatcgaaacctacgaatgtaaccgcgtcgtctgcatatgactcaaacggagggaagtctgcgcttactcccatttttattacgccgtctgtaccttctgttgtttcgcctgtctgttctgtgttttcagtattttcctctgttttttcatctgatgagcttccgcatcctgcaacgccgagaaccataacggctgcaagcgccattgctaaaaatttcttcataattattcgtcctccttaaatatttctgggttataaaaccctttcattctaaaaacaattcacattataactcataataaatcacaattcaagtattttatgcaagattacagcgtttttttgtcaataaattcaggtctatgttttgaatatacaattttctgagcgctgtacaatccgtagtaacccgacagcttatatgagaccgcgcatgcgactgcataataaatcagtccttcagttccgaacaactctatactcagtattaaagatgttaaagggcaatttgtaacgccgcagaataatgcagccattcccaagcctgctccgaacgagcctcccagcccgagaagttttccagccacattaccgaatgttgctccgacaaacaatgtcggaactatttctccacccttaaatcctgctccgagcgtcaatgcggtaaatataattttaagtataaacgcctcatattcagcctctcctgctaccgctcttcctattacgtccattccggccccgttatagtcagttgttcctattataaaagtcagtatggctaccgccaaaccgccgacgattgcggcaactgttttattcggtatcttgtcatacagtttatgcgtctttttcaatgtcaaacaaaaaagcatacttactgctgcgcataatacagccaaaactataactttgaaaatcgtaagcagctctattgtaggtatactgcctattaccgaaaacgatgtcggcgctatatcaaacaaagaggctatatatgcccctactgcggaagctatgatacacggaactattgcagagtaatacataactccgacgcttacaacttccatcgcaaatacgactgcggcaaccggcgttccgaaaagagccgaaaatccggctgccattccgcacatagtaattatgcgctggtccttttcatctaactttatatgcgttcctacatatgacgcgatacttccgcctatttgcaaagccgctccttctcgtcccgaagaacctccgaatagatgagtaataaccgtacttacgaatataagcggagctgtttttatgttcagtggttcattggaccgcactgcgtcaagtataaggttagttcctctgtccttttccattccggtctttttataaagaaatactattgccgctcctcctataggcaataaccatatcagccaaggcatttctactcttatttccgtagccttttcaacgcatatatgaaaaaaaacgccgacaattcctacaaaagcgccgacgacagcagctatgattatccactttacaaaggatagcaacatttttccaatatcctctaatttgccgccttccattttaaaaatacgcccccttaaaatatatactgtttttatgccgttttaataataatacactgttttatttatttcaacaaaaagcctgaatttatcaaaaaacccgaacaaaatttatatatttcattcgggttaaaatatttttgcaatttttatatcttgaaataacagtacagactgtttatctgttccgaatcggaactgtcgatatacaatttttcaattctgtaatttcccttggaaagctctccgtacatatcctcccaataaaacttaacctcggcgcttcctccgccttctataatatacgtcatgtcgttccagtcgggttcctcgcttactatatagttaagttttttccaatgtccgccgataaatctctcgattgcgtaataatctccgaaagcgatatcattataagtattattaacgatagtaactttcatccctctcgttgtaagagtttcttcatcggctttcatatacagttcgttatccgtttcctccgttgaatctgcactgtttatattgtagtctataccccaattgctgaaaacaacctctttgttattagccattctggcaatatcgattttatacagcaatccgaaagcgcagcacagtccgcaagcaaagcatatcaaaaaaatcgcaacttttttcacttaacagccccctgtgtattatcggtaaaaagaggtatcttaacagtagctttaaacacatctccgtcagctgttatttccagtcttccatcctgtatttccgaaaggctctgcgttatggaaagtcccagtccggcgccttccgtcgttcttgaagcatcgcctcttacaaatctctccgtcaggcttttcaaatctacgttatctattggtatagccgaaacatttttgattgttaaaacaccgtctcgttccgttgaaaaaatgtcaataaacactcttgttttaggcatagcatacttcagtgcgtttgtaataagattttcggctattctccacatatgtcttccgtcagcatatatatatacgtcctctgtggcatttattttgaattcaagatctgatttttcaattctttcctcaaattctcctaacgcctgttctataagttcccgcaggtttatcttgttttttgtaaccgcaagatttccgctggacgccttacttgcctcaacaaggtcttctataagctgtttaagtctgtttgtcttttcatcgagaatagcgacatagttttcggctttctcattattaagctcttctcttttaagcaggtcgacatatgtaattattgaagtaagcggagttttaaggtcatgcgatacgtttgttataagttccgttttcattttttccccttttaccgctcttccgacagcctgtttcaatccgttttgcatatttgaaacatctgtagcaaaatttttcagtgccggtgaaatttcatccggatttacctttttatcaaaatttccctctgatgtttcttttaccgcaaccattattttcttaattgacgtcaatgccctcgccgcaaaaaatattcccgccaaatcgaatataatcaatattataatcggtatcgatgagtagctcttgcatgcgacaaacataagcagacaatttataactgcatacattataagacataatattatccatattctaaatgtagattctttgaaaaaagaagctacccatcttataaaataccctacaactgtgtttgaaaacagtcttctttttttaatctgtcttgacatacatgtaaggtagtttataagcactacaacatctatcataaacagcagacagataaagccttttaacattatcagccattcgccgttcatataatatatgctctctatcattctcctagctaaaatatacgatacatacgcgacagccaagaatataagcgtacttatgtcattaaacacatagtctaccgcaatcagggtaacttcgctgtttttacttgtctttcctgccgttataaccagataaaccgtaccgataatcatcaatatagcgcccacagcggcagccatcacagctctcggtgcatttagccttctgctctcaaacgcttgatattgttttgcgaatacgccgtttccggtttctacatcatcacttacacctgcgtacagtgtatatccgctgtttaaaagtatcctggaaaccgaatcaagatagttgtcataatagaaatagtttacaagttttccctcgtcggtatagttgtaataatactctgtatcatatactacttttccttttgtatatcttccgtcaaggaacgagtttatcttaagattttctatttcctccgcttcacggttagatacctcattgcctgttctcgtatttacaagacaataataaaaatccgtatatctctcaagttcttttatggcgtcctcatattcgtacaactgatcctgtatagcctgctgtttatagtcaggatatctgttattaaaatactcttggtcatcactgtttgaaaaagttacatgctttactgcgtttgcttcgctgtatataacgtattctcccaaaccgttgtccaaggcaaaattatatattactttttcctcattaagcgcatttccggattttatattttcttcgcttttaaatacgagttttgtatttacaacgtctcttaccaattggctgtactgagaatagaatgtttccgtgtcaaaatagctgttatagctcagtccggattcaaaactcatatccataacatacacaaggttcaaacatgtaacaagcgcggagcataacacaagaattatggctaaaatttttgtctttgccgaatacagcttagattttttcaattttgtagccaatgccccacaccacctttaaatatttcggttctttaggattgatttctattttttcccttattcttcttatatgtacggaaactgtattttccggtgcaaatgaaagttcattccataccttttcatatatctcgtcaattgaaaatacttttcccgcattttccataagcagctggagtattccgtattccgtagccgtcagttttacgggctctccgtttactcttacttctttggaatctttatcaagctcaagatcccctatttttatagtgcttcccttttccgctatggatccgagcgcagtatatcttctcatatgggatttgaccctagcaataagctccagtggattaaacggctttgttatataatcgtccgctccgaaatttaatcctattatcttgtcggtgtcctcagacttagctgaaagcattattataggtatattaagagtttctcttattttaaccaccgccttcagtccgtccattttcggcatcattatatccattataactagatgaacctcgttgttttcaagcaccttaagagcttcttcaccgttatatgccttcaaaatattatagttttcctgttttaaatatatttcaatggcgtcaactatagatttttcatcgtcgcatacaagtatattaaactttttgttatccatatatatcccccttaacatagtacatagtacaaaccatcaaatttatcatataattttttctttacaaatcatatccttttttctttcgatattcttaattctaacacaaaaacataaatttcgggatgttaaagttaaaaaaagaggcttttcgcctctttttctacataaactcatttataaaacgtctatttttattgtctttcctgccgccactgagtaaataaggcattctttaaccttcatacccgttacgctttccaacgcctttgaatataattccatttgtatgccatacctgtttctaaaactttcgtcactgtcctcatcatagcgatcggtcttatagtctacaataactatgctgccgttttcaataaaatagcagtcaatacgtccgtgcagaattatattttcatccatatccgcatattctttacgcttatatatttgttcgggagtaacagctgctgtaaacgcttcctccttatatacggcttcggcgtttaatattcttctgtacaattgggattttgcaaaggtttctattttttttatgctcaccgacgaagcctctttttccgtaagcaatcctatttccgtacattcttttatgagttcttttatttttaaataatcatactcctttgaaaaatccatatgttcaaaaacagtatgtaccgcagtacctatctcggaagccgaaagacccttctcttccgtatagaaatccggtttttttactgtatgcgacaatgttgttccccttatcctctttacgtccgaaacggatactgttcccggtatttccgtctcggctttataagggtactcccagccgagccttgctcctatctgggctttcaaaaatgccgcgtcctcttccgtgaacggtttatcattctctgcattgtctttttcgatgttttcgtaattttccgacgtatagtttacaaaattaagttcaaacaaagcatcattatcaaagagtccgtttgttttatctgctttgcttattccgctcagttctcttaaatattctccgtccctgtgtctggctacagtcattagtatccaatccatatagcatccggctgataatatttcaaatggaggaataagtatttgtctgctctccgcaaacattgtccaaagcgatatttttgacgcgctttgcgacgaacagcctgttataataagcttttcctttgctcttgtcatagctacataaagaactcttatttcctcggcagcctgatcctgccagatcgcttctgttattaccgccttcggcacagtattgtatttgactctcgtttccgtatctatatactcgcttcctattccgagatttttatgcaatactacattgtcgttcaaatccgttttattaaaacgacctccgcacccggataaaaatacaacggggaactcaagacctttgcttttatgtattgtcattatacgcacaccgtttcctaccgcgccattttctccttcgattttagcattgttcttatctataagttcgatatatcttataaagtcaaaaagtcctttaaaactcaggctgtcataatccgtcgccttttttacaagcttaatcagattatcctgtctggttttcccgtcgggcaaaactccggctaagtcataatatcccgtatccgtatatacgctccaaataaggtcattaatactgctgtctatggaaatgtctctccatctgttcagcataataataaagccgttaagtattttctttattctttcatcgtttccccgttcgtcataattacgcacgcagtcccaatattcctcgtcgccgctctctatttttattgtaagcaagtcgtcggcagtcaacccgtatacaggagagcgcaaaacggcggcaagcggtatatcctgtctcggattgtctattatcctcaagaaacttaacgctgtcataacttccgtcgtctccaaaaagtccacgttagactccgttgaggcaggtattcccttcgactccaaaatttctacaaactcagctccgtgcgtcttgtttctcataataataacaatatcgctaaacttaagctctctgtaacattttgtcgaacggtcgtatacttccatcctgtccttaccgtacatcagactgttaattctatccgcaacaaaattcatttctttttcaatatttgtgtagtcatcttcgctgtcgtcatccgtatttataacgtcgatttccacagctcctcctgcggttgcagttccagtatacataggataatccgcgccgtaatacagcatggcgtttttatcgtattcaactccacccaactctttttgcataatctgcatgaatatataatttatgccgtccagaacttcttttctgcttctaaaatttttaaacatgtctattctctctttttctgctcccttttcaagagaatatgtgttatatttctcggcaaaaatatccggatttgccaatctgaagctataaatactctgttttacgtctccgaccataaatctgtttctttctcccgaaacaagagataatatcaattcctgaacggcgttgctgtcctgatattcgtctgtcataacataggcatactttgaagtcagttcctccgccgcctgtgattttacgggattatcgtaagaaccgtctataagagctttcagacagtagtgctccaaatctccgtaatcggctattcttcttcttttcttttcttcatcgaacatatccgaaaattctttgacaaggtcaagcaatccgcatataccgaatccggctttttttatgtcttctttcatttcatcggtatttctcataagaaattttgtatttacggaagatatgatttttttcactctgtctctcaaatattttactttttcttttgtctcggactcgcatttttttctggacaatgcggaaaactttatgttttttatttttaaacatatttcctcaaagcttgcgcttccgcatatatcctccaactgttccagatcatcatacagcataggcaaatacgtctccggccccgatatttccgccgtttcaacagctgtttttgtaagctcgactgcgccttctatataaaacaggagatactttttcatcatatcaaaccaataatccgctccgtctttataagaaagtttttgtttttctatccagccttccgggttaggataacttctcataaactcaaatattttcagtacaagttctctcagctttacatcgcttgttccgtcgctgtagttttcaactaaataaaaaaagtcctcgggttcgtcggaaccgtatttttcctcaaacagtctgtctaatatttccgcctttataagaagagtttccgtttcatcggcaactctgaaggcagggtctattccgagtctgttatagttttccctagcaacgctcagacaaaacgaatgtatagtcattatgtcggcatggttaagaagaacagcctgccttttaaggtttacagaatcgggattttttttaagttcctccgtaacggctgctcctatacgttctttcatttccgaagccgccgccttcgtaaacgtaacgacaagcagtctgtcaatatcaacgggatttgtttcatctgttatcaacttgattattctttccacaagcacagccgtctttccggaacctgccgccgccgaaacaagtatattcccgtttttttcatgtatagcgcttaactgctcatcggtccagcccattttatctcctctattcctaacaagccccttgcagtctctgctccagggacatatattttgtaaatgaattaaacatagtttcataggaattataacagaaattttctataaaagctatcgtatgccttccatacttgtctttgccgaaaacatatctcataaccgccgaggcaaacatctccgcaaagttgcccgaatacataacagcacaagcatatagcaaatcaaacattttctgttcgggttcacacatattaaacgcattaaataacatttctcttgtcttagttacattcagcgcacactgtctgcacctcagtatttttatggaatggtgtattgccataagttttataaatcttctgcctttctcctttgtcatggcataaacattttcaccgaagatatttccgtttacacgaagttcggcaaaatactcataggcgtcggctgtagttgaattaatacattcctcaaaaaacgatacataaaagctgtttttaagcatataaatgctttcaagatatttctcgccttcctcttccaccgtagttttaataatatcatttcgtcctttcggacctctatataaaaaatcaaacatagatataacctccatgtttgaattttataatattttaactatatgtttcaaagcatatcatgcgcattttgcgacagtactttttgcaaatcgtcaaccgttatctcaaggctgtatcctcccagttcatctgcaaggctcgataatatcaggttaacatcgtcggtaaagtaaagcatatgcgtcatatcgctccgttccgcctcttttaaggcttcttcaaatctcataatatcctcggcatactcaaccttaaacagctttttatatatttccgcaaacctatccgccgattttttaccttcttttttgtatgctatcattactcttacttcattttcgtccatatatttatccaccccttttgacaatcatatcaacagaaaataaaaaaatcaataaatattatgcacttaaacaattgcaatatttgtgccaatgggataatatattacaaaacatattataaaaacttatttaatataaataaatcgagggggataagcatggaagcgctaaagaaaaaaatattgaccgacggaaccgctatgggaacggatatagtaaaagtagacagttttatcaatcatcagatagacgttgcctttatgaacgaaataggaaaagagtttgccaggatattcagtgatgtggaagttacaaaaatagtaacaatagaatcctccggtattgccatagccgctattgcgtctcagtattttaacaacgtacccgttgtttttgcaaagaaaaccgagtctcgtaatcttgaccctgacaaatatcacggagaagtatattcatttacgaaacaaaaggtatatcctattatgatttctaaaaaatatctttcccctgaagataaaatagttattcttgacgacttccttgccaacggcaaagctgcccttgctcttaaaaatctttgcgagcaggcaggcgctaccgttcagggaatcggtattgtaatcgaaaaaggattccagggcggcggtcgtctccttcgtgaggaaaacaaaataagagttgagtctcttgctattatcgacagtattgacgacggaaaaataacattcagagattaataaaaaacagcggataaatttatccgctgttttttatttgttatttataatttttaggcatgtagttaaagcgtcctctccatcaggagatattatatccggttctgtaccgaattcttggcttcctgatccgtcataagatactccgtatacaggactgtatcttacaataagtccgctgttcggcatgacaacaggtatcggatcaacgcctattccgtctcctcctgttctcgttccgacaagagtagcaaatccggttgcctttgtaaacagcgcggcatattcagaggatgaaaatacattttcactgacaagaatccatagctttccgttaagcattttttcattattcagcggctccacagtatactgtatcggagatactgcgtccatacattttaaatcttccttgttcattttcggaagttcgggcatagtggaaatatcgtcccactcggataccttataaaatttttcgttaagacttcctgcctttgccaatccgtatgcctcggtggaaagagttttatcaatattaggggcaactattaaatcatcaaagtatgccattcctcctccgccgttcattgtaaaatcaaaaattacattttcgtaatccttaattttattatagaaagcaaatagtttttccttatcttcttcatagcaggacatatcaaagctattaatatttatatacgctgttttaccctcctctattatttttgtttcaacattactatatgttttctcttctgtcatttctgtatcgttctcttctgcgctgtaccagctctgcactttatcatatacaggccaaaaaatatcctgcatattatcatagctttcctgtgaaagtttgtttccgtatgtgtccgccagctgtttcatttttccgatttcttcctccggaatgccttccatatcattatagccttccacaaaccagtcgtattccataggagttatagtagataaatgtccgaccatattagctgtatcaacgaatttttctattatataataaaattctgcatccgttttacattggcttattaaagctctgcttttttcatactcttccttcaaatcaacgccgtacattctttttaatgttccgaaatacggataattttcatcaagcgttttataaagataatcgaaatcttccaacatctgttcattcgtcaacccaatccaattcccgttttgaagcgcggcaaattctgaccgtacttttggattatccggttcataattaacaattttcccactatcatcctttgtaaagaagtacagcaagaaaaactcttcaggaacatacattttctcattttctattttcgcccctgatttcaattcagattcatatccgcttgcaccgataaatttatttacatcagcacatgcccaagctttaatgcttccgtcggtaacctcggcagttcttttttcgctgtcccatttaacatcataaccgagtttttcagccgtttctcttagaggaaccattaccgctgaatttttatcacctgtattatttactgcgcacaatttatcatttgcaaaagcagtgcatgataatgcggctgtaattgcaattataacagctgtttttttcatatccatagttttacctccataaaaatacaattccgcaagaatgcggaattgtattttattatcagtctttaacagatgttgctattccgtcgtcatcgaacttaaccgttacatttgaaactccgtctccgtttacaagctttttaaggctgtttatattaacgttatcgtactctgttccgtcaatatctattctcgtgtcttcatcgaaatcaaatttaacctgatcccatccggagacttccagtcccatttctcctctcggatagttgtcgttgcttaccgtcataaattcaaggtcgccttctatttcgtatacatatccttctattcttgtaacttcgctgtcctcaaccttaatatcgacgcgtattttcatatcgctttcaaaagcttctacaaggtcttttatttcatctatgtcgtcgcttccgattgtaacatctacccttacatcgtctgaaatatcatatttctttgaacctactttgatttcgtccttatcaagttccttgatctctccgctgtattctttatcgtcgtcctctttataattgcttgcttcagcctctattttcttaacttcgtcatcatcgttaagcgtaagctctacatctatgtatctgctgcctgtcaaatcatcaaaatagtctctgagttttccgacacttgaagagcttccgttatattttacggaaacactgtctgccaaatcatatctgtatgtttttgagcctgctttgatacttattgtcctgctgtttatgtttgttattcttccttccgtattgctcttatacttttcttccacagcctctacaacttttgcttcctgtgttgcggaatccatttcgactgttacttcaataagagcgtctccctctatacggtcggaaagctgtctgagtgttgcctttttgccgttaagcgtaatatttgcgttttccgcaaccgtataatacagcctgtcgccgtgtttgtcttttaatcctatcttatactctccggcgctgataagttctcctttattcttatagctgttagtatactgtggattattaacattaccgggattaacgacagcgtcctttgtaatcacaacttttgctatcgacgcgtcagcatgatataccgttaccgtatcccccagaccaagaccgctcggtcctacattactgcttgcgttattataaacgggcgtagcgcttgtaagcacaaaaccggctaccccatttgatgtcgtaagtctgagcacccatgttccgtttgattcatataccgataccacaactcccgatgtctgtttataacccgactcctcatttgttactatcttctttttcataaggtcatatgtctttgaagcaataaccgaaacctcagcccttgttatattagctttaggattaaagttattgttattgtctccgctgacaattcccattttattcagcagttcaacatacggttttgccgttgccgaaatgttccatgtatcgttaaatgccaaagaagttcccgttgatacggaatagttaagagcaagagctcttccgaaaaatacagccatgtcctcccttgttatttttacatcatttccgttttccttgaactttgtaaggtcataagaatttaatattcccttttccatgcaaaaagcaaccgctttttttgcccattcgtctatgccttctccggccatctcgggagaatatctgtttatactcatctgtgtaacgtctgttgcaaatcccgattttaccgctgcggaataaacaagctgtgccgcttcggagtaagtcatattttcatttcctctgaaaacacgcttaccgtttttaaaatctcccaccataagtccgctttcatatacgctgtttatataactctcagcccatttcaagctgcttcctatgtccgaaaataccgctccgtagccgaccgtcgacgtagacatgcacaacgctacggcaagagctgtaattgcatacttcttcatctgtttttccccctaaaacaatattaatatttttatagtcaaagacattattatctgattatgattatataacataaacctgcatattgcactaaaaaatgcgtatttaagaaaaatttcatatataaaatcgcttttttgttatgtaaaagcgttctcataccgactattcaattatatataaaaataaggaagcgtattacttattgtcgagtaattttcgcttccttaaactaagttttttagattaatctatattattgttccgtttatccgtttgatttaaaatttccataaactcttcgcctgatatagtttctttttctatgagaaattccgctattctatgcaattcctctgtattttcctttaatatatcggcagcctttttatgacagctttttattatgtttaggatttctgcgtccgctctgcttcccgtattatcggagcatgtcataactgtatttccgttaaggtatctattggattccttttcaagagccatcatatcaaattcatcgctcattcccaatcgtgtaaccattgcccttgccagttccgtagccctttctatatcgttcgccgctcctgttgttacagtgttaaatataagctcttccgccgctcttcctgcaagcaaggttacgatttcttcggttatctcatcttttgtcataagataacgttcttcctccggcatctgcatcgtatatccaagcgaacccattgttctcggaataatggttattttctgaacaggctgagtatttttctgtttagctatagcaagcgcatgtccaacctcatgatatgcgacaatttttctctctttctgcgtcattattctgtctttcttttccttgccggctataacaagttcaatagcttccataaggtcgtcctgattaaccgtttctcttccttctcttacggctttcagtgcggcttcgtttaccatgttcgctatgtctgcgccggagcagcccgaggtgccgagcgctatttgtttaaagttaatattttcatcggttttaacatttttcaaatgtactttcagaatatcttctcgccctttaagatcgggtttatcgactattattcttctgtcaaatcttcccggtctaagtaacgcctcatcaagtacctcgggtctgttcgtagctcctattacaactattccctttgtaatgtcaaacccgtccatttcgctgagcaactggttcaatgtctgttctctctcatcgttgcttcccaatgtattgtctctgctttttcctattgcgtctatttcgtcaataaaaattatacacggtgaattttccaaagcgtctttaaacagatcccttactctggaagctccgacgccgacaaacatctcaacaaaactggagccgctgagagaataaaacggaacatttgcttcgcctgcaaccgcctttgccagtaaagtttttcctgttcccggaggtcctacaagcaatgctcctctcggaagttttgctcctatttcggtatacttttcaggtctatgcaaaaagtccactatttctttcagagactccttcgcttcttcctctcccgcaacgtctgcaaatgttattccggtttctttttccatatacattttagcgttgctttttccgaatcctccgcccattcgtcccatggcaaattttactataagcataattgccaaatagaaaaatacaagaggaaatacaaattctacgaaaaagatgagtaacggatttgtattattcggcggtgcgtcgtatacgacgttattttcgtcaagctttttaagaagctccggattgtttatataccctgttgtatacttatctttttctccctttttattctccttatcttccttaagagtaaacgttattgtcgaatttttaaactcgacctcttcgacttttccctcgtcaagcatcgtaataaactcactgtattttacttccgatacgcttgccgaatttcttttcccaataaaataatttaaagccaatgtaaataaaagcgccgctatagccaatacaagcagtacttttctgtctttatttttatttttcttgccgtcgggattatcagcaggcatactacctcccctttccatacggatatcattcaatcctagccgcagctgcggactgtatctattataatataaaatccgacaattaaaagaggtcaaattttaaatatttattaaaatagttttgtatacccattcataaaccagaccgaccgtaaaccacaacggagcgtaatcaagcctgataacgtcctgtatagaatatgcgcttgaactgtaatcccacggacaggcggaatatttttttaaaatgcgtccgaagacatactccgctataaaaatgcagagcatatacgtacctcctctgattgcccacggaagcatcgtaagaagattaattatcggctccaacagtactcccatgccgtatatcggaaacatccatagcgaagacgttcctctcagagtcctatcaccgtttcttacgctgtttatgcctgtccataaaatttccagtccccagcccagcagtccatataaaacaaatctgaataacatatattcattgttcccacaatcgtatggtaattatgtatttttatttattacgtttacaagtatttcagccaaaggctccattgcattcattgcctcctgctgtgtgtttgtctgtgcccccacttcgacaagcagagacttgggaagcatattaaggctgtatctgtaggcattaagataattttttctggcatagcccggatacattttatcggcggcatatttcattgtaaagctgaatgcaagattttgttccaaataaggattatccaatcctgctgtcggtacaagattatcattttcatatattttacataagccgttaaaaaacataatctgtgcggtcggctttccgtttatctccgttacaagttttttagtctcatcgcccaatccgtccctgtgaagatctatcgctatttcaatggacggattttccgccaatattttttcaatgaccggttccatcctctcataagctcctgtagtcgtcattttggaatccacatagtcaaaactttccgtacaatgcattgtctctattccgtacttgttttccaacaattctttcagatattcgcctgcgcctacaattcctcctttattccccatggatggatcgctgtctgcaaatttttcatgtgagtgagtatggaatataagtattttcggcccatcggtttctttatttatggaaaaatccatgttaataaacttctcaccgtttatatctccctctcttatatctgttctggagtctactataaacatatttttctttaaataattaacatccgaaaaatttttcttttcttcgtctgtcattacaaacagctctccggggtcaatctccacaggttttgtctgttctttttgcggagttttaccgtttttcttttcaatacttattttgctttcgtgttccgaagcataaatttgcgaaagagtcgaaattgttaccgttcttttcggcattatttccgacagcgctatgctttttaaaaacaaatcgttatcccatactgccgccgacgctccgaaaagcgccagcacagtcaatcccgtcatattttttttgaaaaacagcctgtaattaaatccccaccttttcaaaacgtctcctccttagtataaccttcatatttccctaaatgtaatatattcacttgaccttctttatatttcaaaatatatttgtactcggtgaaatttgtgatatacttgtaattaatcgtgccgttatttcggcgcaatatgaacaatgaaaggacgaaacaaaatatgaaattaggaatcgtagggcttcccaacgtcggaaagagtaccctttttaattctatgacttccggaaaggccgaagccgctaactatccgttctgtacaatcgatcccaacgtcggcatagttgccgtacccgatgaacgtgttaacaatcttgcaaaattatataactcggctaaaataacgcctgctgttattgaatttgttgatattgccggtcttgttaaaggcgcaagcaaaggagaaggtctcggaaataaatttctctcccacataagagaggttgacgcaatcgtacatgttgtacgctgtttcgacgattcaaacgttgtacatgtcgacggttccgtagaccccgtcagagatatagaaacaataaatctggaactgattttctcagacttggaaatacttgaaagaaggattgcaaagacaaccaaagccgctcagggagataaaagtctcagaaaagagcttgtaattctcgaaaaattaaaaaccgaacttgaaggcggaaaatcagcgcgtcttgttgaatttgacgatcccgacgataaagcttttgtagacagccttactctgcttacatcaaaaccggttctttacgctgcaaacgtgtgcgaagacgatcttgcagacgacggcgcagaaaacgattatgtaaaaaaagtaagagaatacgctgaaaacgaaggctctgaagtgtttgttttatgtgcgaaaatagaagaggaaatcgccgaacttgacgaagatgagaaaaaagaatttcttgcggatatgggcgtgtcggcaagcggacttgacaggcttatatcagccagttataagcttctcggacttatcagctatttaacggcaggtcctacagagtcaagagcatggactatcacaaagggcaccaaagctccgggtgcggcaggaaaaatacacagtgattttgaaagaggctttatcagagcagaagtcgtatcttatgacgaccttatgcgtcttggttcatataatgccgcaaaagagcagggacttgtaagatccgaaggaaaagaatatgttgtaaaagacggagacgttgttttattccgatttaacgtataatactgaaaatgactttgatttaaaaatcaaagtcattttttcactcttttttaaattgtggacacatcgcactgtgcgttttcatagaacgttacctgtacggttgatttcatatcaaagttatagtactccgttgtattggagtttgcgtctactacacaaatatcatacgaagcctcaaaatcgggattatccaaagaaagttttacctttgttccgtccgctattggtgatgataaaagattttctccccaatctcccgctcctgttaccgctacataaatatcggttatttcaactccggaagcattggcagcataaaattcattatctgccatagcgtcgatttcttcagatgttatctttgtaaaatcctcatcggaagtatcggaagcgcttccgtcatttgtgttttgttccgtctgctgacttccttcagcgtcagtcttatcttcatctttaccgcagccgaccgccgaaaccgctataaccaaagccgccgccaaaatcagcaattttcttttcatcagtatcgctccctttctttttaacgtcgttattatactaaagcaaaatttaaaagtcaacgaacgtcgtacgttttaattatagtttaagcttatacatattttcaggcgataaaaaagccccgacatacatacgtttataataattcgattttgtaatcggcaacgtatatatgctcaggacttttcaccgtttatttttttactaattttttgttattccttgtaagctcatattcgggaagaaggttcttcttaaacataatatcgagatttttaagtatgtctacctccggcatacctatctcatcggcaagcatcggtatcatcagagttccctcgtcctcaacctcaaaaattatttttctgtatacatttgcctttttataagcttcataacccattctggcaaatattgcacctaaaatgccgtaaataccacagaacaccatataatcttcacctgcgaatattgctatggcaactgctcctcccataaaaataacgccgaaaaccatagctatctttcctaagttaagacatgtttttctgctgtactgtcctcttttccacattaatacagctcctaaaggccacagtaaaaggcagactatggcaataaatatccagctgcaataaaaaggcactttttctttatcattttgtatactcataactttttcctcttttccccttgttttccgcctatatgtcttatactctctgccatttcaaggcaactatatcctgtcctgaaatctctttgtaaagacgttccccaaaatcgcggctttttatatcttttctgtcaaaaactattataccaaactcttccgcttttttaaatgttcccgtattttttattttgtcatcgcccgatgtaactataactcccttggaaaaccatcctcccaatctctttctctgtatatacagttcatttatatcgggagttgcgatacgcctcagtttgcatgatatgaataccggtatggaattctccataataataacatctatctcgtttcccgccattgacacatcatcataggcgtcccagtctatcattgttcccaatttaacatcggaaaaccgattaatctttttcgcgcttatgaatacgtacatttcaagccacagaccatatgtagaaagatatgttttcgcctcgggataactgtaagtaaagcttatcctgttggcgttcatgctcagttctcttataaaaccgttcttctcaaacatttccatcatttttctctcgggtttatacctttttccgtctttatgaagaaacggtatgtttgccgaaaaatgaagtcccgcttcacttacggaccttgccgcctgaatatatccgcatgtataactccagtccctcaggtttttgaaaatatatcggcacatttccaatatgtcttcatagtttttttcatcaggttccatatgggattcaccgacaaatgccgctccttttgcatcaacaaaatcctccagcgtaagccttgcggtatccaatacaaattcgggatcgtctatatcctttattttacctgcggcaatgtcagtataatatattttcgctttcttctcaacgccggccttatgtccgcctatcatcatcagttcgctgccgccggtcatttccattgcgcactcgccgtatttatctattaccgcgcaggttttttcataaatatcctgaacactgtttatatcaacggcaactttttcaagttttatatgaggtatgtgttttctaaaacacttttttaatgcgtcgaaatatcttccgtccgttattgcactgtcataaatgtatacaactctttcgggcttcagcgtcaacacggcaagtatgttttttatagtatccttatcaaaatattctataagagtcataaacttaatcctctacaaccgtcttttcctcaaactttacggttttttcttccttttcttcttttttaccgaaagcggaaccgaagttaagtttagcggctatacccggagccatatcaatcagtttacttactgcgtcctgattttttatgtttaccaactgcaccgttccgttggaaatcgcaataactgcgctgggcattatttttgcccccagacctccgccgcctgctccgttatttgcaccgcctgctcccacgccgacagacacgtctacaagcggtataagcgttacttcgcctactactacgggttctccgacaactgtttttgatgaaacaaaattatccatcttgtccattaatatttcaaggttatttcctattccgttttccatatcaatcaccctttaccaataaaataattattttcctaaccggtttaacagttatgaatcttaaaatatataaaagcatcattgctggaactattcttcccctaatgcctatttcaccattaataatttctttttcaaaggaagcttccgcttcgatttttttattcaaaattccgttaagcgcccaaagcgcccctacgatctgacccgtcattgccggatccgaaagacctattgttcccttcgcataaaaatctttcggtttaacacttctcaatattgattttataagtttaaatacagcgttaatcagttcttttctttcctctttaggcattttcttaaagtaattaaaatccggtttttcatgcttctcggaaatttcttcctcttcttccgcaaaatcctcggacatttttatacgtttgacttttacttcggcgctttccaagctgcacttcggttctttaatgtcttcgagttttattttccttacttcgttttcatcaaatttttttgtcggctcggatataacggtattcggttttttttgtttttcagccgctttatattcttcatttttttcggaaaattccttactatgctttattacgacagcttttgaatgttcttttgccgatttcttatttaattcttctgtttccgatttatcttcttttgtctcggaaacattttctttttccgataagcctattgttttccctaatatttttataatcgtttcaaattcgttttcatcataacttaaattcagggttataagtccgaaaaataatttgacctttgccaaaaattcagtcttatcatactttttcccatttatatcataggaaacaggacatacaagcgccgcaacaatcataatgaaaatagcagccaatacccatagtattaccttaccaactattttcaatactttcagtacagccgtcatatatttctcctctttttatcagtaatatacacacacgcgccactgccgactaagacagcaagaacagcggaacaataacctgctattttaagcgccatatcggcaaagaacggttctacaagaatatttataatcatatccttttcggggtcaagcagccaaaggtcgttatcgaaaaacaatttatgaaaaatcacaaaacacctgttaaaatcaattgccgccgcaacggcgataacagctgccgcagcaattacgacaatcgatattataccggcatataataataactttccgacatccatgcccttcatggctattaacagcagtacggaaactataaatataatagtagacgcagtccttattttaaatgccgcatcgaatattactttgcaatcctccatgtgtattttttctctctgactgaaaaaatcacgggtttctccgttcacttcggtaataatattctccaaattttctctgtctccgttaaggtaagccataagctcgtccatcacatacattatgtcatccatatccatgtctatattatcggtaacagtatgtttttcaaactctttcctataatattccatatttccgaaaacagccaaggaaaccgcatttaaaagagtcataactatcagtgatatcgccgatataaacagtataatccttttaaaattcatgtctgtcctccaacatatatctcagaagttcaaacgcctcgtatttaccgccggcaattccgtaaacggtatatttatctctgtttatttcttttaaaagctccttggaactcataatttcatacataaattttccgccgttattcttcttgcatatacaaaatatgcctgccggctcctttccgtttttcagcatatatacaattacaccgatatccgatatgtcattacctatataaagctcattaaaaaactccatattaccactccgaaaacatagataggtttagtataccaaattttacggtttttgaaaacaaaagccgatatttttaatggaaataataaataatagatattattttaatcaacatcgtaaacatcttttaaaaatctaaatacttaccgatttccattcaatacacaaatctattatttttcaacattatattatctccgattaatccaataaaaataaccgtctgctttatatattgacgttgtcatataacaaaaacaaacggttaattttgatttttttattttgttcttaattcagttgcttttttcgcaacaacagcgatttaatgctgtactctcctttttccttatactttctcatagtaatgtaatatgtagctaaaagaaaaatatcagctgcaacccatgcgatagggtttgaaagacatactccgacataccctatgtatttgacgagtataaacgccgtaaccgatcttcctgcaagttccgttacacctgctatggttgttaccgctgattttcctattccctgcagggtattcctgtaaataaatattattccgaggcacggataaaaaatactctgataaataagaaactccatcgaatagtttatcatttcagaatagtatgccgcagcctctccgcttgcgccgtttaagaaaagtccggtcatgggaacacccaatccaaggcagaaagcaagtcccaatccccacgatataatacaatataccattgaggcaaagacgccgtcttttattctgtcgaattttttcgctccgtaattctgtccggcatatgtagcgcatgccgttcccagtgagttaaatgtctggtttgctatattatctatttttgtagccgccgtatatcctgttacaacgcccggcatggaactgttaagtccgttaagcgccgtctgttggaatatacaaccgacagcggttatggaaaactgaagagccatagggagtccgacatatatatgtccctttatcatatttaagtcaattttccaatctgacttatgcaacctaagagcagggtatgccttaaacatataggctatacacacagcgcctgatataaactggctgacaaccgttgcgaatcccgctcctatatacgtcatatcaaaacctactatacaaacaaagtcaagtattacatttaatactgccgaaaacacaaggcaaaaaagaggcgtcctgctgtctccaaccgccctaagtgtatttgcggctatattatataaaatagttgctcctattccccaaaatatcgtaacaagataatagtaggcatattcataatagctttccggcgtattcattgctttaagcaaagggcctgcaagcggaaccgaaatcgccgtaagaagcgccgtcattactaagcatagttcaaacgataccgcgatacttcttcttaatccattttcatctcttgctccgaaaaactggctcgttcttactccgaatcccgatgtaagtccccaaacaagtcccaatataaggaaactgatagacgatgtacatcctaccccggacatcgcgtcagacgatacggtatggcctacgattattgtatccgccatattataaagctgctgaaatatattacctataagtatgggaagtgaaaatttaagtataagcttaaaaggacttccttcagtcaaatccagcctcacattaattacctccgattaataatacattaaatttctttttgcagttagatattctagtacaacatactaaaaaaatcaatataatatcattaattagtgctattgattttaaaattcatcatatcttttatactaatttgtttgttcatgataccactaaaaagctacatgggtaatagatttctacttaaagctatagttccgatataataaaataaatcaatttattatatccgatgctcaagcatatcatagtgaagataaatttcttaaatgattttgctcctaaaagccctaaattacaggcttttttagccaattgataattttttaaaaattttttcaaaaaagtgttgacaaaaagcacctatatgaatataataagtattgttgattgacaaagcaaccaataaacagtgcgggtgtagttcaatggtagaacgtcagccttccaagctgaacacgagagttcgattctcttcacccgcttttattatgttttaaatatggatcagtagctcagttggatagagcaacggccttctaagccgtgggtcgggggttcgaatccctcctggttcataaaaaaatacggcaaagctgttgaaaagctttgccgtatattttataataagaatataaataatgtccctatatcggtttcctttctcgggaactttaggcacttatgtttatcgggcaagctgatagcttgcttttgttgtcttaaataagcggttatggcggaattggtagacgcgccggacttagaatccggttcgaaagagtgcaggttcaagccctgttaaccgcatttttaaaagcttcgatttatcggagcttttttatttttctccccctgctttatcatatcattccgggaaaaaatcaaatttgtccaaatagaaaagacggatatcctttaatatccgtccctaagttattttgccaatccaaaatataaaagtacaataactcccaaaacaattctataccatccgaacactttaaagtcatgctttttaatataagccattaaaaatcttattacaataacagaaactataaacgcggatatcataccgactaatagtatagcaacttccatacccgtaaacgacaaaccgaacttaacaagtttcagcaggctggctccgaacattaccggtattgccaaaaagaatgtaaattccgcggcaacagttcttgatatgcctataagcaaagcgcctacaatagttgcccccgatcttgatgttcccggaaatactgcggctatcagctggaataatcctattacaaaggctgttctgtatgtaatatcacttaagcgtcttactctaggcctt

SEQ ID NO: 3627 - DNA, 22219 bp, Unknown
  16S sequences of unknown bacteria
gccggaagcagatatagcatccacggatgcgcgttccggaatgctgtcacataagtgatactgttaccaaacagtcctccgaagataccaagaatcactccggcaatccctgccagaaataaccatcgagccagcaatatggcacggccataacattttctgataaattccatcttttccactctcccgtacttcactgactgtccaccgaggattcctctctgacagccgcaaaaggagactgtgattcttcacagtctccttcttgtatgaatttaatgctattttacacctcggctgctcttgctgcaacttctttttcctgtacatcagatggggtctgctcataacgtgcaaactcataggaatacgttccgcttccacctgtcatggaacgaagatcggtggaatatccgaacagttccatcatcggcacatctgccactacttcagtcttgccagcacctgccggattcattccaagtacacggccacgtctcttgttcaggtctcccatgacatcaccggtatatttatccggaacaagaactgtcagagtctcgatcggctcaagcaggatcggggatgcctccatgaatcctttcttgaatgcctggatcgctgcggtcttgaatgccatctcagaagaatctaccggatgataggatccatcgtagagaacggctttcacaccaactaccggatatcctgcaagtggccccttctgtacagattcctggatacctttttcaactgccgggaagtagttcttcggaactgcgcctcccactacctgctgttcaaatacatacggtgtctccagatcaccagacggctcaaaagtcatctttacatgtccatactgtccatgtccaccggactgtttcttatatttatactctacatccgattttttgcgaagggtctcacggaaagctaccttcggtttggtcagttccacatccactttatatttttcagccagcatgctgacgatcactgccagatgctgatctcccataccatagagtaaggtctggcggttttcagaatcattgacagattttacagtcagatcctcatccatgatctttgccagtgcctgggaaatcttatcctcatcacctttattctttgccttgtatgccatgtaggtatacggttttgagatctcggtcttaccatatacaaccggaactgccttagtagaaagggtatctccggtcttgcatccagctttaccgattgctccgatatcacctgcatgaagctcacttacctcttccggcttgttggctctcatcacatacagcttgctgatcttctcctcggtctcagtggttgcattgtacagtgtatcatcagatttgataacaccggagcaaaccttgatcagagaatattttccgataaatggatctgcaatagtcttgaatacatatgcagacttggaagttgcaaagttataatcgccctcgaagatctcgttggtcttcatattgataccgacgcatttcttcttgtccggtgacgggaacagctctacgatatcattcatcaggttgtgaatgttgcggagttcaatactggatcccatggataccggaatgatgctgccatcgtttacattggtcttcatggctgcgcggatctcgccaacagagaactcatctcctgcaaaataacgctccatgaactcttcactagtctcagctactgcatccatcatggcttcacgatagatatccaggtttgctttgctgtattccgggatctcgcactcttctctggtaccgataccggtaaatctacgacctgccatcttcataacgttgatgtagcctacgaatttctcattttcacgcattggctgatagaacggagcaatcttcttgccgtacagctctgtcagcttctcaacaacttcacggaaggatgcatggtctacatccatctcagatacaaagaacatacggggcagtttgtatttttcacagagctcccatgctttctcagtaccaacttccacaccggctttaccagataccacgatgattgctgcatctgctgctgccactgcttcttctgcttctcctacaaaatcgaaatagcctggtgtatccaacaggttgatcttcgtatctttccagatcagcggtacaacagatgtgttgattgagaatttacgtttgatctcctctttatcataatcactgatcgttgttccgtctgatacttttcccagacgtccggtcagaccggaaacatatgccatagcttcgacaagactggtcttgccacatcccccatggccaagaagaaccacatttcggatactgtcagttgtgtaaacgttcatagctatttcctccgatacatttagtcattctgcattgagctgcagcacttttgctgtcaggtttttttatcttccccaacccttatgtcagaattatactaaaatatttcaaaaatagcaaggtttttattaaaattgccagacttatgtatttttgattttatagatcagcaaaaaaaggacacagccgcataaacggctgtgtcctctgccaaaaccttatctatttcacaacaaagttcaccacacggttcggtacatagatctcttttacgaaggtcttgccctctaccagggaagcgattctggaatcggcttttgccatagcaaatacttcttctttgtcagcaccagtcgggatcacaacagttccacgaagtttaccgttgatctgtacaccgatctcggtctgtgcatcgacagtcttggcttcctcataggtcggccaggatgccagagacaggaatccttctccaccggtaacctcccacatttcctcacacagatgcggagcaaacgggcaaagcagtttgataaaggtatgaagctgctctttactgatctttccaacattgtaaatatcgttggtcagagtcatcagcgctgcgattgcagtgttgaacttcatatcttcgatatcggaagatactttcttgatggtcttgtgaagcggagtctccaacttctcagtctctttatcctcagaaagcatatcggtaaatccagctacacgctccaggaaacgtttacaaccctttacagagttctcgttccacggagttgctgcaccatagtcacccatgaacagtacatacgtacgcagggtgtctgcaccgtactcttctacaatatccagcgggtcaacaacgttgcccttggatttactcatcttatctccgtccggtccaaggatcagtccctggatagaacgctttgcgtacggctccggagtgtttaccacaccgatgtcatacaggaaatgatgccagaaacgggagtaaatcacatgtctggtaacgtgctccattccaccgttgtaccagtctaccggcatccagtatttcagcttctccgggtctgccaggcacttgtcattgtgcggatcaatataacgcaggaagtaccaggaagaacctgcccactgcggcatggtatcagtctctcttcttgcatcgcgtccgcatttcgggcacttgcattttacaaaggaatcaatcttagccagcggagattcaccctccacacccggctcaaagttttctaccttcggcagacgaagcggcagctcctcatacggaaccggaacaacaccacagtgatcacagtgaacgatcggaatcggctcgccccagtatctctgacggttgaatgcccagtctttcatcttgaactgaacacctgcacggccaatgccctggcgggtcagctcttccagcatcttctggatggaatccttcttattagtataaccattgaggaactcagagttcaccatctcaccgtcgccggtataagcttccttggagatgtcgccacccttgataacctcaataatatcaatgttaaatgctttagcgaaatcatagtcacgctggtcatgcgccggtacagccatgatcgcaccagtaccataacccatcattacatagtctgcaataaagatcgggatctttttaccgttaaccggattgactgcctccaggccttcgattttcacacccgtcttgtcttttacaagctgggtacgctcaaactccgtcttctttgcacactcggtacgatatgctttgatggcatccatgttggagatgcggtctgcatatttatcgatcagcggatgctccggagccattaccatgaaggtaaccccgaacagggtatccggtctggtcgtatagatctccagctgctcgtctacaccatcgatcttgaaatcaacaaatgcaccggtggatttaccgatccagttcacctgctgctgttttacatttgccggataatctacatcctcaagacctgccagcagtttgtcagcatactccgtgattcttaaataccatacatctttggacttctgtactacttcgctgtggcagatgtcacagtgtccaccctgactgtcctcattggaaagaacaactttacaggacgggcagtagtttaccagtgctttgcttctgaacacaagaccatgctcatacatcttcaggaagatccactgggtccatttatagtaatcctcatctgtggtatcgatcacacgatcccagtcaaaagaaaaaccaacttttttcagctgattggtaaatcttgcaatattctcgtccgtgatcacacgcggatgtttgcctgtcttgatggcatagttctcagtcggaagtccgaatgcatcgaatccaatggggaacagcacgttgtatccttccattcttctctttctggaaattacctcaaggctggaatatgccttaatatgtcctacgtgcatacctgctccgctcgggtacgggaactctaccagaccatagaacttcttcttgggacttccatccactgcattgaagatcttggcatcttcccatttctgctgccacttaccttctatctttcggaaattgtgtttcattttcgtgcttcctcctatctcgatttccgatctgttatcctatctgaaaactctgtttttcagagaatcctgctgtattttacaactacattagtttaatatagtccgtttggtttgtcaactaagcttctatttcgttcatatatttcttttcattttccgacaaacgtgctatactttatgcattaacgtgctaaaggagatagacaaatgaaaatcggttttatcggacttggcctgatcggcggttccatcgcccgggctgtccgttatttttatccagatacagagatcatcgcccactcccgcacccgtgcttctgtggagcaggcagtggctgacggagtgatcaacagggtcattgatcagattgacgaagatttttctgactgcacctatattttcctgtgtgcacctgtatccagcaatgccaaatatctggagcagttaaagcctctgatcggaccggactgcatcatcaccgatgtaggcagcaccaagacagatatccacgaaaaggtaaccgatcttgatatggaagcaaatttcatcggaggccaccccatggcaggttctgagaagaccggctatgccaattccaagcggatcctcattgaaaatgcatattacatgatcacacctacggaaaagaccccccggaaggctgtagagacttatcgcgattttgtagcttccttaaaagcacttccgctggtcatcgactatcacactcatgattatgtgactgcaggtatcagccatctgccacatattattgcttcgtcccttgtcaacctggtcaaggacgaagataccaaagacggcatcatgaagctggtcgccgcgggcggattcaaggacatcacccggatcgcatcttcttccccggagatgtgggaacagatctgcatgaccaaccggaaaaatatttccaggattctgactgattatatcgcttctctggagaagatcaaagaccagttggatgaagccaaatccggtgctatttaccatttatttgagacatccagagattatcggaacagtcttccgatcaaaggcaatggtcctctggcgcggatctatgagatctactgtgatatggtggatgaagcaggaggaattgcaactcttgccacgatccttgccagcaatcagatcagtttgaaaaatatcggcatcgtacacagccgtgaatttatcgaggccgttctccggattgaattttatgatgaagaatctatgaagagcgccatcgaaatcttgagaaaacacagatatgtgatatatgagaggtaagctatatgatatttaccagaaccaatgcattaaaaggtgagatcactgttcccggtgataaaagcatctcccatcgctctattatgttcggagcgctggcagaaggaactacaagagtcaccaactttcttcgaggagcagactgtctgtccactatcgactgtttccgaaagcttggaatcgacatagaagatctggattctgagatcctgatccatggaaaaggtcttcatggtctgactgctccctcttctatgctggatgtaggaaacagtggcactaccacccggctgatctccggcattctggccggtcagaggtttaccaccgagttaaatggagatgaatccatccagagccgccccatgaaacggatcatggagccattaactctgatgggagccgatattaccagtatccgtgataacggctgtgcacctcttcggatccacgggcagaagctccatggcatcgcatatacctccaaagttgcttctgcccaggtaaaatcctgtatcttacttgccggactctatgcagacggaaccacaagtgtaaccgaaccttatctgtcccggaatcacacagagatcatgttaacacatttcggtgctgatattacgagtaagggtactactgctacagtcacccccggcaaggacctgcacgcacaggaaatcatcgttcctggtgatatttcttctgccgcttattttattgcggcagctttgatggttccagattccgagatactgatcaaaaatgtaggcatcaatcccaccagagatggactgctccgcgtctgccaggatatgggtgccgatattactctgctcaatgaaaattatggaaatggtgaacctaccgctgacctgctggttcgccacagtgagcttcacggagtaactgtcggtggttcagtgattccaactctcattgatgagcttccagtggtcgcagcccttgcctgctttgccaggggaactactgtgattcgcgatgcgcaggagctgaaagtcaaagaatccaaccggatcgacgtgatggtcaataatcttcgtgctatgggtgctcacatcgaaggcacagatgacggtatgatcatcgaaggcggttaccctctccacggagcgatcatcgacagccacttagatcaccgcatcgccatgacctttgccatcaccgctcttgcttcagacggtgagacctcgatcaaaggtgctgactgcgtgaagatcagctatcctggattctatgaagatctgacacgactggcaaaataatttctgtcatcaaaaaatgccctgcaaaagtgactgttctgttctacagatccttttgcagggcattctcattatccgtcttatctattctgttgtgtctgcagtcatcttactctactgccagctcatttatataaccttccagatcttcattcttaccataatactttacatgcatgatgcggccgaaatcaagacttaacattcccagcaaagacttcgcatctacttctgtgtgaccataagaaatatctatattaaaatcacattgctgtgatttttttacaaatgttaccaccgtatccggtgaaagtttaatgtgtttctctgtcatgaatatgcctccctctatctgaatgttctcccaaaatagaactttggttttgctgaacttcactcattatgctccttctctgataaaaagtcaatgaagccgaacagttcttagcgcaaatttgacagccatattctgaagattgctatggaaatctgtcttaaaacagtgtaaaatattttagatatcattaagaacaaaaaaaggagacgatatgagtaataatgttatgatcataggaatcgccgggggaaccggatcgggaaagtccacatttaccaaccggctgcgcgatgccttccctgatgatgtagctgtcctctaccacgataattattataaatgtcaggatgatgtgccgttcgaagaacggaagaaggtcaattatgaccatcccgattctctggaaacagatctgatgatccaacatctggaagctttaaaaaatggaattgctgtagactgtccggtctacgattacagtatgcacaaccgttctgacaagaccattcacattgagccaaagaagatcattctggcagaaggtatcctgctgctggaagatcccagactccgcaacatgatggatattaaaatctatgtagaagctgatgcagatgaacggattcttcgccgtattgtccgcgacgtcaaagaacgtggccgtgacctggacaatattgtggagcaatatctgactacagttaagcccatgcattatctgtatgtagagcccacccgtgcgctggcagatgtggtcatcaacagcggtatgaatgatgtggcctttgatgtagtaagatccaagatccagctgatgctggaggaagaatagtaaaatccccggaactttattgagatgttccggggattttgctattctcttatttatctttcttaatgaacatagcatcaccaaaggagaagaaacgatatctctccttcacagcctcctcataagccgccatgatcttgtctctgcctgccagtgcagacaccagcatcatcagcgtggactccggcagatggaaattggtgatcagacagtcgatcagtttaaactgatatcccggataaataaagatctccgtccagccgctgcctgctttcaggattccgtcctcaccagtagcagactccagtgtcctgcagctggtcgtaccgactgcaatgatccgtccaccattcttttttgtctcattgatcagttttgcctgatcctcctccaccatatagaactctgaatgcatatgatgttccagtatattctccactttcaccggacggaaggtgcccagtcctacatgaagggtcacatgggcgatatttacccccttgtccttgatcgcctgcagaagttccggtgtgaaatgaagtcctgcagtcggtgcagctgcggatccttcatgctttgcatagaccgtctgataacggttcttatccttcagctgatgtgtgatatacggcggcagaggcatctggcccagctgatccaggatttcttcaaagattccttcataagtgaatttgatcatacggttgccgtcttcgaccacatccagcacttcaccgaccagcaaaccatcaccaaagctgatcttcgtacctggttttgctttcttacccggtttcaccaatgtctcccacacatcattttcatttctcttaagcagaagtacttcaatgtgtgcatccgttcccaccttacttcccataagacgggcagggattactttcgtattattgactaccagacagtctcctggattcagataatcaatgatttcgcgaaaaatatggtgttcgatatgtcctgtttcctgatccagtaccatcagtctggaactggatcgatcctcaagcggatcctgagcgatcagttcctgcggaagatcataataaaaatcatgtaaattcatagtattcctctttatttcatatagattccatacagctcctgcatctgctggcggatcatgtccggccgctgctgtacaaaatcatagataacttcaatattctgatcaatattttccagtgacatagaataagtcggatcctgactcttcttttgttcaatgttagcttccagttcctgatcccgcagagctttcagttgttctatggcagcagtcactttttcctctgtaaaatagttctggatacactgttccaggtagtaggcaaaccgttcctgcatgtccgtgcgcttcatcacttccgcaaacagtttattgccgtccagtgcatcctgaatgcttctccactcttctgctggggcattgtagagattgaatcctgcctccatgtcataatagagatatctccatcttccatcctgccggtcttccccataggcgtctcctggcgaatagtaacggtacatcttaatattattctgcggccagtcccagttggcgatataggtttcaatggcaaaatactgcagaagattgtccacatctaccagcgaagaaaattcttcgaatacagtatcatctgtcaaatcttcagatgcataagtcaccagatccttgtaatccttcttcgcctgctgttccttacggttcagttctgcatccggtgtatcatcccatacggtcacgatctcatagtagccgtcaccggaagtcccataattggcctccatatagacttcgtcatagacttcctgcatccactcacagttgtaatagactccattgaggtacacagctataggtgccacagacttggaatccacaccttcgatctgactgatcaatgtctggaacaattcttcacgaaacaaggtcactgccttatctgttccattatttctcaacaccagccgcttataggcagactccacttctcctgtggcttttcctacattatctgaaaataatggataatcaaattctgcctttccatattcatcccgggcatagagcttcagtgacttccggtaggactgccggctggcatgaccaaatacccggatacctgcatcctgatcaatgaccctctcaccctccggtgtcaggatctcaatatgggcaggacgttcccatgttcttcctctctgggtaaaattagctggctgagtctgcagatcaggctgatattcctcactggccacatactcatcccgtatcttaccttccgtcaggattccatactcataatcataaagattatatggatcactggtcacacagacaatgtatgtactgtaccgctctttcagtgtctgttcatcctttgcataaaaataagtacgggtgaacaattctccccactcaccagaagccggatgatacgctctggcacgaacagtcacagactgaacctgatcacccgattcaaacatcagaggaccgctgtaaagtgcgctgttctctgtggaaggtacacttccatccgtactgtaatagacaggatagccgcccctggtggtcagttccagtgtcagatctcccacgcaaaaggaatcctcctgggaagtctgcaccacatccgaatctttgtagtaatccgccaggcgctgtgcgaccagaaacccgaacagtagaacagcggatgctgccaaaactgccagcacccgcgtaatttttctgcgatccattactgtctaagctccgcacccagtgcttccagaccattgaggatcttcttcatagaagcagagatctctgtatctgtaagcgtccggtcttttgcacggaaggtcagagaatatgcaacagatttataaccgcctttgatctgggaaccttcgtaaatatcgaacagttcatagttttcaagaatctgtccgccacggactgcgatcacttcctcaatctgtcctaccagaacattcttcggaacaaccatggaaatatctctggtcacagccgggaatttggcaattccctcatatttacgatcaaaagttgccatcggaacaatagacggcatatccagaacagctacataagctctctctccaattccataagtagctgcaactgtcggatgaacctcacccagatatccgattaccgttccatcatagatgatatttgcctgacgacccggatggaggaaagattttccagcatttggatcataagtttctttcagatgcataccgatcttgtcaaggaactcctctacgatgcctttcatggagaagaagtcgccatcgccatacataccaagagtaaactgcatgcgctcatccggcagttcagtgagcggcaggctctttggcagataaatatttcccatctcatagagacgaacattcttatttcttctgttatagttggttgccagagaagtcagcattccattcagggaagtagttctcataatagagaaatcctcacccagcggattggagatcacgattgcctgacgctcacgtgcatcctccggcagaagcaatttatcaaataccttcgggctttcgaagctgtaggtcataccctgtgagaagccgcagaactcggcgatatctcttgccactgcttcaattctcagatagaacggaagcttgccggtagttgcctctcctctcggaagcgtagtcgggatattgtcatatccgaagaaacgagccacttcctctgccagatctgcagtgcggaacagatcctgacggaaggtcggagctacgatctcgttggtcttctcatcatattccagttcgatcggtttgtaatactccagcatctgctctttgctgatgtcggttcccaacaatgcgttgatgcggtccggctcaaagggaatgcgaaccggttctctcttcactggataaacatcaacggttccgtttaccacatctcctgcatccagctcctcgatcagctggcaggcacgatcaatagctgcctgtgcattgttcggatccagtcctttttcaaacttaccggaagcatctgtacgaagtcctacacgcttgctggacagacggatgttggttccgtcaaagcaggctgcctcgaacagcatggtctttacatcatctgtgatcatggagttctcaccacccatgataccagccataccgactgctttctcaccgtcgcagatcatcagtacattttcatccagtgtacgctcctgtccatccagagtcacgaatttctcatcgtgagccgcacggcggacaacgatttttttatctgcgatcttatccagatcataagcatgcatgggctggccatactcttccattacgtagttggtaatatcaaccacattattgattggacggatgcctacggatgccagtcttctctgcatccattccggtgacggagcaagacggatattttttaccactctggcacaatatctggaacacagatcatgatcctgcacttctactttaatataatcattcacatcaccgccgcagccttttacatgaacttccggagccttgaactccttatggaaggtagcagctgtttctcttgcaaggccaagcgtactgtagcagtccacacggttggaagtgatctcgaactcaaactccacatcatgaagtcccagtacttcaatggcgtctgctcctacttcagcagtctccgggaaaatgtagataccgtactccggtgcttccggatacatatctctggtggaacccagctcctcaatagagcacatcataccgttggattcgattccgcgaagtttacctttcttaatacggatgccgccaggtgtcatcttgccgtcatgaccgcctgccacacgtccaccgtccagaacgaccggaaccttgtctccttctttgacattcggagcacctgtaacgatctggatcggagattcctctccaatatctacctgacagatgatcagcttatctgcatccggatgtttctcaatcttcttgatctgtccgatcacgattttctccagatcggcatccatttttgtaaatccttccaccttggagcctgacagggtcatagcatcggtgaattcctgtgcagtcacctcaagctccggcacatatgcttttatccatgataaagatgtattcatctttgtaatcctccttagaactgttttaagaatctgatatcgttttcatacagcagtctcatatcatcgatctcatatttcagaagagcgattctctcaagacctacaccaaatgcaaaaccggtgtactcattcgggtcgatgccgcacatttcaagtacatgcggatgtaccataccacagccaaggatctcgatccagccggatcccttacagaaacggcaaccttttccaccacacttaaagcagcttacatctacctccgcactgggctctgtgaacgggaaatgatgcggacggaattttgtcttcgtgttttctccaaacagctcttttgcaaactcttccagagttcctttcaggtcagcaaaggtaatattcttgtcgataacaagaccttcgatctgatggaaggacggagaatgagtcgcatccacttcatccgaacggaatacacgtcccggagagatcatacggatcggcagcttgcctttttccatgattcttgcctgtaccggagatgtctgagtacgaagcacaatgtccttgttaatatagaaagtatcctgctcatcctttgccggatgatttgccggaatattcagtttctcgaaattataaaggtcatactctacttctggtccttcgatcacttcgtagcccataccaatgaagatacgctctacttcttccagtgcgatggtgttcggatgacgatgacctacgttattcttcttagccggaagggttacgtcgataacttctgatttcagttttgcatccagaagaagcttatccatattttttttcgcctcttccataaccttctcaatctcagctctggtgtcatttaccagctgaccaaagaccgggcgttcctccggagccacatccttcatactctttaacagtgctgtcaactcacctttttttccaagtacagagactctcacatcattgagagattccggattctttgactctttgatccgggcaattgcctcttctttgatcttctgcaatctttctttcatgttgaaactccttttctactacatagatttatcggacggttctggaactttccttgtttcctatacgataaaaaagctccgcccctcaaaagggacgaagcttataatccgcggtaccaccctgctttccggctatgccggacactcataaaactgcataacgtgcagtaacacgtcatcccctactctatctgttcaggaatgctgctccggtgtgaacttcgacctttctgcctgaacctgaccgggcttccagccgctgacccgatctctctgatggaaaacagaatgctacttgcaccttcttcgcatttgaaatatctttttctactatagcacagattttttgaaagtcaagagggtttcctactcaaccgtcacactttttgccagatttcttggcttatctacatccagtccctttgccacgctgacataatatccaagcagctgcagcgggatcacagccagactgcccacaaaatgttcatccacttttggtacatacacagcgaagttcacctgatcttccacctcataatgtccataggtcgtcagccccatcagataggctcctctgctcttacactccagcatattgctgatggtcttctcatacaactcatcctgtgtaaggactccaatgaccagcattccctgctcaatcaaactgatcgttccatgcttcagttctcctgccgcatatgcctctgaatgaatataggagatttctttcagtttgagacttccctccagagagatcgcataatcaattccacgtcctacaaagaatacatcatgagcattggcatactttgccgcaaaccactgaatccgttctttatcctccagaaccttctccatcttctccggaatcgataacaattcagaaatgtaaaagctgtactgctcctctgtgatcttctccctcaccctggcaaactgcactgccagacaatacatcgctaccagctgtgcactgtaagcttttgtggtcgctacagagatctccggtcctgccagtgtatacagcacatgatctgcctcccgggcaatactgcttccaactacattgacaatcgccagggtagcaagcttcttctcctttgcaagcctcaatgcagccagggtatcggcggtctctccagactgactgaccacaatgaccagtgccttctggttcagtggcatcttccgataacggaactctgatgcaagctctacacgtaccggaatatctgtcagatcttccagcacatactgtgcggccattcccacatgccatgcagaaccgcaggctactatatagatctgctcatatttgttcagatcctcatcactgatctgcatctccttaaaatcaatcctgccgtcttttacaacggaattgagcgtatccctgacagcttttggctgctcatggatctctttcatcataaaatgctcaaatcctgccttctctgcagcctctgcatcccatttgatctcggttgtctgcttctcaatctcatcaccatccagattataaaaatgcgcttctcctggtgtcagtttcgcaaactccagattgccgatatagtatacatttcgggtgtatttcaggattgcaggcacatcagatgccacataagtctccccgtcagcgataccgatgatcatgggactgtcttttcttgctacccagatctcgcccggataatcacggaacataagttccagtgcataggaaccacgtacacgcaccatggtctttgcgattgcatcgatgggtcctaagttatattttttgtagtaataatccaccagcttgatcaccacttctgtgtccgtctggctatagaaagtgtaaccatgcttgagcagcttctctttcagttctgtatagttttcaataatcccgttgtggactccaaccacttctgattccacctcgccggagccagatcgcagacaatttcctgacacatgcggatgggcattaacctgactgggttccccgtgggtcgcccagcgcgtatgtccaataccacaggttcctttcaaagtctttccgccatctgtcttctctgccagattattcagccttccttttgccttcacaacctgtgccaatgcctttccatcccggacagccagtccggccgaatcatatcctctgtattcaagctttgacaacccatccagaagaatcggtgctgcctgttgcttacctgtaaaacctactattccacacatatatcatttatctccttttattctgtctgtcctatcctgtccaatccatccattatgcgtgattctgtccctcgtccactccttccgtgctttcttttgtaaacatgatcttcagagtcaggaagatcagtttcatatccaacagtactgaatagctttcaatgtacatcagatccagtttcagtttatccaacggtgtcgtattgtattttccataaatctgagcatagccggtcagccctgccttcaccttcagccgatagataaactccggcgtctccttgcagaattcatcgatatactgctgccgctccggtctgggacctacaatactcatatcgccttttaaaatattcagaagctgcggaagttcatccagacgggtcgcacggataaatttacctacctttgtaatacgactgtcattttttgatgagaactgcgctccattcttctccgcatccacgatcatgcttcgaaatttataaatataaaattttcttccattcagtgtcacacgctcttgtttgaacaatgccggaccatgatcctccatcttgatcgcaatcgcagtcagcagcataaacggggaggccactaaaagcatacatccggaaatgatcacatccatagctctcttcatcacacgctgctcaaaagagatcccagaatttctcagaagcagaaacggagtatcaaatgaatgcacccggtctgctcctctcagaagcaggtcagagatctccggagccacataaatacggatggatttctcataacagaattttaccagatcattgcgcttctgctcttccaatccatagagcatcatggcatcgcaatcctgtacctcctgctgaagctttaccagcggctctgctgctgacacgcatctggtaactgtatagagatcctttcgtccggataacttgcggatcagattttctttatatgccatatcgcagatcagaagcagccgcttcggcggaaacatctttttgaaaattccacctgacaactgattgatcaacatgatcaccaccagatctgccgcactcattaccagcataggccagatggtcggaaacggaaaacgtcccacaaccataatgatctgaatatacatcagtgcattggcaatgatggttcccaatgtctgtgacagaatcagctgcccctttttataatatgcgtatttggttcctccgtacagatatacaaagactaccagataaagcacgtagaagccgatcatcatccagttacctttgttaaggaacatggtcacacgcagttcacgatacacctcatcccatacatatacaaagaacagagtctctataaaaatctctattcctgcaattccaagacgcagcagcctcttgtactgatcaaatttatccattcgtatatttcctttcatcccaatgtctctatattttaccattgcatggcaaaaacatcaagggaaagccatttcccttatcatccgaccacgctcacccgcttctccctccagcaattgatctccatgccgatcagcacaatatacatgccaaaatacagccagaacatgaacaggatcaaggttgtcagactgccatacatactgtatgcatttccatactgtacatagatggaaaatccaaaggaaaataaataccagcccacagccgctgccagagctccaggcacctgatcaagaaatcctgatcttcgattcggcagcatactataaagtgccgcaaagaaaactgtcaggatcgccagcatcagaaacagccggaaagacagaatgattctggtaaacaccgccacaaacggaatatattttacaagccacagatgaatggaatcaccaaaaactaccagcaccagcgataccatgatgatcaccacaaacaacagtgcaaagacagctcctctgagccgcatcagcacatagttgggatttttatccactctgcagatcgcattaaatccacggttcagtgccataaagctctttccggcggaccagattgtcacaactgctgacaatgataccgttgccactgtacgactgaacatttcgtcaataatactcaacatccagctttggaatccctgcggcaccaaatgctggatcagactgtaaaaatctgcttttccaattccggtaaactggatcatggacaacaaaaggatcagaagcggaatcagagacagcataataaaataagctgcctgcgccgcataagctgatacgtgattgtccgcaatatttctctttatttccatgatcatgaatatcagtcgtctcattcatgtatcctttcctcgtaaaatcgacatgctctgtggcagtcaatctgtatcttaccttgtttcagcagaaaattcaagaaattcgtgcctcctttcctctccgctgcagaaacaggattccatgatttcatccttactccatcgttgccaatgttacattccgataaaaataatcaagaatcatcagataatcttttccctgctccgccagaagtctggctccgttctggctcatgcctgctccatgacccagacctcctcccgtcaccgcatatccagttacctttccatcggtcttggcttgtgtcaatataaaatatccactgggaagaaggtctccccctctggtgatcgacccatcatttttatgtatgatgcctcccggcaaccccagcatcaaacggatattgtattcatatttgattttcaatgttccttcgcttccagtcagcagaagttcctgcgctgcaccgcctgcattccgcgacaggatctgcgcttctgtaatcgttccaatccccctatgtccgacgttttcggatggccgcacatactgctctccatcctttataaggatcccatctccggtcttcgcaagcctgactgccatccatttctccacatttttctgaatctgagtaaatgacacttcacagttccaccggtaccatggttcactgatttccagatctcctgctcgtttggtcctgatccatgcggcaaacgtttcttcatccgtcagatccttttctgaagttgtctcattgacaaacctgctacaaaggtacggactgttttctgtattaccttcctcccagatagcttcatctgttgtcactccacaggaagttgcaaaataatatgcctttaccggatacttctgataaagaaggatctgtcccgccgtctcctccactgcctgatccgtggaggtctgactgtcaatcttgtgatagacctgatatgaagtactgtcatccacatgggcttcatattccggataagcatattcctgcatctgccagactgcataagttctggcgcagacagcctgtgctttcaacgcttccaatgcataggaagcaggcatctcgctgggaaccacaaaccgaagatattcctccaacggtacttcattgacaatgacccacccttgcggctcctcatagtaatcaagttctcccggatatccttcccctacatctttttccttatgataaatactgccactctgatccagcagaagaacacggatctttgcattcctccctggagatgtccatattttttcctgtccaacagcttcacctgtctcttcgccgccttcctcttctgatatcagtaattcttctcctgtctctccttttctatccggatctctcctaagtgccaggatcatcagaacccctgtcatacacagcagaatcaatgtctttactttcagtctgcttcgatacatgttccacctcccactgacaccggcttacgatatagagtcatctgcacctatcagagctcgccatgtcgcataaataaagaaagggtactgcaatctgcagtacccgtaatcttccgtttcccaaagtgccgttccctgtattttgacgcctagccaaagctaggtgggtaacctcaacagagctttcagccttcccctggcatccagcgatggacggaggcttgacatccggcctgcgattttggaatcccataaacgtaaatgtaggttcaaaataacagggctctcgaacaccccaggaaattcataaccatagtataccctatttttttgtttttgacaactctaatgtgtaatctctatgctccattgtatggtctttcctgatattttattcatctgtttattaccagcatctgatttctgaccagtacatataaaaagggacactgcatagcagtgtcccaatagatacgataaaatgtacaattacagctgcggaccagcagatacaagtgcttttccgtctgcattgctctcatatttaacaaagtttttctggaaacgagcagccagatcctttgctttctcctcccactgagcagcgtcagcgtaggtatctctcggatcaaggattgccggatcaactcccggaagctcagtcggaacttcaaagttgaagaacggaatcttcttggtcggagcggtcaggatagcaccagcaaggattgcatcgatgataccacgggtatctttgatggagatacgttttccggttccgttccatccggtgttaacaagataagctttagcgccgctcttcttcattttcttaaccagctcatgagcatatttggtcggatgcagctcaaggaatgcctgtccgaagcatgcagagaaggtcggggtcggctcagtgattccacgctcggttcctgcaagttttgcagtaaatccagaaaggaagtagtactcagtctgctccggagtcaggatagataccggcggaagtacgccaaatgcatcagcagacaggaagattacgttcttagcatccggagctgcggataccggacgaacgatcttctcgatatggttgatcggataagatacacgggtattctcggttacgctcttatcagcgaaatcgatctttccgtctttgtcaagagtaacgttctcaagaagagcgttacgtctgattgcattgtagatatccggctcagactctttatcaaggttgataacttttgcat

SEQ ID NO: 3628 - DNA, 19371 bp, Unknown
  16S sequences of unknown bacteria
cacgctgccaatccctcagtcggcgttcgccgacagctccctttgcacaagggagccgtctttgcctgagtacatccaacgggcctgggttctatccacttggccccggtgggggccccgccgggaggctggaaaagggtcggggaaaaacttagtttgtccccgagtgtcatcggcggcgttagctaacggaatgatggttattttgccgaagggcaaaataacacgccgccaatgccggaaatcccctgccggggtttccggcagccttcgccgcagcgaaggctatgacacacgttacacttatgttacaatcccctgcaaagtcttgcaaaaaaaatcggcttttggtatcatgcattacgaagggtacgatgtgcccaaaaattttataggaggaatgaaccacatgagaactctgaaaaaagttcttgcgctgtccctggtgtttgccatggctttcaccatgatggctggtgctgcgttcaaggatcaggacaagattgattctgctctgactgacgacatccagctgctgacagctctcggcgtcttccagggcgacgagaatggtaacttcaaccccacagacaatgtgaagcggtctgaagctgccaagatgatctatgttctgaagaacaacggtgtcgatgatggcgctgttgctttccagggcgtatctaagtatgccgatgttcccgtaggccactgggctgagggctacatcaactactgcaccaacctgggctacatgggtggctggaaggaaggcaatgtgcagaagttcgatcctaacggcaatctgactggtgttgaattcaccaagatgctgctgtgcatgatcggctataaggctgatgtgcagggctacaccggcaatggctggcagaccaatgttctggtcgatgctgctacttctggtgtgactgttaactttgagccttctgtgtatgctgctactccccgtcagtggactgctcgcctgatgaccaacgccatcaacgctccctttgttacttacaacagaggcgaactgatgtatggcacatgggctcgtcctgacatgagctatgctgagcagtatctgggtctggtgactgtggaaggcactctggaagctactaatcacaacaagctggctagcgacattgctgtctcctcttctttcaatgatactgataccgtgaaggttcagcctaagactggcgatgctgtgtacgctgttggcgatgcagacgaaaatctgctgggtcagcctgtcaagatgtactacaagaaggcttctggtgtgaacacagagaacaagctgtatgctgttctgccttatgttaaggaaggcaagattgttaacaccactgttgatgctgtgaaagttgacagcaaaaatcctaagaagatcactgttgatggcctgggtactaagacctatggcgctcagaagatcgatgtgtatgtcaacaatgttctggtcaagagccagtttgaaatggatgctgttgccaagaagtatctgggcacaaacagcaccgatgctgtgactctggttgccgataaggacaactacatcacaaaagttctgatcaacgatatggtcgcttatggccggatcgataagatcgatgctgagaagaacactctggtctttaaagatgtgagcaagtggctgaatggcaaagcaaacggcaacaagctgctggctgcggatagcacaactgctctggtctttgataacagctctgctaacaaagagaatttcaataagtatctgaatgttgcttctgatgtgaaggctggttctatcgttaagattgttgctaacacttcttccggtaagctggtttatgacatcactctggctgataagatcgaaggcactcccagcggctatactctggacagcaatggcaagtatgctactctgaccatcaatggtgagagtgtgaagctggccggcagcgacaacttcctgtctcagtataagtgggagaccactggtactagcgtagtcaatgacaaggtgttctacaccgatggcaagtatgtcatcttctccgagggcggcacaacttccgcttctgttgagaacctggcctatatcactgctgtggatgttgtctccgcatggggcaagactagctacaaagtgaaggctctgttggctgatggtactctgggcgagtatgaagttgctggcgtatacgatgaagtcgatgtgaaggttgctgtagctgcttctgttgctactggctctaacacaagtgtgaatggtagcaatctggctgaagctgatcgttatagcactcagcagaaggttactgatgctatgaatggtatcaaggaagatgttcttacttataccatttctgatggaaagatcactctgagagttcccaagactgattctaacatcacctttgctaacggtactcaggagtacaagcatgctaacaagactgtgagtgttggcggcacatcttataagctggatgacaatgcttacttcttcgtgaaaaacagccaggatccttccaatgttaaatatagtgttgtgaaggcttccgagctgggtaaggatcagacatccacagctgctgcttcttatgctcacaaatctgtcaatggtatccccaccttcctgtttggtgtgctgaacctgaacagttctctggttgcttcggatgctgagtatgcttttgtgaagtccgctgcttcttatgctctggttgacggcaagcatactgtccagatgacagttgccaacaacaagggtgaagaagtcatcatcaagaagacttacaatgatctgaccagtgctaatagtgctattagtgcttggaatggtctgcgtggtaaggttgttacttatactgtgaacagcgatggttatgttgttgaaactgctcctgagctggttgctactggtacacccaataccttgacagctgacaagtggaataagatggagatcgaaggctggagcaacactgttgccaatgtaaaagttggtactggtaatgctcagctggtcaatgttgcttccgatgtgaagatccactatgtggatgctacttccaacagcaattatgcttctctgaccactggttctggtgttgagaatactgtcaccaacagtcagcagtctgcttacgcttatgtgcagaatgtcaatggtgctgataccatcactgacatctttgtcgaagtgagcggcgctgacatcagcaaggtttggtaagaaattaccgagcttggcacaatagctaaccaaacaaaagggacggcttcggccgtccctttttctatccttctccattggggcagaagaaaagcccgggaatgttcccgggcttttgttttgcttgctttctgtttggttagagaaattcccgcaggctgtggacgatctggccgtccagccgctggccgggggaagcgcacaccatgctgttgagcacagcctcttccgtggcctccgccaccgcccggaagcaaaggtccattcgccgctcgctgatctcctggcattccagtacatcctgattgggcgcatagggaatgcgccgggcggtggaaaagccgatcatgatctccccgctgccgtggcccacaaagctgcccagccgggccaggcccacgctgcaccgcttgatgatccgctttaattgccgggtggagcagggcaggtcggtggccaccaccatcatgatgctcccctgatccaccggggtgtctcccaggttccgcaccgcaagcccggcccccaggcggatgccatccaccgtcaggtcttccagcttgccgtggttgctctgcaccagcacacccagggtgtaacttttgccgtccagcaaaatccgccgggaggccgaaccgatgccccccttcagcccatggcagatggtgctcttgccggcccccacatccccttcttcaaaatccgcccccgcattctggatggcggcaaaaacttcctctttccccacggcacgatgccgaatctggttgatcttgctgtcgttgcattcccccaccaccgggttcaggctccacagatcaaccccctctttttcgcattgctccagggtgtattccaccagggcgtcgtgtaccaggcccacattcagggtgttggtcagggcaatgggggtctccagagtgcccagctcatccatctgcaaaagccccgccgtcttgccgaagccgttccagacaaagctggccgcgggtattttgtccgtgaaaaggttccccggcccggggatgatcaccgtcacgccggttttgttttcctcgttatcaatggtgcagtggcccacccgcactccttccacatcggtgattttgttccgctgcccccggggcaggctccccactgtgatcccatattcgttgatccgcttttggtacattgtcatcttcctttgtgccgttttcgtcttttttcttcattatagcatgggccggtggtcgtgtccacttggagccgatggggaccccgcccccatactttctttgccttggtcggttgtgtcccgcagggcaaagaaaagccccctttgtgtaaaggggggacagcatggcgcagccatgcaggggggattgtaaggcccattgaatggttcagccccggtttgattgctcagcgcggcagcgcaggttgccagcggaggcacttcgtcaatcccaccggcggcattcgccgccacctccctttgcacaagggaggcttctttgccaggttgcacacaaccagccctggttctgttgctcagcgcggcagcgtagtatgggtgcagcgtcacgctgcaaaaaaagaagtaaccgcccacagctccccagctcagcggttacttcttcgtagtcctggggactaaccgacttaccggcagcgcccttttctgtctttattatactgcgaagtttccctttgtgtcaagggcatgtgcccgggcagcgtcacgctgcacccaggcggtgctaccgcaccgggcaataggacgaaggttggtgagtgctgtcaatcccccctgcccgccttcggcggtcttcccccctttgcacaaggggggcttttcttcgccttgcggcatacaacggacttggttctgttgcgcagcgcggcagcgcaacatgggtgcagcgtcacgctgccttagtccatgtctgtgccggtgcccaccacatcgccaagcaccatttgcaggcccttggagaaattctgggcatcagaggtgtattcctccatttccgcctggagcaccagagcttccgcagcaccgttctcctttttggcggcctcggcgatttccaccgtcagccgcagcacttcgctggaggccgtggctccggttttcaccagctcatgggcttccgcatagctttccggcgcctgcagttcggcaaaacgctcgtacatgggccgcatattgctgatcagacccatagccacatcgattttgttctgctgggccttcttttcttcctcggtttcggcggtcgcactcatggcttcgtccagcttgagggaggcctcgttgctggccagcatcagctcgtcataatattgctggcaaacggtcagatattcctcttcgctcagcggctgggtcacatcgggcaggggagtttcttcctgcttttctgtgttgtccggggtatctgtggtgttttctgtctgctgcacttcttcttccgccttggaaggctcttcctgcttgttgcagccgaacagccccagcagcatcacagccgaaaggcccaatgcaaaaaggcgtgtaatggattttttgtgattcatgggtatcccctcctgggtcatggtggttccgatatgtaatgtaattataacattaaccagccattttttcaaggttttgtaacaaagtgacaaagccgccggtttcccggcggctttggaaaggtttaatattgttccagcagatcctgcttgatcttccacagtttgggagaaagatccacgatataggaatgggggttttcaaaccgtttgacctcgggccacagtgtgcccacctgctggcggcagaaggcctggatctcctgaatgggacgcttttcgtaaacgcatttgcctttttggaaaatgggctgaagcaggggaaccacggtgtaatcggtgagggtctttttcttccaggtgtaagtggggtcgaaaatggtgtagggttcgccctggggcatttcctcctcgtggagggccaccacatcggcagaggccaggccggtttctttgtcgtaaaaacgccatacctgcttgaaatgaggtgtggtgattttttccacattctcactgatcttgatcttggggatgatgtggccgtcgttgtcctcaatggcggccagcttatagacgccgccgaaaatcggtgcgctgcgggaggtaatcagccgctcgccaatgccgaaggtgtcgatctgggcgccctggataatcaggtcacggatgagcacttcgtccatggagttggataccacgatcttgcaatcggtcagcccttcctcatccagcctggcccggatcttcttgctcacataggcaatgtcgccgctgtcgatgcgcacgcctttcagccggcagccctggggctccagcacttccttggcgatgcggatggcattgggcaggccgtatttcatgacgctgtatgtgtcgatgagcagagtgcaatcctggggatagatttccgcataggctttgaaggcgtcatattcggtggggaacatctgcacccagctgtgggccatggtacctgctgccggtacgctgtaatcccggtcgctcatgacgcaggccgtgccggcacaaccgccgatataggccgctctggcgcccagaacggcgccatcgccgccctgggcacggcgggaaccgaattccagcactgtccgcccctgagccgcccgcaccatccggttggctttggtggcgatcaggctctggtggttgatggtgagcagcaccatggtttcgatgaactgggcctgggccaccgggccacgcacggtgacgatgggttcgccggggaaaatgggagtgccttcggcgatgcaccatacatcacaggcaaatttgaagtttttcagatagtccagaaattccgggcagaagcagcctttgctgtgaagatattccagatcctcctgggtgaagtggaggtttttcaaatattccaccagctgctccacaccggccatgatggaatagccggcattgtcaggcacattccggtagaacatatcaaaataggcgatggtatctcccatgccctttttgtaatagccattggccatggtaaattcataaaaatcggtgagcatggtgagatttttgttcagtttcaaggcgtccacctgcgtttctttcaaaattggagtttttcccggaaagggatttgctctatttacatgatatatggtaagatggtcagtgtcaaacgaaattccctgtctgaaggacatttttcgcctttcagacgctttttcagcaaaataaaggagagaccgttatgaaaagcagaaccggcagcctggagatgatcaaaaagatcaatcgacagctggtgctggagaccatcaaaagccatcagcccatcagccgtgcccgcattgcccgggagctttctttgagcaaaaccaccgtcagcgccatttgtgacgagctgctgcgcagccggatggtcatcgatctgggggagaaagggccggaaaagggaagtggacgcccgtccaaaatgctgggattcaatcccctttcggcctgcggcgtgggcatcgatattcacccggatcacgcattggccgtggtcaccgatctggatggccgggtcctctatcgtaccgaaacggctatggacccttctcctgaggccatggcggccctggcccgcaagtgcgtggaaaaggcggggatgacccaggaaaaaaccatcggcctgggtgtcagcctgccgggaacggtggaccgtcggggacgggtgatccgggccaacagcctgggatggcaggattatcctttggcggaagagctggggcggctgctgccctttccggtggagatcaacaacgaggccaactgtgccgcattgggagagcggtggaaggggaccggcgcccgggcggatgatctttgctacattgccattggccagggggtaggcagtgcgattatttgcgatggcgagctgatttatggcgcggcctgccgggccggagagatcggttacctgttgggtgagatcgatcaggagatgagcaaccggaatgtgctgggtgagccgggggtgctggagcggaagatctggagcactctcaccagctgtggattgaatctggagcagatgttccaggcctatgtgcaggggaaggagccagcacggggagcggtgacctattttatccgggatctggcccgggtgattgccaatatcgccagcatgcttaacccggaagtggtggtcatcggcggtatcgtggcccagtatatgaagccggtgctgccggatatccgggcggtagtaggggtgctgactccgatccccacccgggtggagctgggaagcctggggccctgggccgcggccatgggggccgctttccaaggcagtgtccacagcaaattgtaagagccgttttgcagcgggcaaacaggtctgttcataataaagaaagccgtccctggggacggctttttgcttgcaatctgttacatggagcgggagccggcattgccggccggagcgttgatggtgccccggccacggggggtggagcgggtattgtaaaaggtgacgaacttgatggaatagagatcgcataccacataccggtcttccagatcctgatacaatgtcacatagttgttgcccacggcatagaggatgccgccacgggtgacgatattctgggtgccgatgagaaagtcgatctccacataatagcccaggttgtcggccagatcctgaagcatggagcctcgggtcacatcggcattggactgaggatccagcacctgattcatcggttcgtccgggcccatatgcagcccttgggcagtgttgccgccataggatgtgtcataaaacatagtaagtacctcccgtgtttccgttgttatgtttgaaaataggcatccagcgggtcatagaagcagtggtcaccgatgcgatgggtgaaaattcccacttcactggggaagttctctcggcagagaggggaataggggttataaaaccacagcgcctgacccaatggggagagacggttgcccgccatggcccagtcggcgatctcataatgaatggcctctgggcgcatattgtagatgttttgggagttgtattggcccttttccgtttcagaggcacagacgaactggccaggctgaaaaataatgttccgcaggctgccctggcccacccgggcgtattctccgccgggagcgtggacccggttcatcaccaccgaagccaccgctttcatgccgttttctccttcgcctcctgcctcgcattggaccaagcgggccaaaagctccctgtccgaataggccactgttcattcctccttttccctctattctatgtggaatgtggggaagggtgcaaaaaagccgccttcccaagtgggagacggctttgctgtcaggcttttttgcactgtttcttctttttccggtggtaccagaagagcatgcagaagcggaacagagaggaaatgagcacaatgcccagagccagagcaccggccacggccagagtgtgtaccagagactgaccgaaggcgatctgattgcccgacacacagtattccatggtgtagtagatgccagcgccagggaccaggggcaggataccaacgatgaggaacatggtcaccggggctttgtaaatgcgggccagaatctcagaataaagggccacggccatggtggccacaaagttttgcagaatatcgttgccggtgaaattcagaaggttataggcgatccagcaaatggacccacccaaaggggccaggaaaatgaatttgccccgcatgttgtaaatcagggtaaaggccaggcaagccacataggcatacaggaaagccagcaatatttcatgaatgggcataaaaaggctcctttcttttggttagaaaaacagccgatggagggagagcaccataccggcgccaagagcaatggcggtggcgatgaaaagggcctccaccagtttggcctgaccggccagcagatcaccggcgatgatatcccgcatggagttggtgatggctacgccgggcaccaggttcataatggcgccgatgaccatcttgtcgatgtgatcggccacgccgatttccacccagaacaccgccagaaaagcggtgacggcgctggagatggtattgataaaaaagccgttggtgtggaacagatccatgccgtagccgatgagccggatggccgcccccaaagtgagggagcaaatggcgtccatcagattgccgccgaaaaacagggtgaagccgaaggcggccagggcgcaggcaaaaacctggacgggcagaggatagaccggctgggatgcaatggctttcagccgccgctcgatctcctcaaaggtgggtcgttcctccacaatgtcaaaagacaggtcattgagccggtagatccggtccagatcggtggagcggctgtagatccgtttggttttggtaagcgttttgccctcgggagggttgatggtgacgatgatggtggtggggacggcaaaaacatccacctctttgaccccataggccgccacaatccgccggatggaatcttccacccggtagatctccgctccgttttgcagaagggaaactcccacccgggttgcgatgtccaaaagctcctgatgatcgatgtgctgatccataggcttcttcctcccaaaaaccgagtgcaaaggcctccttcgccccggtgtttccaactgcaaatattatactgtatggctttcagaatgaaaagattgcagatgtgggaaaaagcgggaagggtataaaaatatttcatatattttcactaagaataaaaaagttttagagtaaagaggacaaactccaaattttttgtcgaaattccgggaagcaaagcaaaaccctgcggcgcttgaaagcaagggggtgctatgctatactgaaacgagaaagaagaagggaaaaatcccctgaaaaggggtcgcgtcccggggaggacgcatatagtatgtgaagcatgagcacttagccaagatgcaataaaggagtggatcgactgtgaacaaaagctatcgggtgggcatcgtaggcggcaccggtatggtgggccagcgctttgccacactgctggaaaatcatccttggttccatgtgaccgccattgccgcctctggccgcagcgcgggaaagacctatgcccaggcggtggaaggccggtggtttatggatacccccgtgcctgccaatatgcgggatatcattgtgaaagacgcccaggatgtggaaggcatgaaggcggaagtggatttcgtcttttgtgccgtggacatgaagaaggaagagatccgggcgctggaggaggcctatgccaaggccgaagtgccggtggtgtccaacaacagcgcacaccggggcaccccggatgtgcccatggtcatcccggagatcaatccggagcatactgagatcatccacgcccagcgccgccgtctgggcacccagcggggctttgtggcggtgaagtccaactgctctctgcaaagctatgtgcctgccatccatcccctgatgaagtatggggtgaaggatgtgctggcctgcacctatcaggccatttccggcgctggcaagacctttgagacctggccggagatgctggacaatgtgaatccctacatcggcggggaagaggaaaagagcgaacaggagcctctcaagatctggggcaaggtggatggggacaaaatcgtcaatgctacttctccctccatcacttcccagtgcatccgggtgccggtgtccgacggccacctggctgcggtgttcgtccgttttgagaataagcccaccatggagcagattctggaggattggaagaactttgccggtgagccccagcggctggagctgccttcggctcccaagcagttcatccactatttcaccgagcccgatcgtcctcagcctcgtctggaccggcagctggaacatggcatggcggtttcggtaggccgtctgcgtcccgactgccagtatgactataagttcgtctgtctgtcccacaacactctgcggggcgcagcaggcggcgctgtgctgctggccgagctgctgtgtgcccagaactacatctgaaaaatggaataaactgcgtcaagggaaaaacagcccgccccagggcgggctggctgtgcaggttgccggcaaacctatatggcgtaaaaagcccatttgctctttcttaacgaatttgcaaaaagcggcgaccggcgcgtcgtctttttgcacttctcaagggacaagtgtacgctgaaagcgtgcacgcagacccttgcaaaaactcaaaaaagtggcttttgccacttttttgacacgctcaatagcccgccccagggcgggctgtgcagactatggaaaggggagaaagaaacatgaacaatgtgcagaaactcctgggagaggaaaaggtccagaaggctctggattatctgaaacaggatgcaggcaatatcctgaaagaacagctggagatcgtcaccatcccggccccctccaatgacgaaggggagcggacggaggattttgcccgccgtctgcgggaaatgggctatgagcccgtcatcgacaaagtgggcaatgtatatgccaaaattcccggcaccgatccggaaggccccactgtgatggtggccgggcatctggacaccgttttcccccgcactctgcctttggaagtgaaggagaaggacggcgtttaccactgccccggcatttgtgacgacacccgtgctttggccgaagtgctcagcctggcccgggccttcaaggagaccggtctgaagccccgcgccaatttgctgctctgcggcaatgtgggcgaagagggcctgggcgatctgcggggcaccaaggagctgttccgcactctgcccatcgatgcctttgtgtccctggatcactggggcgtggaggagattttgctggatgccaccggcagcaagcggtacaagatcacctataccgccgaaggcggccacagcttcggcgctttcggcaagcccaatcccatccatgccatgggccgggccattgccgccatctcggagcttcacggcttgaaagagcctaagaccacttttaatgtaggtgtggtctccggcggcacttccatcaactccatcccctgtgagacccatatgctggtggatatccgctccaacagcgcccaggagctggagaagctggagagcaccattctggacatggcccgcaaggccgcccaggaggagaccgatcattggaagcatgaggatcatgtgaatgtgatcattgagaaaatcggcgaccgcccggctggttctcagccccatgacggcatcatggcggagaccttctcccaggtgatggaggccatgggcaagaccatgcacatctctgaggccggcagcaccgactgcaatgtgccggtgagcctgggggttcccgctgctgtgctgggttacggcggcaccggcggcaactgccacaatccggaggaatggtaccggcccgaccccaactatcccggcccggcccattctctgctgatgctcctggctctcaccggcctggagggagtctgcgacggcgtgatcgtcaaaaagaaataaaaagagaagaaaagcctgttttccggcgcccgggcatgtgtccgggcgccgggcacaaaagggcaagggagggacagcatgaagatcggattgatccaaatgggagccgggatggacaaggacaaaaatctttgtcgtgcggcggaattcgtaaagaaatgcaaagaggatggagccgatatcgccgtgctcccggaaattttcaatggtccttattccaacgattatttccgtcaatatgccgagcctgtaaaaggaaagagctggcaggccttgtctcatatggcaaaggacaatcagctgtggctggtgggcggttccatcccggagatcgatgaagaggggaaggtttacaacacttcctttgtgtttgatccggagggaaaccaagtggcccgccaccggaaaatgcatttgtttgacatcgatgtcaagggcggccagagcttcaaggagtcggacacctttaccgccggagatgaggtgacggtgtttgacaccccatggggaaaaatcggcctttgcatctgctttgacttccgtttcccagagctttcccggctgatggtgctgggaggcgcccaggtgctggtggtgccggcggccttcaacatgaccacaggcccggctcattgggaactccttttccgccagcgtgcggtggacggccagtgctacaccgtgggtgtggctccggcccgggacgaaaagggctgctatgtgtcctatggcaattccattgccgtctccccttggggagatgtgctgtggcgggccggggcagaagaaactttccaggtggtggagctggatatggagcaggtacagcaggtgcgccagcagctgccgctgctttctgcccgccgggaggatgtatatcaggtgcgtgaacggaaataggaggcgcctatggccagaaagctcttttgccagtggggaccttgggcctatcgcatctcccaggaaaaggagattctccgccggaagatgaaagacctttcccagggcccctttgccaagacattccaaaaagaaccattgcctcagctgatctatgaccacaaatccctcatcctccgccggttgggggatgtggatatggctttgcagcaaaacaaaagggtgaatctgactctagccgctccacgggtggatgggattctgatctatcccggggagactttttccttttggcatctggtgggccggtgtacccgacgcaaaggctatcagacgggtatgaccatcggtaaaggacaggtgggccagggtgtggggggcggaatgtgccaatttacaaacctcatccatttcatggtgctccacagccccttgaccatcctggagcatcaccatcatgacagcatggatctgttccccgattttggccgtcaggtgcccttcggggtgggaacctccattgcctataattacctggattaccgggtgagaaatgacacccagcaggtttttcagctgaaaacctttattgacggggagtatctccacggccagctgcggtgtcaggaacctctgccttattgctggcatatccgggtggagaacgagtattttgaaaaagaaggggcggagctttaccgccataacaccatctatcgccggaaagtggacaaaaaaacaggaaactatgaagacaccgtcctgatgcgcaaccgggcccgggtgctctatgaccacagctatgtgccccaaagcgccatccggcagcgggaagaggaaagaaaggaagaaagcaaatgttccagtatacaataggattcatcggcacaggaaatatgggcgcggccctggtacgggcggcctgcaagggcatcggccctcagcaggtggtggtgaccaatcacaccccggccaaggcccaggctctggccaaggaagtgggctgccaggtggtgctcaccaatgaagaagtggtgcgccagagcaaattcatcatgttgggggtcaagccccacatcctgccggaagtactgcgccagattgccccggtggtgaaggagtgcaccgaccagggagaagaaaagatcctggtttccatggccgctggagtcaccatggagagcatttatcagcatctgaaccttcccgaccgggtgcctgtgctgcgcatcatgcccaacacccccgcggccatcggcaaggggatgactttgatccatccggagtgctgcaagccggagctggtggatgaattcgaaaccatcatggcccagtcgggccggtttgaccggatcggtgagaatctggccgatgccgccggtgcggcttccggctgcgtgcccgcctttgcctacctctttatggaaggcctggccgatggcgccgttatggccggtgtgccccgtcagaaggccatgacctatgtggcccaggctgtgctgggcgccgcttccctggtgctggaaagcggccagcatcccggtgcgctgaaggatgccgtttgctccccgggaggttccaccattgtgggcgtctccaagctggaggaaggcggcctgcgcagcgcctgcatccaggccgtggccgggtctgcggagaagaacaagcagctgggcaaataagtggaaaaagggcttcctgcaaaccgggaagccctttttggtaaaaagaaaggagcacaacatgacagaggtggtggcagcgctcatctgggaaggcgaccggtttctcatcggccagaggccggaacacaaggcccgggggcttttgtgggagtttgtaggcggaaagaccgaaccgggggaaagcaaggagcaggctctgatccgggagtgccgggaagagttggatgtggagattcaggtgggggatgtctttttggaggtgacccacgaatataccgatctcacggtgcaccttaccctgtttcacgcttccattgttcggggaattccccaaaagctggagcatcaagaccttcggtggatcaccccggaggaaatcgaaaattatgccttctgtccggccgatcaggtgatactggacaaactgcgccgggaaggcaaaggataatataacacataaaaagacctggccatgtggccaggtctttttatatatagaataggaggaagttacttcttctgatagccgcacttggggcagacgcccttttcattcaaggcaatgccgcacaaggggcagcggtcgatctggttcttggtgacaaattccgcagaagcggcattgacaccactggtaaaggtgatcttggcgatgttcagtttgtccttcagcagatcataaacgattttgatcatgccttccactgtcagggtctccttggtgaccaccaggcggcattcggggtaggccttggccagctcggtctggaaagcggggcctttcatctggttctggggagcgccgttgcggatgccctggtcctcgtatacctggaggacggcggggagcaggggatcgtcttcccgcaggataagggcgtggtcaaagttcttcagcacttcccaggctgtcttttgaatttcgttgcaggggaaaaccatgttgaccccgggctcgatggtgtcttccacctcgatggtcagaacaccggtgtggccgtggagatattgggcctctcccttgaagccgtaaaaacggtgggcgtattgcagatccagtgtggtgatgcttcgcatagcattgtcctccttgtaaatgaatttccagggataccttggagaaataagaattagaattattctagttctaatatacacaagagagtaacagttgtcaagaatttttttgacaaaaaatccccccaccgacggtgaggggatttgatgcaatcattatgcagaggtcttttctccctgaaggcgagcggcccgcccatcggagatcacatcgatcactcgttttttctggaaaatagccatgttgatcagaatacgcacgatctgatccagggcaatggccacccagataaaggacagatccaggtgaaggagcttgccgcagatcaccgacatgggcacgcggacacaccagatgcccacaaaggacaccgtcatgggcacattccggtagcccgccgagcggatggtgccgttatagaccttggccaggtcctgagggatctgggcgaagcccatgatgaacacatagacccggcccagggcctggatctctgctttgtcggtgagcaatgtcataaagccgccggcaaaggtaaagagggccacgctggcaaagacgccggtgaagaaggagaacttccgcatctgtttgaagtacagccggtacagggcatcgtcattcatgccgatggcccgggccgccagggcggtggatgccgtgacaaagccgatgcccggcatttcgcagatggtctcggcctgaaggcccaggttgtaagcggcgaaagcggcgctgccgtagcccaggatcacattgctcagcacaatggccgaaagctgccagaatacattttcacaggcggcagggatgccggttttatagatctgggccagcacatgtttgtccagagagaaaaaggactggttgtggatttcatggctgaaatagcctttgggggcatagagaagaaaaaggccggtgagccctcctgtcatccaggagcaaagggtgctgatggcagcgccggtaagccccagggccggaagagggccagggccgaagatcagcaaaaagcccaggacgatattgaccccattcatcaaaaaggcgatgtacatgggggttttggtgttgccgtggccgttgaaggcggcggcgttcagactggacagggccataaagggcacggcgaaaatggcgatgcgggcaaagccccgggcggtatccagcaaagcctgatcctgggtaaagagatgaaggatcgggtcaaggaaaatcaatgtgcccagcacacaaagcagggaggcggggatgaccgtcacataggcctgctccaccgtacgccggcattgatcccaccgctgctggccatagcgcaaggccacaatgaccgtagcgccgatgccgatgcctttgaagagagcccaaaaggtgttgatgattcggttgcccacaccctgagcggcaatgtcatcggccatcaaccgtccgatcatggccgtggtcaccagtccggcagacatctggagcatattctcaatgataatcggcagtaccattttgaaaatatcccggttgacttgctttttgtccatcttccccatccttccctttttgatgggggagcggcagctcccttgcccccatactaacacaccccttcacagcgccgcaagagggggcaaaaaccagcacaatccagttgtttgattttcgcaactttttcaagggatatccactgtttttgcaggaactttacaaaaaaacaccggggaaaaatttttttccccggtgcagttttcccgccgggccccaagacccggcgggagagaaatatggtatctttggtgtttacttcagcatttcgctg

SEQ ID NO: 3629 - DNA, 14357 bp, Unknown
  16S sequences of unknown bacteria
agcgcgccgccgacgccctgcaaaaagtataaaagaaacgcccgaaagcggaacgctttcgggcgtttctttttatttttggactttctgtgcgcggtaggtgctggggttgatgccgaacttgtttttgaacacgcggctgaatacgaaaatagaggaatagttgagataggcggctatttccgtgatggtcatgttgctcgtttcgatcaactgtttggcgatatccagttttttatcggaaaaatacgtatagatggatttcccgaatttttttttgaacacgcgcgaaatgtacacgtaattgtagttgagttcgcccgcaatgtcgctgaggcggtcgatcttggtcagattgtggtcgatatagttgatgatgcggtagtacagcgtctgttcgctgtcgatcaaaggagaggtgtagtgctgggtgtgaatattggaaaatacctgcgttacgttgatgcagagcacctttacgagcagttcgaatttaagtgcggaatattcgttatacgattctaactgggaaatcagttcggtaaaggacgccgccatgggcggcgagttgtacacccgcagccgcgcgccgagttttaacagtttgtcctgatacatgatctcgtgaaactgcgaccgctccttgaaactgaatgccagaaaatagtagcgcaaggggtccgcctggtcggaaacgatctcgtgcgtttcgttcggaagggataaaaagatatcgtgcttggagatctccgtgggcacgatgcccgcatacgaggttccttttcccgaaatgacgtaggtgatctcgaaaaaatcgtcgtgcacgtggcttttcacgctcgcgccgttgtcgcagtaaatttcaccgagttgaaaaagtaataaatcgttaaataagcgcggattgttcagataattgaaattataatggaatttattgtctattttaatgtcgttgtcgcgcatttgttactccctttaactgaattaaacctaattgtacatgattcggcgcttttgtatagggggggaaggcaaacgagtaaaaattcgttaaatcattcgtttcaattcgttaaataagcgcgcgggacgggcacttatgcggaagtcaaaaaatgctaaacaactggttaaattgtgctattgtactcgattgtattctgtactatactttgtgtagatcggatgataaaaatgtgtaaggaggcaatatgcgaaagatcgccgtaaaaatacttacgattctgctcgtcgtttccgccgcgattctggtgcttagcggctgtgcttcgctggacgttcaactcgacagggacggctcgggcacggcgacgttgactctttccaaagaagagggcgtgacgaaagaaagtatcgagagcgaactcaacgagattttcgagggcgcggcaaaactgtctcagggcagagacgtgttgaaactcaaatccgtcaaggaaagcgcggacggattttccgtcaagatctctttccgcaggattcgttacatagagggaataggacagtacaattttatgtccttttccgatttcatcaaggaaatgaacaagacgtcgctcgtttccaactgggaaaagggaaagtataaaaatattcagaactataacgaatttatttataatttcaacaaccaggcggacgaatcccgcgccttttctcccgtcacttcgggcggggaaaaactgaccgccaaagaatttaccgcgcaggattctccgtatgccgcgaacgacaagggcatgatcttcacgtattatatcgtcggcttttccaatctggaatccatcaccttccgtttcaacggcaagatcggcgtggtcggcggcagaaacgtggaacttgtgggcgacaacgccgtcaaggtgacgcccgtgcagtccgtcgtcaacgtgacggagatccgcgagggggaagaccccgtcggcgtggagcgcagcgtcgactgctttacgggctacgtgtacttcgtcgaaagcgccaatctcacgctgattttgtgcctttcgggcgccggtctgttgctggcggcgctcatcgcggtcggcatttggcgcggctggttcaaaaaaatctggcggggcgcgcgctgccgctttatccgcaagaattacggcttgtatctgatgatgctgcccgcgcttgtcatgctgatcatattttcctacgcgccgatgacgggcatcgtgctcgccttcaaggatttttccatcgacgacgggatcttcggcagcgaatgggcgggcatgctcggctttaaaaacttttacgacgtcttgacgacgccgggcacgagtttcggtatgctggcgcgaaacacggtgatcctggcggggctgaaattcatattcggatttctttgcgccatcctgctggcgatcttattcagttatctcaaaaacaactggttcaaaaagtcggtgcagactatctcgtatttcccgtactttttgtcgtgggtagtggtttcgggcatcgcctatctcttcctcgcggcggacggcggtattttaaatcaactcatcgcgctgttcggcggcgatgcggtgcagtggtacagtgaaccgcagtactggcgggcgatcctcacctttacttctatctggaagacggtaggctattccaccatcgtgtaccttgcggcgatgaccgccgtcgatcccgctctgtacgaggcggcgaccatcgacggcgcggggcgcgtcaaccaactgtggcatatcacgctgcccgggctgttccccgtcatcggcattcaactcatattcagcctcgggaatctcgtgcgcgacgatttcgatcagatctataccatgacgggcggggggaattcctacctcatcgaaacgacggaagtcatcggaacggtcgttttcaaggcgatcggcaccgtatccgcctacgccaccgccactgcgatgggactgatgcagagcgtagtatcgctggcgctcgtgctatcgggcaatatcatcgtcaaaaagatgggcatgcagggcatgttctaaggggggaggaaaaattatgctgatcaaaagcaagggcgaaaaagccttcgacattttcaatattttcctgatgatcctcttgaccgtcatgttcgtctatcccgcgatcctgatcgtgtgcgcttcgttcacgtcggcgaacatgctcacgaaatacgggtacagcgtgatcatccgcgagttttctctctcgtcctacaaatacatattcaccgcgcaggacctctttctgcgggcgatgggaaattcgctgtttatgaccgctttgggaacgtttttcctcgtcatcacgacttctctgtacgcctacgccgtttccagaaaaaagttggtgttcaaaaagtttttcgtgatggtgctcgtgattcccatgctgtttgcgggcgggaccattccttattatctggtcatcaacggactggggctgatgaattcccagtgggcgatcattcttcccttttccgtcaacgcctggtatatcgtgctcgccaaaaactttttcggaaaccttcccgaggcgctggtcgaatcggcgcagttggaaggggcaaataacgtgataattttatttaagatcgtgctgccgctcggttttcccatcatggcgaccatcattttgtattcggcggtcgccatctggaacgactggttccaggcgatgctgttcatagacagttcgcacaaacatttgtggcccgtgcagtcgctcgtgagagaactggaaacggatttttcctcgctcgtcagttccatcggcggcggctcgaccatcgggctcaattccgaggggatcaagagcgcggcggtcatcgtttcgactttacctatcgtcatcgtttatccgttcctgcagcggttctttatcaacggagtgctgctcggatcggtgaaagaataaaaaaatcaggaggaacaagatgaaaaaactgttatgcgcggctttggctgcgtgtatgctcttggggctttgcgcctgccgtgattcgggcacgccgactcccaagccgagcggctcgtgggaagaggcgaagaaaaacgccgccgagatcaccgtgtacgtggacgcgagcaacatttacggcagttatatcaagggcagcgacgaggcgtacgtaaaggacgccattgagaagaagttctacgaagacacgggcaacgccgtgaatttccaggtgaactacgaatcgcacgccacgttcagcaccaagttcggcggggtaatgaccacgggcaaatgggatatggcggtgagttacctcggtcaggcaggtctggacgaaattgtcttaaaacaggacgtttccatggatcttgccgatcttttagacaattacgagcacatcggcgaggcgatcgcgcccgaagtcatgaacgcgaccaccacgctcacgggcgaagtggtcgggatcccttcctccgtcaaatccaagaccaagggtatactcatccgcaaggattatatgacgaaagcgggctataccgaagacaaggcggaagcggcggcgtcgggcggcaaactcaaattctgtcagaccatcgacgactttacggatatgatgcgcaagatgaaagccgagatccccgcgtgcaccatgccgctgatcggcaattcttacgacatcgaattcgccattacggcgggcgcgtgcggcacgcccggttatcagtacaaatcggtcatttacaacgacgacggcagtatcgataaggtcgtccccggctggctttccgaggggtacgacaaggtgctcggctacgaatacctgtggcagaaagaaggcttgtgggaagcggacaatcaggtcaagaccaaggaacagcgcatcaccgattattccaacggcaagggcgcgatttactgcgtggataccaatattttagaactcatcgacgtggcgcgccaggtaaaagcggtggataagaatgcggaatttaccattttaggaccgctcgacgcggtggacgcgcagggcaaagcgatcgaaaacagcggcgctttcgtcgaagtttccaaggcgaccgactgcatgatcatcaacaagcgttcggaaaaggcggaactcattctcgcttatttcgactggctgtattccgacgtggagaactacgagttgtgctcctacggcatcgaaggcgaacattgggtagacgcgggagaggggtactattcattccccgccggcaaagaggacagatacctcaccaaccctccctattcgggcgtgttcaaatttttatacaacgacgatttcgcctatcgcctgttcaacaactataccgaagaggagaggggctggatcgaaaaggtggagaatgcgaagaccatctccaatcccaccgactgcatgcttttctacaacatgacggcggcggtcgccaacggctatcagacggcggaaaataatttctatctcaactgtcccaccaaggcgtggaacgcctccgccgatcccgcggtgacctatcccgaatactcggcaatgtattttacgcaggctgcggaatatatcgagtggctcacccagcaatataaactctatatcgcccagcgcggttaacgatttctgcaaagtccgcggggctgtgcgccccgcggaaaataaaaaaaagggagaaattgcatgaaaaaaatcaaatatcttttgtcgctcttcgtcgttctggcgctcatgttcacctgcacgttcgcggctttcgctgcggattatacggtggaagtcaaggacgaaaacaacctcgccgccaacaagtgggactgggcgaccgacaaagtcggcagcggcagcgccacgttcggcgaaaacggcatgaagatcgaaaacttcaacctcggcagcagcatctacgccatctacaagaccaataagatgaacgaattcaaatattcgatgcacgccaacctcaatctcacgcgtcccagccaggtgggcgccgattacaatcacgattattctaacctgtacatatcctttatgatcaacgcggatacgcccgcgccttcctatacctgtccctggaacggcgataaagcgtatttcagcatctgtttcgaaaatctgcagggctcgcccaaaacgaatctctacctcaacgagtgtttcgcgggcagcggcgcgacgcgcaaagtggtcagttcgcacgacgatattttatggaacgacggcgaattccattggttcgagttcgaattcgtcaacgacacacaggaagccgtctatgacggcaaacccgtcacctatacgggcaaaacttttaaattctacttcgacggcgtcatgcggttcgaatatttccagcgcgaccagaacgtgtattccgattatctcaaagactacgtaaaggactgcaagttcagcaccacgtccggctacatcggtttctggccgtcgagcgatttccccgtgggcatggacagttcggaaaccgaatgctacgtcgagatcgacaagatccagatcacttcctacgataacggcaacaagacgccttacggcatcgcgcccaagcccgatttcgatatcgagagcgtcaactttacgcccgaggcgagttacgacgcgggcacggagatcgaggtgaaacttgcggatctgttcgcgtacgaaggggacgacgcgctttcctatgccatcaaatgcgagggcaaggatatcggctccatccgcaacggctactgggtatggacgcccgaaaagggcggcaactacgacgtggactttatcgcctccaatgcggacggcaagagcgcgaccacgtacgtgactttccgcgtggcgggagatacgacgcccgaacccgaaccgggtaaaagcggctgcaagagtgctgtgagcgcttccgcgggaatcgcaggcggcgcgctgatcctggcgggcgcggcgctcgcgcttatcgggcgcaagagggagaggtaataaggtgaagccgttcaaaacgtgtctttgtctggcgctcgcggcagcgttcgtattctgtgcggcggcttgcgacggcggcaatgaaaaggagaatcctgtgaccgtcatcgaagaggggtattcgcgcctggacgtaaagcaaagcaacggcagaaagacggagggtttcggcacgcagttcgacacctgtatcgtggaaaagcagaacgggctgaacgacgcggactggaaggtgcaaatcgacgcgctggaaaaaatgcagttgcagagcgtgcgtatccgtttctatcccgaaatgtacgagcgcggcaatgataataacgatcccgaatctttcgattacgacagccccaacgtggatttcgattccatcgaaatgaattatctctataaacttttggacgtgttcgagaaaaacggcgtcaaagtggatctgagttggtacggctgccgcacgacgtttcagtcggaagacggaaaaatcaacggcagttggctgggcggcacgttcgggcaggacggcatcctcggctggatgaacgcgcccgttctcaccgaccatcccgacgaggagttcgcggagtcggtcgcggcgtgtctgaattacctcatcaacacgaaaaaatatacctgcctgtacgaatacagcctgtttcccgaacccgaaggcgtcattcacgacatggcgaaatacaagcggatctgcgaaaaggtgacggcgaatctgcaaaaatacggcatagcggacaaaattttgttcagcggccctgcggattacaacaataacacggaaacgtacgagagtaaatatctctcgtatatcgactatcagaaggcgacctcctcggtctacgcgttcaaaaacgagtcgagcgatgcggaaatgctggcgtttgccgaggcttacgcggcggtgtgcgacaaatacgggctcagttggggcattgcggagagcggtacttccaactttctgacggccgtgaccaattccgattcggatacttacgagcgggcgctgttcatggcgcgctttctcatcaacatggtgaacggcggctgcacgaatatcaaatatttcgtgttcagcgactgctattacgacggaaacctgaacgaattgggacttttccgcttcaaacacgaagactggaaggcgaaacccgtgtggtacagttggtcgctcatcacccgctacacagagttcggcagcgatattttccccatcgggagcgatgtggaaggggtgtgtgccacggcgtttaaactgcccgacggctcctggacgtatcttctcgcgaacagttccaaaaagacgcagaaagtcgcaatcgtcaacgagcgggaagaccgccccgaaacgcttgcgcagtatcgcatgacgggctcctccctccccgaagacggcgcgctcgaactcattgccaagacgggcgacgtttcggcgaaaaaccgcgcggcgcacgtgacgctcgcgcccaactctttcgtcgttctgtcggataaacagtaaaatgaaaaggaaaaatgcaatgaaaaaattcatcagtttgctattgacggggctgcttctgttcgccgcggcgggctgtgcgcccgaccaaaaaggcgagatcaccgagatcgaagtcgaccccgcgtacacgcgctacgatatcaccgaagccatcgattacaagacggacggattcggcgcgcagatcgataccgacgtatatatgccctggaacaaattgaccgcggacgaggaaacaatgctggaacagcgcatcgcggacatgaacctgcaatacacccgtatcaaaatgttccccgaatttttcgagcgcggcaacgataacggcgatccgaacgtgttcgattacgattccgaggacgtggatttcgacagcgtggagatgaaagcgctctataaaattctggatatctgcgaaaagtacggcatccgcgtggatctgagttggtacggcgcgtatgcgactttcgattcttacgacggaaagtacgacggtacctggctcggttataacaacgacggcagcctcggctgggtgaccgcgccgcgcaagaccgacgatttcgacggctacgccgaatacgcggaaaacatcgccgtggggctggattatctcatcaataccaaaggatatacctgcatctggggttacagcgtcattgcggaaatgttcatcaccgataagggcaccatcgtctgggatgattaccgcgaatgcgcacgcatcatcgtggatcgcctgaaaaaagacgggctttacgggaaagtcaagcatatcggcacgtccgccatggcgcataacgcaaagtactttgccgaagaacaggagatgatggcggatatttacgacgtctgcggcgtaggcaactacaactgggataacgacagtccgttcgaggcgatggactattattttcaggatctgatgaagacgtgccgcaaactcggcaaagggctggtcgaatcggaattctgtcagggcctgcactttctggatgcggtgaacaagacggatatcgacgactataccgcgggcatctatctcacgcgcttcatgatcgcagccgcgcagaacggcgtgagcgcattcaatcactatattttaggagatactttcttcacgaattcctacgtgcatacgatgggactttggatgtaccgcgacaacgactggaaagcgcaccccgagtattatttctggggcatggtgtgcaagtatacggatatcggcagcgaaattcatcccatcaagtccaaagatgaagacgtgtgcatgatcgcattcaaactgcccgacggctcctggtcgtacatgatgacgaataacggcgcttcgaacaaaaaagtggccgtcgtgtacggaaaggaagaccgcgccaagacgctttccgcttacaagatcaccgaatcgctcattcccgaagaccgcgcggtggttctccccgaagcgtacgcgagcgtggattcttccaagggcgtgtcgtacgttacgcttccgcccatgagttttaccgtactttcgaataaaacttttcaagcataaaacggagtttgcagatgtctttttccaaacaggaacaaacggttttggattgtctgaaagacacggcctttcagcccgttcagccgcctaaattcaaactgaaatatgccagcgtggaaccggggctcgcgtattccaatacgctgtgggactgggattcctactggtacacttacgcgctgaaagacgtctgcgaacttttgcgcggggacgaaaccttcgactttgcgcaaaagagcagactggtatcggaagcggcgaaaggcaacgtcttaaactttctggactttcaggaagaggacgggttcgtgcccatcatgctgcgcgccgatcacgaaaacgatacctacgcggtgcgccccgacgtgatgaacacgcacaagccctttctctgccaaagcgcgaaaatggcgggggagttgtgcggcgatctttcctggctgcccgttgaaaaactcgccctctatctcggatattaccgcaaaaatcagttcgacgagcgcagcggcctgtatttctggcgcgacgatatcatgatcggcggcgacaacaatcccaccgtgttcggaagaccccgaaacagcgccgcggatctctatcttaactgttttttatacgcggagtaccgcgcgttcgcggaaattttgcgatggaaaggagaggacgcgcgcctgcccgaagaggaggggaaccgcctcttggagagcatccgccgcgaaatgtgggacgagggcacggggctttactattcgcaggacctgctcgtacatacctacaagacggaaattttccatcgcgggctgcccgcgttctggaaaagcatgcccctgaaaatcaagacgtggggctgttatctgccgcttttgtgccatatcgccacgccgcagcaggcgcagcgcatggtgagagagtactttcaaagcgcgctctgttcggattacggcatccgcacggtcgcaaaggacgaaaagatgtacgatcttacgccttcggggaatccctccaactggcttggggcgatctggacggtttccaattacgccttgttcagaggatttctcgattacggctttgccgaagaagcgctcacgatcaaaaatcagacgctcgcctatctcgcgcgcgatatcgaaacgcacgggagcatgagcgagtcgtatcacccggatacgggcgaggggatattgcatcataactttttcagttggaactgcctggcagcctccatgatacgggaaagcaagaacatttgaaagaggtgtcacatgaaattcggcgcgattaccgactgcctgaaacaacctaccctgcgcgaagcgatcgccgccgcggcggctctgaaactcgacggcgtacagatttacgcgacaacgggcgaattcagccccgaaaatctgaccgaagcggacaaaacgtattacaaaacgctgctcgcggaacatgatctttgcgtcagcgcgctgtgcggagatatgggcggtttcgggttcgagatcgaaaaggacaatgccgcgcgcatcgaaaagacaaagcgtatcgtcgatctggcggcggaattcggaacaaacaccgtgactacgcatatcggcgtgatccccgccgacgaaagagatccgcgttaccgcgtcatgctgaacgcgctcaccgcgtgcggcctgtacgcaaagagccgcggcgtcacgctcgccgtcgaaacgggccccgaaaaggcggcgactttaaaaaaattcgtcgagcgcaccgaaggcggcgtgggcgtcaatctcgaccccgcgaatttcgtcatggtcaccgcgcaggaccccgccgaggcggtgtatcttttgaaagaatatatcgtccatacgcatctgaaagacggcagaaaactggactctgcgcagacgcccgaagaggtgtaccacgctttcgccctcggcggcgtggaggcgctcaacgcctgcgacggattcgaggaactgcccataggcaaaggcgacgtggattggaaagcctatctgcgcgcgcttaaggacgtcgggtatagcggctttctgaccgtcgaacgcgaggcgggcgaaaatccgctcgaagacatcgccgcgggactggaatttatccgcgcgctcatgcggacatgaaatataacgaagatatgcgcccgcgcctgcactttacgccgcgcgcgggctttttgaacgatccgaacgggctggcgtacgacgaacgttcgcatacctatcacgtgtgttttcagtatcaaagggacgtgaactgcgacctttatatcggctggcggcacgctgtaggcgatcatttgtgcgctctgcgcgaacaaggcaccgtcatagagccgaatccgtacggcgttatattttcgggaagttcggtgcgcgacgaaaaaaacgcgagcggactgtttggcaaagagggcgcgaaccttttgtccttttacaccgtgcatgatttagaaacaaagcacgagtatcaggcgatgtcctattccgcggacggcgtttcctggacgccgtaccgcggcggcgcgcccgtcatcgacaacgaaaacgatcgctacggcgtgaacgctttccgcgacccgaaagtcgtgcgctgcgacgaagatacctggctgatgatcgtgggcggcggcgttctgcgcctgttcgcatcgcgcgatctcaggcattgggaatttcagtcggagatcgaaaatatggacgcggaggatgcggagatcacggaaaaactgttgatcctgcaaaaatatcttcccgataacgtgacgcacggagagaagatgatctccgaatgtcccgacctgttccccatgggaaataaatggatattatcgggcggcgggctcttttacgtagtgggaagagtggaaaagataagcggaaaatatgaatttattgccgagagcggcaagcgcgcgttcgcgcgttcgacagaatttttcgcgcaccgcggcgagccttacgccatgcagaccttttccgacggccgccgcctcgcctttttctggcatatggatacgactgcgcgggagatcgaaaacaagccctggaacggcgcgctttcccttcccttacaactgcgtatgcaaggcggccgcctgtgcgcatatcccgcaagggaagtcgatcggcagtttgagaaaatcgtattttgcgccgcgcgcgtcagcgaaaacacttcgctttcgcccgagccgctgctcctgttcgatcttacgatagagggcgaaaaggattataccgtctttctggaaaacgaacgttcaatcatccgccttttcgcgtgcccgcaggaaggatatttatatatcgatctgacgcgcgcggaagaattttacgaacacaccgtggggaaaattccgctcgggaaacgtggtaaagtgcgcgtcgtaaaggacggctgcgcgctcgacgtattcgcggacggcggaaaaaactggtattccgcgttcgtgttttcggaaaacatgcgatactttgtgcgcctcgcaagcgagagcgccttatatgcaaaaaacgtacggctgaaaacgggccgcgtataacgacaaaattttgatttgccctacggagcaaaaggagaaacatcatgaatcaaaaaatttgtattgcagtcgtcggctgcggacgtatcgccacgaacgggcatttccccgcgtttcgggcgctctccgacatggtgcgcgtgaaatacgcgtgcgatctgatcgagtccaaagcggctctcaaacaaaaggaatatcccgaactcgtggaaaacgtgatcaccgattacaagatcgcgctcgccgatcccgaagtcgaggctgtgtacgtgctcacgcccaactacgcgcattacgtcgtcacgatggacgcgttgcgggcgggcaaacacgtgttctgcgaaaaacccatcaccgtcaactataaactgtcggaggagatggctgcggaggcgaaaaaacagggtaagatactcaatatcggcgtctgcaaccgctacaacaaatcggtggaaatgctcgaagagatgaaccgcaagggaaaattcggcaacatctatcatgtatattgctctttccgcagttaccgctgtatcccggggctgggcggcgcgttcacgaccaaagcggaagcgggcggcggcgtgctcatcgactggggcgtgcattttctcgatctcgttctgtacatattgggcggcgcgaaactgaaaaccgtcacctgcgacgcgtacaacgaaatggcgaaggatatgaaaaaatactcctatctcggtatgtgggcggaagacacgaagaacaccgaaacgggcgtgaacgacgtggaagatttcatttcaggctacgtgcgtacggacaaggcgtccatttcttt

SEQ ID NO: 3630 - DNA, 3893 bp, Unknown
  16S sequences of unknown bacteria
cgcgctcgacgaggcgtttgccgagcccgcggtgctgcacgccctcggcgctctcgtggaagttggcgacgcgcccgtacacgtgcacttcgcggatcatcgcctcgcctgggctgacagggagctcgtcttgatgcgcgcggacaaacgaggcgtcgggcagcgacaggcgcaggaaacccgcgatgccgccctcgggcgtcacccactgcaagaaaacctcgcgggtggcactcgtctcgtactcgacctgctggagctcgagcgaggcgggatcggtggcggcgaggctgatttcgcggtagcgaatctcgtcgatctgggcgtccatctgggaaagctttgcctcgaccatctgccgcaggttcgtcttcttgttgccggcgacgatatctccggcggaaaaatccctgatcatgcgcgaaacgcggcagaacgggggcgtcgagaggacgtcgtggaccagcacgtcgacgagctcgtcttcgccgtagggccgccactgtcccgcctcgtagcgcgcgacgaggcgcgtgtcctcgatcagggcgcacgggtagagcttgacctcgtcgggcatgaacgaagggcagctcatgaactcgcggtagtcctcgacatcctcatcaggcgtcgagccgtagaggttgaccatgaagtgcgcgtggatcttgaaaccgaagacgcggagatacgtgaaggcacgcgcgatctgctgcacgtcgatgcggcgctcgttggcacgcagcacctcggggcgcaggctctgcacgcctatctgcaccttggtgcacccgagctgccggaagaacctgagccgccccggcgtgatggcatcggggcgcgtctcgatgacgagcccgaccacgcgatgtgccgccgtctcgttgatgcggtgctgctcgaatagctccgcaagcgtcgcctcctggaccgacgccacctctgcccaggctttgctgttcccgtacaggcggtcgaacgcggcgttgaagcgctccccaccggctgcgatccgcttctgctcgagctccacgaagcccgcaagctccgcctcgtcgcaagagatgccgcgcccccggtagaagcccctgcgttcgcgcacggattcgtcagtatggggcgcgtcgttgagcgcacggaagagctcggagacaaaccaggtctgataggaaatcgggtagtcgctccacgtcccgccgagcacgataagctcgaccttgtcgcagaggtgccccatctgctcgagcgcacgcaggcgcgaggcgacctgcaggtacgggtcgaagaagttgcgctcggcgcgctggcaggcaggctcggcatgcaggtagctcttgggcatgcgcaggtcgttcgggcagtacagacagtcgctcgagcacttccagggcttggtgatgaccgtgatcgtggcgacgcccgacgccgtgcgccgcggcttcatgcgaagcgtgcgcatgaggcgcgcctcgagctcgtcatcgacgccccacgatgcccagcgcgcagggtcctgttccttgacgcgcaggtagtacggcaggatcttcttcttggaatacgcgcgctgggacgatttgaccaacgcgttatgcgagtcgatgagcttgcccagctcgcggctgtcgaggcttttccccgacctgaggattgcgagtatttcgagtagcagctgttccatggggcctgattctagcgtaatcgctgtagaatcacgggatatgaccgcagataaccagacagcacgcaggctcatcgagctcaacaccgagttctaccggctccaggccgcctcgttctcgcagaccaggcacagcgcctgggcgggatgggagcgcctggtagacgggctttccctgggaaaccacgcgaaggtgctcgacctcgcctgcggcaacctgcgtttcgagcgcttcttgcaggagcgcttccccaggacgcgcctcgagttcgacgccatcgacaactgccccgcgctgagcgcgggggccgagggcatccccgtgcgcgacctcgacctggcgcaggcgctgctcgaggagcaaggacccgagctctctgaacacgacctggccgtctcgttcgggttcatgcaccacctgcccaccttcgagatgcgctgcgccctgctcgaactgctcgcgcgagcagcggcaccgggcggcgtgtttgccgtgtcctgttggcagttcatggacgatgagggtcttgcggccaaggcagagcagacgacggcacgcggcatctccgagcttggcataaccggcctgggaccacgcgattacctgatcggctgggagacaaggcccggcgtgtaccgctactgccaccatttcgacgacacagaggtagacgcgctcgccccccacctcgccggcagagctcagctcgtcgacagctaccacgccgacggaaggaccggccgtctcaaccgctacctcgttttcaaacgcacccggctcggctaagatagacggccgatacgacacagattggcattttcgatgaacaaagacatcctccgcacaaagcttatcgaggcgcttcccccagaggcgattctcgaagacgagcccatgagcaagcacacgacgtttcgcgcaggcggtcccgtggacttcctcgtgaccccgagctcgatcgaagagatcgaaggcgcgctcgcggcagcccgcgcggccaacgccgactggcacgtcatcggctgcggcagcaacctgctcgtcgccgacgagggcatcgaggggctcgtgatcgtgctgggcgagaagttcgcccgcatcgacatcgagggaaacctgctgaccgcccaggcaggcgccacgaacaagcaggttgccgaggctgcgcgcgacgcaggcctcacggggtacgagttcgcctcggggattcccggctcgatcggcggggccgccatcatgaacgccggggcctacgacggcgagttcaaggacgtcggcgtctcggtgacctgcctgacactcgagggcgaggtcgtcaccgtctccgccgccgacgcgcagtggaactaccggcacagcatgatgtcggaccgcggctacatcgtgctcgacgcgaccatccacctcgtaccgttcgacaaggacaagatctccgcgcgcatggcggagctcaagcagcgccgcgaggacaagcagccgctcgagctgggcagcgccggcagcacctttaagcgccccatcgggtactatgcgggcaagctcatccaggatgcaggcatgcaagggcacacagtgggacgtgcccaggtatccaccaaacacgccggcttcgtcgtgaacatgggcggcgccaccgccgcggacatccgccaggtgatcgtcgacgtgcaaaacgccgtcttcgccgacgcgggcgtgcacctcgaaaccgaggtgcgcatgtggggcttcgacgattaggggctgatggcgcatgacgctcaggatccgcacggcaaccctcgacgacctcgacatcgtgaccgagctcgagcaggcggcgttcctccccgcggaggccgcctcgcgcgagcgcatggagcagcggctgctgtactttcccaaccacttccacctgatgttcaacggcgatgcgctcgtctcctacatctcggcgatgccgtcagacgagcgcgacctgcgcgacgagatgtacgccgacgcgcgcctgcaagacgagctcggcagctgggagatgatcttcagcgtcgccacgctgccgtcctaccagcacctcggcatcgcctcccagctcatgcgcagctaccttgaaagcagccgtgagcagggcaggaaaggcatcgtgctcacctgcaaggaaaaactcgtcggcttctacgcgcgcttcggctttgtggacgagggcatgagcgacgagaagaaggccgt

SEQ ID NO: 3631 - DNA, 4265 bp, Unknown
  16S sequences of unknown bacteria
cggcagctcagatgccgcgggccccatgcgttgtggctatctgcgaaggcgcttactcgccgaagaacaccttgatctcgcgctcggcggactcgacggagtcggagccgtggatgacgttttcgtcgacggtcaggccaaagtcgccgcggatggtgccaggagcggcatcggcgcagttggtcgcgcccatgagcttgcgcatggtggcaacggcgttctcgccggaaacgaccatcttgacgaccgggccggaggtgatgtaggaaatcaggccatcatagaacggcttgcccttgtgctcgccgtagtttgcctcggcctcctcaagcgtgaccatgcccagctccatacgctcgatcttcaggccaacgcgctcgatgcgggagataatctcgccgatgtggccgttgcgcacgccgtcgggcttgatcatgttgtaggtcttctcgattgccatctgtggttcctttccaaatcttccaaatgaatcgcgtctatgaaagcggtccgcggcattctacaccacggaccgtctattccactgttattttgcactggggaagtacagctctatgtattcgaccgcccacgacaggccgtcgcgcgcgagcactgtcttgtactcgatctggccgccctcgcgcagcgtgcccttcacgtacacggcggtctgcgaggaggaacgctccacgccctcgacgttgtacgcggtcatgttggcaagcgtcgcgacttggctcttgcgcgccgtctcgtcgacgtcgtttgcccagtactggtcggtgtcgtcgccgttttgcacggcggcaaagaagttgcgcgtcacatcttcctgggacggatagccatagcccatcatgtaggcggcgcaccctgcacccacgaccagaatcgcgaggatgacgatcacgatggccaccttcagcccgacgccacgggacttgcgcttgcgtttgcggtcttcgcgcgcgtcttggttgatctgattttcggtgacgtcgaaaaacgccgtctggtcgggattgggcatatgcgtgtcggtgcggtcgaggtcgttgagcggctcgcccgagtcgacgatcgccatggggcgcgatgcctcgagatcggcatatccggccaggtcatcgtactgattgtagtcgtcgacgtactcaccctcgtcgccgtagccatcttcgtagtcctcgaagtagccgtcgtcttcgccggcatcgtccacctgctcgtcatctgcagccgcggcatcgtccgtgcctgcatctgcgtcgtcatcatcggctgcggcctcgaccggctccgatgcgcccgtctggatgtcgagcgttctctcggccgtgccgacaggcgccatgacctgggtttccgcagcggaaagatcggcatcggccccgtcgtcggacaagccgagctcttcgagcgtctgttcgagctcgtcttcgctgaccggggtggcaatgggcatcgcgacggtcgcgtccagctgtgcctcctcgtcgacgtcctcgtcagacgcatcccgcgcgggctcgctgtctttgtccgcagcgtcaggctcgggctgggagttcgcggcggagccgtcaggggtagccccttcggccgcgtcttcagctttgtgctcccacggttcctgcggctcctcttctacctggcccgcatcgattgtgggcatggcctgcgtcttgggggcgaacgggtcaaagccctcgtcacccggctcgagccccgcgccctgctcttcgacgccgcccgccaccgcggacaggttggggatgaagcccgtgtcgaggatgcccggcatgcgcgagtcgaggcggtccttcaggctcatcgcgatctcgtaatcgtggctcgccatgggcgaaagctggtagttgccgcccgacatggcctgttcgaaggcattgatggccttttgcacgcggccttcggccatgtaggcctggccgaggttggcaagcgccttggcctttgccttgtcatccaggtcgaactcgagcgcggtctcgtagctggtgatcgcgtcggcagaacgccccagctccatgaagcagacgcccaggttgacgagcgcctttgccggagcggggttggccgggtcgagcgcggcctcgcggtaggcggcgcccgcctcggtcatattgccgagcttgagctgcgcggcgccgatgccggagtacgccttgtacggcgttgtgtagatggggtacgtgagcgcacggctaaaggcgacgagcgcgttctcgtagtccttcgagcccagcagcgcagtgccgaggttgacgtacagcgacggcttgcgcttttcggggctgccggaaagcgcgcgctggtagaacgtggcggcggcgtacgggtcgccgcctttcacgtagcagttgccaatgaggtggtagaacttgctcaaatcggcaggagagaggttttcggtgtcttgcgcgcaagcagagaagccctcgagggcggtcttgtaatcgccctgcgcgtaggcctcctgagcttgtttgaaaacagctgcgttcatagtgtggtttctcctatcgacaccaagtgcagtgcagtggcgcgctagtcgttggcgttctcgatcgtgatgctctcgatgaggctgccggcgcggagcttggcgatgacgtcgaggccctcgatcgtgtcgccgaacacggtgtagtcaccgtcgaggaacggctgggggccaaggcagaagtagaactggctgcctgcggagtcgggcatggagctgcgcgccatggcgagcgtgccgtctttgtgctcgttgtgcgggttggtcttccactcgcccttgatggagtagccggggccaccggtgccgggcttgccgttggggccgtagccgccgcgtgcgacctctgccggggtcatgtcgcgggtgttggggcagccgccctggatgacgaagccggggacgtagcggtggaacttgaggccgtcgtagaagcccttctgggcgagctcgacgaagttgccgacgtggatgggggcgtcctcgccgtgcagctgcacgcggatggtgccctcgtcggtgacgatgacggcgacctcgtttccgttcggtttatattctggcgtgtagagtgccatgattcgctaacctccatgtgaagtgccctatgcacctcgttggtagacataagtgctgtaattctagcagtgcttgaacttcttcgcacgtggcgctggtagcgtggcccttttgcgccacccaatcgcccctcaaggcccaaaaggggacagtccccaatttgcagggcctgtcccctatttgcagttttcggggctattgttttcggaaaaaatagagcataatctaccgaattagttccgataactctctggagaggagttttctgtgcaagtcatcgacacgcaggtgtacaagttctcgaaggacaacgagccttgctacaccgcgaagccaggcgagctcatgctgttcaagacgctcgactgcttctcgaacaagatcacggacgagtccatcaccatggccgacctcgactacggctacaacatcgccaaccccgcggctggccctgtctacatcgagggagccgagcccggtgatgtgctcgtcgtcgatatcctggacctgcaggtcgccgacgagggcaccatcgcaaccgacgaccactgcgggccgctgttcgagaccacggggtaccgcacgaagaagattcccgtcaaagacgggttcgcgaccttcaaccaggtcaagttccccatcaaacccatgatcggcgtcatcggcacggcgccgtccgacgacgacatcatcgacggctacgtgggaagccacggcggcaacatggacaacaagctcatcggcaagggcgcgcgcctgtacttccccgtccgcgtagccggcgcgctgctgcagatgggcgacgtgcacgccgcgatgggcgactccgagctgtgcggcacgggcatcgaaatccccgcggaaatcaccgtgcgcacctcgctcatcaagggcttcgagctcaactggcccgtgctcgagacctccgacaagtggtacgtcaacgcgtgcgcgcaggagtttgacgaggcgctcatgaacgccagcaaggagatgcagcgcctgctgtccaaccgcaccggctgggacctcgaggagacctacatgttcatgtcggtccaaagcgacgtcgagctcaaccaggcatgcaagccgtgcgaagtgcagctgagcctgcgcatcggcacgcccaagctgcccggcatcgagcggctcc

SEQ ID NO: 3632 - DNA, 15664 bp, Unknown
  16S sequences of unknown bacteria
cttaatatttcctgccagggggcttttttgtactgtccgcacaagatggggcagtccacttttatgggcgcttttcttttccccggaaatggcaaatgacgattgcatcctccagaaatatcctgtatgatattgttaagaaaccgggtgttctctttcgagcacccaaggaggaatgtgacatgaccagaaaacctctttgcatccgttccctgtgttttttgctggccctactgctgctgtgccccatgatcctgccgggaattcccgcccaggccgcttcttacaatgcggacaaagccctggcctatgccaaggcccactggaatgacggccaggggctgtgcgccgagtttgtttcccggtgtgccatcgcaggcggcgccaacatctcggtgatcaaaaccaccaccagctgctataacgccatttccaaggccaccggcgtatccggtcagacgctgcgcctggcctccgatggctatgcctacaaaaaggataacagcagcatcctggcccctggcgatgtggtgctccagtggtgcaacacccaccagaaaggtcctcacatcctgctgtgcggcggctatgacagcaaaggccgggccaccttctatgcccacaatgccgctatgaacaaccagccctaccgcctgagcgtgaacaccgcctatgagcacaccctggattgcgatatgggcgccaaggtgctccacctttcttccggtggaacgaccacgccggagccggtggaagtgaaattcctctccaccaccgaccccaactacaccagcaagtatttcgtcaccgaaaccaatgcctgcccggtgattttgtgcaaaaagaccgccggaagccatgtgtccaccgccggtatccgcatctatcaggaaaataacctggtggacgagtttgagatgaatgtgaccaatgtgtcggacagcctggatcagttccacatctggtttgacttaaacgaagaatgcggcatcacattgcagcccggcaccacctaccggtatgtctttttcgttacggtgaacggaaaagaatatgccgctgcccccctgtatttcaccacattgggaaccagcatcaagcctgtttccgtgcttctcaacggaaacggcggctcggtgtcgcccggtttcatctcggtgacgctggggaaaacctatccggccctccccacgccggtgcgggaaggctacaccttcaccggctggtataccggcacttcctccagcgcccagcgggtttctgccggagatgcggtgccggccacgcccccttcttccctctatgcccattgggagaaaatccctgttgctgattacaccgttaccctccatgtgtatgtggacgggaaagaaaccgatgtgcgagaatacgaaaatgaaagccccaatttccgcatgaatctggagggggccatccccggctgcaccctggatggggcggaatccaacttcgcctttacccgggaaggggataccctgattttccagggaatcaccggcccctgcaccatcacggcgtattttgtctcccccaaggaagaactgcccgatggcctgctgcaaaacttcgtctatgacaactgggcctggggaggctatggcgatgtggtgcgcgatcaatggttttatgccaatgtgcgatctgctacccggttggggttgatgcagggagccgaaaaaggccgcttctatcccagcaatcagctgacggtggccgaaatgctggccctggcctgccgggtccatctgcgctaccacaccggcgagagcgatctgcccaacaccggcagcggcccctggtatcagaaatatgtggactacgccatggaaaacggactgatcgaccgctattatgccatgaatgccccggccgaccgggacctgtttgccctggtattcagccgggtgctgccccagagcgccctggaagagcggaatccggacatctcttttgcggacatttcctcctgccagaatccccaggcggtgaagctgctggggaaggcgggaatcatcgtggggagcatcaccgaaaaaggccgggtctaccagcccgcttctcccattctccgctcggaggccgcggccattctcacccgtatcgccgaccgtgacctgcgccaaatcatctgaatatgcttcccctccgttttccggaggggcagccttttttccggaacctttgcccgcttctttcgtctaataaatcagaaaagaggtgctttctatgaagcttccaaagaaacggattttttctttgatgggcggcgcccttcttctggccgtggccgccggtctcattttctttttccggggccgctctccttcggagaactatgctctggaaaaggccgattatccccggatggtttcccaccccaaaggcagcacctcttcccggaaatgggatgcctggcaggaatctcttcaggcccttcagccggaagagggctaccagcaggggatggagggattttttcaaaaaagcatccctctgtttctccaaaacgaagagggagaaaaccagctgtattcccctttgaatgtgtatatggctctggggatgctggccgaaaccaccggtggagaaagccgggcggaaattctggctgcactggggcatgactccctggaagacctgcgcacccaggcccggaaggtgtgggaagcccactaccgggacgacggcctggtgaccagcattctggccagctccctgtggctggacgaaagcctccccgcggaggaggatactctcaagcagctggcccagatctattatgcttcttcctatcagggaaaaatgggaacggaaaaaatgaaccgggccatcggcagctggatcgacgagcaaaccggcggcctgctctcccagatgaccaaaaacatttccttcactccccaggatatgctggccctggtgaccacggtgtatttcaaagccccctgggcgaaagaatttgacccatccaacaccacctccggcaccttctatggcttggaggaagaacttcccgcccagatgatgcacgacagctacacgggaacttacgcctggggcgaacacttttccgccgtgggaaaaggcttggaaagcagcgggggaagtatgtggtttgtgcttcccgataaagggattacgccccaacagctgctgggggatcctgaggcaacggaatttctatcctctcctcaggcatggtccgatgaaaaggacatcaccgtccacctgacgatgcccaggatggacatttcctctcagaccgacctgttggacaagttggaaaaactgggtatcacccaggtgctctccccggacaccgccgatttttcccctctcacttcccaggaagggctttgtctcacccaggcccagcacggcgttcgggtgaaagccgatgaagagggagtggctgcggcggcctacaccatcatggcgaatggcgccggaatgcccccggaagatgaagtggagtttgtgctcaatcgtccttttctttttgtcatcaccagcaatgacggcctgcccctttttgtgggcgcggtctaccggccctcctgacaaacaaccatatggcctgctctcatggcagagggcaggcttttttcttttatatgtccataagcaaacttccagaaagccagtcctggcaactggcaagaaaatttttgtttctccccctaggatttttccccggcctttggtacactgtaaaagcgtgagcaacagaacatcccattggaggaatgctatgaacttatccatcgaaacaggaattccggcgctgacggtgtttttgcagggacttttcagtttcttttctccctgcgtgctgcccttggtgcctttgtatgtaagttatctggcgggcggggccaagaccgagcctgacggcactctgtcttatccccggggaagggtgatggtcaacaccttctgctttgtgctgggggtgagtttcgccttcttttctctggggctgggcttttccgccctgggccggttcttctcgggaaaccggatgctttttgcccgcatcagcggcattctcatgatcttcctgggcatttatcaaacaggtttcctgggcaaaagccagaagctggagcaggaaaagcggtttcacctccggctggacaaactgcccatgaacccttttgtggcctggcttctgggcttcaccttcagctttgcctggacgccctgcgtcggcccggctctggccagcgtgcttctgatggtctccaccgccgcctctcccgcttccggctatctgctcatcggagtctataccctgggctttgtcatcccctttctcctggtgggtcttttcacctccaaagtgctggagtttttcaaacgccatggaaaagtgatggcctattcggtgaagatcggcgctgtgctcatgatcctgctgggtgtgatgaccctcaccggctttatgaatggcatcaccggctatctttcctccttcaccggcggaagcacagcccagacccaggaacagacggcatcccaggaacaggaaaaagaagaggaggccggaaatgcggcagaagaggagaaagaaaaccaggattctgctgctcgggaacttcccgctgccccggattttaccctcaccgatcaaaatggcgtgcgccataccctgtctgactacaaggggaaagtggtattgctcaacttctgggccacctggtgcggtccctgtaaaatggaaatgcccgatcttcaggcggtgtacgaggattacggcaaaaatcaggaagatgtggtgattctgggcgtggccaatcccaagactccctcccggcctcaaaattccgatgtgaccacagaggaagtggcggcctttcttcaggagggaggatacacctatcccaccgccatggatgagaccggccaggttttcctgcaatacggcgtctctgcctttcccaccacttttatgatcaccccggagggaaaggtctatggctatgccaccggcactctgacccggggcacgatggaaaattttatctcccagaccaaacaggccggggaaaaataagaaaaagagagagtggggaagaatgttttatttgcttttggcagtgtgctccagcgcctccatcgcccttttgttcaaggtggctgcccgggtgggggccagcggcagcgtcatcaccaccgtcaattatctgacggcggccctgtgctccggggccatggtgctgtttcaggggccggacttttttctgcccgatctgtcagccttcttaggctccctggggggaaagaccccggagggcagcatggctttggccatctggctgggatgctttaccggcgggctgtatctggtgagttttctcgcctaccagcgggccattcaccaaagcggcgcttcccttgcgggaatgttcagcaagctgggcattctgctgcctatgctggtatcggtggtggcctggaaggaatatcccactcccatgaaatgggtgggcatcctgctggccttgggttctattgtgctttgcaatctgggaggcgaacggaaaagcggcggtatgctgtggctgctgcttaccttcctcttttccggactggccgagtttatgaccaagatctatgagcgctatggcctttccgattaccagaaccatttccttttggtgatcttcctggtggcgcttctgctcagtctgcggacactggtgcaaaagcggccccgctgggataaattttccgtctttctgggagtgtgcatcggcgtgcccaatctgctctctcccttctttttgctgcgggccctggccgaactgcccgccgctgtggtgttcccggtgtacagcgccggctcggtggcggtgattttgctgggcagcttcctgttcttccatgaaaaactggggaaaaaggagcgggccgccgctcttttgaccctgtgtgccatggtgctcatcaacctgtaacggcggcttcttgctgaaagaaaaaaaatccggtatactatatcatagaaggctgaaacactgcccccttttcccatgcggaaaagggggcatcattgaaaaacatcaaaagaaagattggtaaaaaagagatggaattcaaagaatttgacctggcgccggaaatcctccaggccatagaggaaaaaggctacacggcccccactcccatccagcagcaggccattcccgctctgctttccggccaggatcttctgggctgtgcccagacgggcaccggcaaaaccgccgcttttgccctgcccattctgcaaaagctctttgccagctgggattataagcatcagatccgggcgctgatccttacccctacccgggagctggctttacaaatttacgaaaacttcctggattatggcaagcatctgcctctccggtgctgcgtcatcttcggcggcgtgtcccagaatccccagacccagcagctgaaagaagggatggatgtgctcattgccaccccgggacggctgctggacctgatgggccagggcttcatttccctgaaacacacggaatactatgtgctggatgaggccgaccggatgctggacatgggctttttgcccgatgtacgccgcatcaccggcaagcttccccagaaccggcaaaccatgctgttttccgccaccatgcctccggaaatcgcccggctggctcagaaattgctccacagccctgtggagatcaatgtctccccggtgtcccgtccggtggagctgatcgcccagcgggtctacctggtggacaagggcaacaaatccaaactgctggcccatctgatccacacgctgcccattccccaggctctggtgtttgtgcgcaccaagcacggggccgaccgggtggtgcgccagctgaaccgggagggcatcaccgcccaggccatccacggggacaaaacccagaacaaccgtcagcgtgcgctgcaaaatttcaaagactggaaaatccaggttctggtagccaccgacattgccgcccggggcattgacattgaggaaatgccctatgtgatcaactacgatatgccctcggaaccggagacctatgtgcaccgcatcgggcgcaccggccgggccggcgcggcgggcactgccatctccttctgcgacgaagaggaaaaggccattttgcgggatgtggaaatggtcatcgacaaattgctggacatcgattacgacaacccctatcccctggggagctatgtgcccgaccccaatcagccgaaaaacccgccccggccccggaaaaagggcagcggcgtcactcccaaagcccctcgccggggcaaaaaggaggaaaagcccgccccagctacggagcaggcttctgccacgaccgagaaaaagccggaaggggagcagtcccaggcgcccaagcgccgccgcagaagaagacggagaaagccctcttctgcctcctccacccccaaccaggaatcgtaacatggggatcatcaccctcccacgcctgaccctgcgtccctttcgccgcaccgatgggaaggagctttggcagctgctgacccaggaggcggtggcccgggagtggggaagggcggaaagcctggaggaatgcattcatctcagcctgttgtgggaaaagtcccaagacatctgggcctgctgtctgggagaccaggaaggccctctgatgggtaaactgcgcctttctccccttcccgagcggggcaaaggggtgcgggagctgagctatgcctttcatcccgcccattggggccatggttatgccctggaaagctgccaggggctgctccagtatgggtttacagagcagcagatgaggaaggccgtggctttctgcggcttttccaatgaacccagcatccggcttctggaaaagctgggtatgaagcggcaaaaagagccccgcccggggctttttcttcgggaaggacaatggcaggcaggctgggaatacaccctctcccgccgccaatttgaaaggagatggaaaccatgaaaaccgcccttatcaccggcggcagccggggcattggccgggcctgcgtgctggcctttgcccaggccggctggcaggtggcctggtgctaccggaaagaaaaagagcaatccctggctctggagcaggaactgaaaaaccggggactttccggtctgggttttgccgccgatgtggccgactccgggcaggtggaagctctgttttctcaaatagaacaggccttggggccggtggatgccctggtgtgcaatgctggggtggcctatcagggtcttttgagcgatatgaccgatgaggactggcgacgggtgatgggggttgacctggacggggtgttttactgctgccgccgggccattccctccatggtcggccgtcaaaagggcagcatcctcaccatctcctccatgtggggtctgacagggggcagctgcgaggcagcctattcggctgccaaggcgggagtgatcggtctgacaaaggctctggccaaagaactgggcccctccggggtgcgggtcaactgcattgccccaggggtgatccatacccagatgaacggcaacctgacccaggaggaccggcagatcctggctgacgaaacgcccctctgccgcctgggaacgccggaggaagtggcgggggccgccctgtttctttcccaggaggatgccagtttcatcaccggccaggtgctggcggtggacggcggcatcgccatataatgaaacactttcaaaaaggctctccccaaaagggagggccttttttgaagaaagaagcaggtgcagcgccactttggtgcattgggccaaagcccctttttcaaccttttccgcaaagaaaagccggtataatgggagcaaaaccggaaaaagcggagggatggacatggaaaaacgaaaacgggcggaaagagcccttcccctgggggacaagctgcgccggtggggtgcagacccccggctgcgatgggcagtgtgccaagggattttagccgggggagggtatgttttcacatcggcggccctgttcggccaggcccatccctttgccctggccttcggcgctgctttctgcggcggaaaatgggggttcggcgcagtattgggggcctttgcaggatatgctgttaccttgggcagcaacggtctccactactgcgcctcccttttggtgtgtgccgcctgtgccctggtcttttccagcaccgggtccgacggcctgcgccctctgatgcctctgtgcaccgcctttacccttttatgcaccggcagcgccctgcttatgactcaattcacccctgagggcctggcccttcttctgggggaggccggggtgtgcggcgccatggtctacttatacagccttgcggcccggccttcctcttctcccggaaagggacaagccctgctgctggccgggcagggagcactgctgctttcctttcttttggctctggagccctggcgggtgtttcacatcctgtccccagcccgggccatcggcctgctggctgtgatgacagcggcctactgtgcccccggggccggaggcgccggggcgggagtggcctttggtgcggccttcgatctttccggcggcatggagctgcactttaccggcctgtacggagtggccgggctgattggcggactgtgccggaaacgaggccggctgggctttggcgtggcctttgtgctggcccattgtgccgccactctgtggaccatccgctccccccaggcggcctccgggctgtatgaatgtttctgtgcctcggtgtttttcctggtacttcccgaagggctgctggcccgggtgaaaagcgccttgggcgacggcgcagcccaggcctttgctccagcggggccggggcagatgggaaaatacgcccagcagcggctgcgccaggcctcccgggccttggaagccctggccctcagcctcaccgatgtaccggtgaaaaaccaggaggacatcacccaggtgttccgccgcagcgccgacaaggtctgccggttctgtccagtgcgggaagcctgctgggacaaggaatatgtgtccaccatgggggtgatgaacgatgtgacccaggccttgcgaaaaaagggcaaactccaggcagaagactttcccgcctattttgccgcccggtgtttggaaatccaccggtttgcccaggcagtgagcctggaatacgccgccctgctgcgccgccggggagagctggcccgccagggagaaaaccgcaaactgctgcggcggcagtacgaaggggtgggcgggctgctgcgggacatgggcaccactctgctggaggggccggaatactatcccgctttggaaaaccgggccaaaagcgtggcagaagcctattttcgccggcctgcggtggctctttacacaaaccagggacggatgcgctgtgaagtgcgggtatcttccccggaagatcttcccgaggataatgacgcttttgtccgcagcctctccctggccctgggccgggatttctgcccaccccagccagtggaggaggacaaaggcactctggtgcggtgtgtggagcgggagcaatttgccgtttccgtggtggcagcccagcggaaaaaagaaggggagacggtaaacggcgatcaatacatggatcttactaccgacgacggccgccacctgaccatgctggccgacggcatgggttcgggagaaggagccgcccaggtgagcctggaaaccctgtctctcctttcccggtttgcccaggcaggatgctctctgtgggaaagcgcccgggcggtgacccctgtgctttcggcccgactggaagagaagggctttgtcaccctggatctgctggaaatcgatctgtattccggccggggcgccgtgaccaaatacggcgccgcccccacctggctcctctccggcggccgggcccggaagttttcttcccgggctttgcccgccggtctggaagggggagaaagtccgccggaaccggaatatttccagctgaaagacacctgcaccctggtcatgctcagcgatggtgcagccgagcccatcgacggccaatggcttttggatgcctatcgccgcctgccctcgccccaggccctggcccaggaggccatccaggccgccgaacagggagagcgccctctggatgaccgaacagtgctggtgatttccgtccagcgcatccccaaagagccggtataaaggccaaaaaaccgggccacactaagggcagacgccatggcgttaaggaggaatgacagatggtgaaaggtgcggccaaacgggcggtgatcgtccgccctgccgatacacagcattttgaacaggcgatcttcattgtggccgaaaacgaaaagggcggcatgacccaggggcagcttttgcaggaggcccaaaggctgaccggctgctatgcccccgcccagaaactccagcggatcaaaacgcctctggcttttgccggcggcatggccgcagccggtggtctgtggctcatcagtgctctgtttttttgaaaaatgggaacaatggatggctttgaccgtctgggtcccggagggaacatttccctccgggattttttattgttttggggaaaatctgtgaattccatttgcacttttccggaagattgaatacaatagaaagagaaaaaccatcgaaaaaaggagaaaagatgaaacggaaaaattttctgcgcctgatggcgctgcttttatccctggtgttttttgccgggtgtgtggctcagaaggttccccaggaggatgaggcttcatcccaggaacaggaggccaaaccggaagaagaacaaacccctcaggagccggaaccggaacctgtggaagaagcctccgccacgctggtggccgtgggggacaacctgctccacaacaccatttcctgggatgcccagcaaagcgacggcagctatgatttcaccccggtgtatcagccggtgaaggatctgatccaaagcgccgacatcgcttttctcaaccaggaggtgcccctcaacggcaccgttggccgttatcccagcctggacgcgccccagcaggccgccgacgccattgtggactgcggctttgacatcgtcaacgaagcttccaaccactctctggacaaggggatcgacgggctgatgaacaccctcagtgcctggaaagcccggaatatgccggtgatcggcgctttctccacgccggaagaggcaacccagccctgcattctggagcgaaacggcatcacctttggctttttgggctatacatacggcaccaacggcatccccattccggaggggaaggaatacgccatttccctgattgacaaaaacaagatcgcccaggatatggccgctctgcgtcctcagtgcgactatctggtgatctccctgcactggggcaccgaatacctgctggagcccactcaggaacagcaggagttggcccagttcgtagccgaccagggggccgacctgatcctggggcaccatccccatgtgctggaaagcgcccagtggctcacccgggccgatgggggacagaccttctgcatctactctctgggcaatttcgtctcctcccagaacaccaaggagaccatgctggggggtatgctcagcctcaccgttcaccgccgcacagacggcacggtggaaaccctggctccgggagttctgcccatcatcacccattttgaaaacggaggcaaaaactaccgggtctatcctctggaggattacacccaggatctgatctcccttcacgcggtgaaaaaatacgacagtcccatcactttggattattataacggcctcgcccagcaggtactgggagaatttttgcaggcaaaggagagtttcgcgtgccatccataggaaatatctcttttgaaacccctctgttgctgggccccatggccggggtcaccgactcggccttccgcaccatctgccgccaggagggcgcggcgggaagctataccgagatggtcagcgccaaggccttgctttatcaggacaaaaaaagccgtcagctgctgttcatctccccggaggaacacccctgcggcgtgcagatcttcggctctgagccggaagtctgcgcccaggcggcccagctggccctggagatttccggggcggattttgtggacatcaacatgggctgccccatgcccaaaatcaccggcaacggagagggcagcgccctgatgcggaacattccccaggcggaaaaactgatccgggccgtgcgccaggcggtgcaagtgccgctgacggtgaaattccgcaagggctatgaagcagatgaggacacctgtgtggaattcggccgcatggcccaggcctgcggcgtggatgccgtgtgcgtccacggccgcacccgccagcagatgtatgcgggaaaaagcgatctggatgccgttttgcgggtgaaagaagctctgagcatcccggtgatcgccagcggggatatgtttaccccggaagatgcccaacgggctttgcaggggggcgccgatttcgtcatggtagcccggggcgctcagggagaccctcaggtcttccgccggatgaaacgggctctggaggggcttccccctgaaaaagagcccactctttcggagaagatcgccctgatggacaagcacatcgccctgatgtgccagcggaaaggagaaagacgggccatgcccgaggcccgcaagcatattttatggtatctcaagggcgtgcggggagccaagccctttaaactggaattcagccatgtcaacacgctggccgagtttcgggctctgtgccagaaaatggagcagcagctgggataagcggaacgcagggggaaggaggggcgcctgtgaatgagcatatggtcatcaacagggccaaacaaggagatcagcgggcttttgagaccctggtcaccgaatacgaacaaaaggtatatagcctggcctatcactatgtaggcagcgaacaggacgccatggacatctgtcaggaagtattcctgcgagtctaccgcttcctgccccagttcagcggggaaagccggttttccacctggctctaccgggtgacctccaacgcctgcaaggatttcctgcggaaaaagggcagccggatggaagtctccttctccctggagggagaagaggaggactacaccctggaagttcccgatctgcgctatcacccggaaaatgtgctggagcaaaaggagatgcgccgccagatcgaagaaagcctgcaccagctttcccccgaccaccgggaaatcctggtgatgcgggatgtgctggggctgagctatgaggagattgcaaacagtctggacctggaagagggcacggtgaagtcccgcatttcccgggccagggaaaaactgcggatcaaactcaccgaaacggggaactttttcggaaagaaaaagtctaaagggaagaaaggagggaaaccatgacgggctgtgaaaaatacatccaacaaatgaatcggtatctggacggggacttgcccgcttcccagatctccgatcttctggagcacctggaatcctgcccctcctgccgcaaccgttttgacgctttgaagatcatcgcttttgaaatgcggcatatgcagaagcagccgccggcctccctccatgagcatatcatgggtgctgtgcgccgtacccctcaaaagcgaagccaatcctatctgcgggccttcggcatactggcggcctgcgccgcactgctggtgctcacattgcagcagggctttttccgcaccatgggggattacctctttccccaggatggagtctattccggcggcaccatggcggacaccaccggccaggcggcaaagggcagcacccaggattccctggatcaggaaaacaatctggagaacgaaaccgacccgcaagctccggccgatgcttccgatcagacagaggacactgaaggtgcctccgaatacgacaccgcggccaaatccaatgaaaccggagcttccaccccacagatggagggacgcagccagacggcaccagccgatggcgaaagttcctccaattcccaggcaggagaagcccctgcttccctggagccttcggaacattcccaaagcgggtccaatacaccggaaaccggcagcgtggaacccaaccaggacaaagtgcagccgaacacggctgaccttgacagttcttccgacgcttccggaaaatcggcatccaatttcatggcgccttttctggacaccgatgaagtctttgccttctattgcgtagccaccggccagggggaaatccccaatgcctttgaggaagacgagatcgtccggtatccggaaaaaaactgcgtctatatctatgtatccacccagaactttacccagaccggttgcgaaaacctgctgcggctgggcggattcaccattcaaaatcccaccaatctgccaaagaccgacgccggtatgccctatggcctggtggtcatctaccaataccagcagcggtaatacttcattttgcaaagtaaaaagccgtggaaagagtttgaaccgccccagattatgcggacagcacaaaaaagcctctatgtagggaaaa

SEQ ID NO: 3633 - DNA, 32759 bp, Unknown
  16S sequences of unknown bacteria
tcagcggacttgaactttaccttgacagaactctccctgtaggcggatacgctctccagaacgtaaaggctgacaacatcctttgggagaactcaacagacaagaagggtgaagatgacaaagattcttatgaatacgttcctgaagcaaaccaggcttcaaacggtctcttcaagtacaaagaagtaacatgcaacgacaagtatgttgaagtagtaacaagcggtagagataacgacgattctacaacaaacagaaagatcgttatcacaatcggcgctacaacaatggctgtaggtacacagacaatcacacttgacacacctgcatacatcaatgctgaaaactatacagaacttcctttaagagctgtatcagaagcattcggcgcaacagtaggttgggatgatccttcaaatacagtaacaatcatgatgggacagagaattgtttctatgacaatcggttcaaagacaatgtacatcaacggtacacctgttcagatgaacacagctcccgaaatcacaaacgaaagaacattcgtacctgtaagagaccttgctaacgctcttggtatcagcaagatcgactggaacgaagcttctcagacagttacattaaactaagagaatagttcgatttttcagacctccgagtaatcggaggtctttttttgtagtaaattgtattttgtttatacacttgttttaatttaatcatctaatttaatgttgtctgcaaaacgggaattaattataaaaaaactgtggacaaaaaaatacccctgcttatttagcaagggcatttccgctttataaccttttgtaattgtcatatattaaatagctgtgtccgctgtaatctttcagttcaaaggaaactgttttactttcgccgtcccattttatatcgtctattccgaatatctgcgccatatccctaagaggtacaaatgctctgccgtcgctgatttcaggagcggcggaaagaggaactacatacccgttcacatacatttttttgtttccgacagccatatgtattttatcttctccgacttctatatctattgatttttcggcgccgttccaatatatatcggctttaaatatatccgatattgctctgagcggtaactttgtaacgtcattagttatatatggcggaacgtcaagtttatatgtttcatcaccgatatatattacttgagagcctatcggtataactactttggtaggctgaacctgttcggcagtatttttctcttcgtcagatttatcgtctctctgaactatataatttatatccctgttatcgcttagggaaagcgttacatctccgtattcttttgccgttgccgtaaacattatctgcgcataaccgtctatcattttttcgggcaacgtaatctttacataatcctcatcggacggaacaataccaaagccctccagagagccgctttccaatccgtcggctatatcgtccctttccaaatccgtttttgaatcggtgatatacacgggaagataatttcctgaactgtcagttacaaattttccgttttccaaagtaagtttgattgtcgcagtattgttgataagtccgtaacccgttgactccaactccacataagtatcaaacggagtatttttgccgtatacacgtctatcgccgtaaatatcaacctgaacggcggcaaaggcgttaatcggaagcattgcggcaaccaaagccgttgaagcggcagtcattaatttgtgtttaaatttcataatatcacctcatactgagtatatcagattatgagggaaaatggaataatcagttaagagttattgtcgatgtatcttccgaccaatctatattttttatgcccaaagcatttgccaagtctctgacaggtataaaagttctggagtttttgatttcgggcgcagtattcatcggaaccggcgtaccgtttatatacatcgtcttttctccgattttcattgatacaattcgagaaccgctcaatatcgataccgacttacttgcctcgtcccagtttaccattgcaccgagagcctcggaaattgcccttgtagggagcatggcgtaattatccttgtttatataagccggctcatcaagaatgaccgtatcttctcctgctgagattttgtcttttccgatacctatgtctatctttctgttgagcgttgaatcgtccttatccctcggagacgttacaacctgtacatattcggagtccacaaccacaggctcatatttgaaaacgccgtttttgtcatactcgtctttatcggtagatgtattctcccacaaaccgctgtccgaatatacatttttaagggcatagctgccgtttggcatagttctgtcgaggtataacttaattccgctgactacaatttcggaagcctctgtcgattcgtcctcaaccgtaataactaaataagagcaatcgtccgaagctgattttttaacatcggaatagttcggtttatccttgaacatacccaataaaccgtctttgtccgtcagttctgccgaaacttcgatgtcgcctttttccacatagcatgttacatcgccgtttgtatctattttttcgatttggagtaccaacatacgtccttcctcaaacagacctgcttccgcctcttttattactatatcgtcggcttcggtatccttattgtcaatttcgacttcattggcataagcgcaaaacggaaccgcattggctgaaacggcgagcaaagccgcagccataataccatatctatatttcataacatcacctcgtaatgagtatatcagattttgacgaataattaaataaacatatattggagaaacgaaaaagacctccgattactcggaggtctgaaaaatcgaactattctcttagtttaatgtaactgtctgagaagcttcgttccagtcgatcttgctgataccaagagcgttagcaaggtctcttacaggtacgaatgttctttcgtttgtgatttcgggagctgtgttcatctgaacaggtgtaccgttgatgtacattgtctttgaaccgattgtcatagaaacaattctctgtcccatcatgattgttactgtatttgaaggatcatcccaacctactgttgcgccgaatgcttctgatacagctcttaaaggaagttctgtatagttttcagcattgatgtatgcaggtgtgtcgagtgtgattgtctctgtacctacagccattgttgttgcgccaattgtgataacgatctttctgtttgttgtagaatcatcctgatctctaccgcttgttactacttcaacgtacttgtcgttgcatgttactgctttgtacttgaagagaccgtttccttttacattatctttattatctttattatctttattatatttttcaggaacatagtcataagctaatttgtcatctttatcgtcatcttctttaactgttgtagagttttcccaaaggatgtttgtcttatctttatcttcaggcataacgttcttaagagcgtatccgcctacagggagagttctgtcaaggtaaagttcaagtccgctgattgtgattgttgatgcttctgttgattcatctttaacttcaacttcaagttgtttgcttgttttaccgtcgttgatttcaacatcaacgtcgatgtcgccgcttgttacttcgtatgaaccagcatcttcaaagtccatcttttcaacttcaaggtaaatcttgtcgccttcttcaaggagaccttcttcagcctctgtgataacgatttcgtttacaggaacatatctgtagtcgataagcacttcgcttgtcttagcttctactgtgtaaggagccttaactgtagcaaccttaagttctacatcgtcaaattctccaccaagtgttactttaacgtctccgctgaatgtaggagctgcgttaaggaggaacttgattgtcatatctgtttcatcagattcttctttttcaccgtagttccagatttcaacaacgttttcatcaatctgatatgcgaaatcttcctgcttgattccatcataatcaatatcaactacttcgattccttcagggaatgtgaatgtagcttttcttgatgtgttaaggatatcgcctgtgttttcttcgatagctacttcaagagtatttgtatcgtctgctgaatccttagcgtagtttttaccagcccagattgtaggaacttcttcatcttcaactgtgtatgtaacagcttcttctaccattcttgcagcttcaagtttaactgagtcaaagctcttgcttgatactgtgattgtagctttgtcgcctgcgttacatttctttgttgttttaatcttaagacctgaaattgtaagctttgttaactgatctttttcaaggttgttgattgtgaacttaattgtatctttgtcagtttcgttttcatcgatatcaactgtagctttgctgttgaggaatgtgaaagcatcttcagtgattgattcttcaacatactcaaagtttccgctgagtttaagtgtaattgtcttgcttccgtcgatagcatcgtttacaagaccgttgattgtgatgtctttgattgtatctgtatcttttgttgcgtcttcaacgaatgttctaacgccttcgatttcgatagcaacttcatctttgtaagctgtagcaattacttctgaagctttcttgaactgtgtaacgtttgatgtgaagttagcaactacatcgcctgtttctaaagcataagcatcaataggaagtacgcaagctttttctccgtcctgttcgccgttgaaaacagctgcatctaatgtaatgtaagctgttgtgtcgtttttaacatcaatagcccatacacccttttccggtttgaaatctttttccatgtcataagtttcatcatcactcttagcaaacttaccgtttgtaagtttgagaataacctcaaatacggctctgttgccatattttcccgtttcaaccttaccatctacattaacctggtcatcatcttttgaaagttcaactcttgatgtgaaaacatggtcgtcgccaactgctgtagagatttcgtcaacagctgttaactttgtggatgcgaatgctgtcatgggaaccattgcaacagtcatgatcgcagccaataataaagctaattttttcttcattttgttgtcctccttttaaatttttggggttttccccgtttacgttttacataagggattttcccctttacaaaatgaattgtaacaattgccgaatgttaagtcaatagaaatgcataatctatatatattgtataatacgtaccgtttattccttgatattaaagggtttaatgaaaccaaaaggaaatattacaaagaaaattacacaacttttacacagttttacacaactttttttgagtcgttttttggcgttttttaggcttttgtgcaatttgacagtgtatgacgtttactaatagttataaaagcggtaattgaaaatatttagagtgaattgtggatttatttcttccgttaatatataattaagtagacataatggagagatatggattatttcgaaattatgttttaaatttttgtaaatttgttgggtataatacttaacgggagggctgcttattaagagcaaaagagaaaataacagtattgttattgtgtttatcggtcttcttgtatttatttttataaatgcgcgcctgctgaaatccgagactattgaaatcaaaaacgaaactcctgtacatagtcaaaatgaaaatgtcggagaacagtatacagacggtaaaattaatttgaattcagctgacgaaaacgaactggattcccttatgtatatcggtcgggacgaagcggagctgattatagaatacagaaataaaaacggaaattttgaaagtcttgaagatataaagtatgtagaaggtctatcttctataatgcgtaaagttataattgacaattgttatgtagaataacggttttgggagggttttgaattggcatataaaatactcgttgtagatgatgaaaaattgattgtaaaaggtataaagttttctctggaacaggacggaatggaaatagaagttgcatacgacggagaagaagctttaaatcttataagaaaaaataaatatgatttagccgtactggacgttatgcttccgaaaatggacggactgcaagtgtgccgtgaagtaagggagttttcgcagatgccgataattatggttacggcaaagggcgaggacatggacaaaattatgggtctggaatacggcgcagacgattatatgacaaagcctttcaatattttggaattaaaggcgagaataaaggctgtattgagaagaagcgcggcttcaagggaagagaaagctcctgctaaaaacgaacttcaaataagagatttgcttgtagacctggacagcagaagagtctttgttgacggaaaagaagcttacctgacggcaaaggagtttgatttactggagttattgatgaaaactcccggaaaagtatacagcagggaaaaacttttggatacggtatggggatttgattatcccggggacgtccgtaccgtagacgtacatgtgagaagattgagagaaaaaatagagaaaaaaccgagcgcgcctgaatatatctttacaaaatggggagtgggctattactttggctaaaaagaatataaaactgaaatggacccttttggtaacatatttgttagtgggtatatgtccgcttttgattatggcgcagctgacaatgaaaagcgtaaacgaatattttgttgaggaaagaaaaaaagaactgcttctccaagcaaacgtaatatcgggccatataggcatttccgactatttatatgacgacagcaaggctatagtttttgactacgatataaatcaaacaagcaaacagagcggatacagaattattgtaatagacaaaacgggaactgttataaacgattccaataaaacggaagagggaaaagtttattttttgccggaggttatagacgcgcttaataacaaagacgtcgcaaaggtatacggtaacgatacaatccatgcggcggtttccatagtagacgatcgctcaaactgcgtaggcgttgtgctagtcagcggttccatagccgatatagcgttaaatgtagaagctataggaaataaaatattcagtatgatattaatgctcgcagttgttgtaatagttattgtaatgttcatggcatggtggtttacaaatcctctcaacagcgccatagcggttataaagaaaatggcagacggtcattttgaccagagaatagaaataaacgacttcctgcatacggagcttgcggaattggcagagtccagcaattatatggcggaaaagctggacatgatagagacaagccgaagagaatttgtatcaaatgtatcgcatgagttgaaaacgcccctcagttccataaaggttttgagtgattccatacttatccaagacccggaaaatgtacctaaagaaatgtatgtggagtttttaatggatataaactccgaggttgacagaatgacggatattataaacgatttgctcacgcttgtccgtatgaacagggaagaggttcatttgaacccgatggagataaatttgacggatatgatttccgacattgtcagaagacttgaaccgattgcgaaatctaaaaatattaatctcaattataataaattaaaagctgttaaagcggaaatagaagagacaaaattttcgcttgcggtgtcaaatcttatcgaaaacgcaatcaagtacaataacgacggcggaaatgtagaagttacggtagacgccgacaatcaaaacgcttttgttacgatagctgacgacggcgtaggcatagctgaggaagaactcggaaagatattcgacagattttacagggtggacaaaaacagggatagagaaagcggaggaacaggtctgggactttcaattgcccgttcggctgtacttatgcataacggaacgataaaagtatccagtaaggaaaacgagggaacaacctttgttataataattccgcttaaacaagagtgaggttgccatgattaaaaaaatgatttatatactggctatagcggcattgaccctatgcggatgtaaaacagacggagcggagataaatccgtctgccgaaagcggagcgttatgcgaagtatattttgttgataatgcaggacagacgataaaatcggaaatagacggactggaagcggatacgcaggaacagcaggtatacgaggcttttataaaaatgaaggatacggttaaaaatgaagagagaaggcctgccgttccggaaaatgtggatataaatacgttgagcattgacagcggagttttggaggttgatttcagcggcgaatataacggcatgtctccgggagataagctcattttcagaacagccgtagtttatacttttacatcattggactttgtagactatgtaaaaatgacagttgacggaaacagtctgaaaatgacaaacggacaggctctgggaaaaataggcagagacgatgtggtgctggacggcaatatatcggctgagccgacaaactatgaaatattgactttgtatttcaaagacagtgaagaaaacaagctggatacggaaataagagaagttgaggtcaatcccaatcagcctatagagctgtatataatagaacagcttataagcggaccggaaagtaaaaatatgaaaaatgttataccgaccgatacaaaaataagggaaataagtacggcggacggtatttgctatgtggatctcagcgcggaatttttggtaaaacagcttgaaagcgaaacagacgctaaagcggcggtatacagtatagtaaattcgcttgcggaaatagaaacagtaaataaggtacagtttttgattgacggagaaaaaattgataattacagaggcgttatggatttaagtaagcctgtggagcctaactttgatataacgtttgagtaagcggtgatttgaaatgagaagaccgtttgtctggtttgtgttaggtcttgcagtgggaattataggaggaatgtacttaacgggactgaaagcggccgcagtttttatattttgcgtagcggcagcattaggcttttcgtataagaataggattttcgaatatatgtatgttcctctgcttgcggtaataggatttattttgtgccgttccgctattggaacagctgatatttctgcggaaaaaattgtcggcagggaaagcgttgttgtcggaacggtaagaaactactatataacagaaagcggaaaaacagccgttacagttaaaacgaaaagtattaccgacggaaacataacctgtgaaaagagtcagaaaatatttttgactgccgaggatgcggaagttcatgcaggcgacgttatagaggcgcatggtaagctttattgttttgaagagccgactaatccatatcagaccgattataggatatatatgaaatcaaaagggtatgattattcgttttggtgcgatgacataaggaagatttcaacggataacggtattatatataaaatagaaaaagccagagagaacgttaatcggttttttgatgaaaatatgggagaaagtgaagcggcaatagctaaagcgctgactacgggatataaatacgatattcccgacaatacggagaaaacattcaggaatttgggcataagccatgtcttggcagtgtcgggactgcatgtgtcgctcgtatcgggaattttgttcgcacttctcagagttgtttttaaaatgagaaaaagaacggcggctgttccgacggcaatatttttgacagcatactttatttttacaggctgctcaccgtctgcggcaagggcggttattatgacattgactgcctttgcggcgcttgtgttttataaaaattccgatagatacaatacgattgctttcagcgcgtttatactgctgtgcataaatccgctttatctgtggaatgtttcgtttcagttgtcgtttttggggattactgcggtagttttggcgttagatattataaaaaatatcggtagaacttcaaaaacggctaaagcgtttattttttcggttattatatggataataacgactccgcttacaatgtactatttcggtggagtttccctgattgcgcctattgcaaacattgttattgttccgtatataagtattgttacgggagcggcagttgtttcgtcagctgtttccgcaacgcccataggagcggcggcagtgaggtttttggactgccttttggaattttacaacttagctgcggataaaataccgtcggaagtattgtatatgagtacggcaaaaccatcgctttatgctgttattataatgtatattcttatttttgcatgtcttatattcggcacaaaaaaatatgccaatagatttatgataggcgcattttcagcatttatggttttacagtgtgtggtaaacaagacagctcctgcggaaatagttttctttgacgcaggacagggagacgcttcgattatacatattcccgaaaaatttacggcggtagttgacggaggacccagcggagaggctgagaatactgttattccgtatctgaatgccaagggagaaaaggctgacgtactgtttattacgcacatggattcagaccattccggtggcgcgcttgaactgattgaaaatgatatgaccgaacttgtggttgtttccgatacaaaacacaacgaaattttagacaaggtcattgatgaagccgataaaaataatattgaagtatattacgcttccacaggagacaaatttgttacagacatatgtaccgtagagtgtttatatcctttttacggagatatgtctgcggaagaaaacgaaagttcgcttgtgcttaaggcggatatagacggaattaaaatattgtttacaggcgacatagagtatgaagatgagataaggcttatggacagcgacatcgagtgcgatataattaaaatagctcatcacggttcaaatacatcgtcatcggcagattttatagaaaagacgaatgccgatattgccgtcatcgagtcgggggaaaataatatatacgggtttccgcataaacaagttcttgatactttagaggagtatggcgttgaaacatatattacgggagaaaacggagcggtaaaagttgtgttgaaaaaagacggttatgacgttaagacatataaaggtaggtaaaagaatatgaagaagcgtgtaatacgaagtctgacgatgatttttttactttttggaatgacagcatgttcagcttcgacgccgacggatgaagaaaataatacagaaatttcggaagcctatgataataaagtaaaaaaatacatggaaagagcagagctgaccgacgttgaaaaagatatacttaggcttgtcggtataaaaggcgaaacgaaaatttataacttttacgcagatgaaaatcttgacagtatagatgttaatttttatgtgtttgaaaacgggcaatggagtattcaaagtgaaagccgcaatataaaagttaccgatgcggaaggaagaatttgtttggcgaaaacaaatttcgataatgtatttacggtaactgtccagacggaaagcgatggagaaagcagcgctgtttatgttcctaaatatgataaaacggatgaaaaatcaatatatatttcaaatacacctcatgccgacagcataaattacggggatgaaaccgtattgcagattgttgccataggtgataatgatagagaacttccgataatagaacgcaataatttttatgaaaccgaaccgcttggtgaatatgatgatacagttgccgttacagtcaggtttaatgaaaagacaaaataggtgtatatgttaaataaatatcgttatataggttttagattaaatagttaaaagttttaacacagacagaaatatatagctgtcagtagactgataaaggaattatattatggataaaatcgatttaaaaaaaatagaaaaatgttatttgctttatggggaagattcatttacaagaaaagcttgggaggataaaatcaaaaaaaaagttgttgatgaagcctccgagatgatgaatatgacggtttttaacgatataaagacgacggctggacaaattatagaggctgccgaaacatttccgtttatgagtgaaaaaaggattataattgtgagagactgcggctttttttctgagggtaaaaaagccgaaagtgatttactggcagaatatatagaaaaaatacccgatacggcatgcattgttttttccgaagaaaaagccgacaaaaggatgaagctttataaggccgccgaaaagcacggcatagtcaaaacatataacggcttaaaagatgtagatttggcaaatatgattgaaaagaagtttgctaaaagcggaataaaagcaacaaaagccgtatgtgtatatatggtcagaaactgtggggaaaatgccgaaactcttaaaaatgagactgataaaataatttcctatcttggggaaagaaatgaagtcaaaacggaggacatcgacaaattatgttcaaaaagttccgagacaaaggtatttgaccttgttgacgccatgatagcgggaaagacggagaaggcattggaaatatacagaacgctgttatcgctgaacgagtctccgtatatggttttatcgctcataacaaggcagttcagaattatattaaagtgtaaaagcctgtcggaaagcggattatcgggaagcgatatggcgaaaaagataggagttgcgccctttgtggcaaacggagctgtcagacaaagcaggaatttcagctacgaaatgcttaaagcgtctctgaataaatgtctggaaacagactatttaataaagaccggcaaaaccgaacctgtttcaggagtagagatgctgattgcaaacggcgctttataataaagaaagttttatacggctcgggcatatattatattaaataacagccggaggcatgtatatggacagaatgaaaagaaaatttatcggtgcggtgctgacggctttcgggctgggaatacttattgcggcgtttataccgatatggggtactatagcggcgcttgtaattgcggcggtaggcatatatcttatttgcgacagcggatgctgagaaagaaaaaaagctcattgtttaaaacaatgagcttatgtgttcatatatgaaaggtagcgtgcttttagatagcgcgtgttactttaccggaacggaggcatcttgtgcagatgtagattgacttgatagttccgttatcgttaattttaaccttttttacattgggtttccatgttctgttggcacgtcttgatacctggctacgattgatgctgattctgtggccagtacgcatacccttttcacaaatttcacactttgccatttattacacctcctagttgcttgctgcgtgatataacacaatgtatattatcagaaatgaagtgatttggcaagaagttttcatagttttggttaaaaaattttaatgacggagaagaataggcgtttataatacaaaaaagattaaaataatgttattttttaataaagaaggcttaaaattaaaaaatgtttttattttccctgtaagagtgttataatataatggattatatgaatcaggaggtaagaattatgtcagcaaaacttgaaaatcaatacggaacaatttccattgaaaacgaagttatagccagaattgcaggtcttactgccgtagactgctacggaattgtcggtatggcagcaaagaacatgaaagacggactcgttcagcttcttaaacgtgaaagtcttacaaagggcataagaataaatgtaaacgaagaacaaataagtatagatttgcacatcattgttgaatatggcacaaacataacagctatcgcggaaaatattataagtacggttaaatataaggtagagaccgtatgcggtattgcggttgaacaggtaaatgtgtttgtcgagggcgtgcgagtcgacgcctgatataaggaggtctatcatcagtgagtgtaacaagtattaacggcttattgcttaaaagaatgattatttcgggggccaacagtcttaattccaaaaaggatacggttgactctcttaatgtgtttcctgttcctgacggggatacgggaacaaatatgtctcttacggtgcttgcagctgcaagggaagttgacaaaagccagtctcttaacgtcggagaagttgccaaattggcgtcaaacggctctttaagaggcgcaagaggaaactccggcgttataacgtctcagcttttcagaggctttgcaaaagaactggagggcatagaagaggctgatacggttactctggcaaaggcttccgcaaaggctgtggaaacggcatataaagcggttatgaagcctaaagagggaacaattcttaccgttgcaagggtaatgagcgaaagcgcgcttaaatactgtcataaaattacagatgtagcggaatttatggaagcggtaataaaagatggacatgctattcttcttcagacaaaggaaatgctccctgtacttaaacaggctgatgttgttgacgccggaggtatgggacttctttatgttcttgagggtgcattaaagattgcatttgacaataccgatgttaaaattgaggaaagtgcgtcaggccaggctaaaaaagaatatgcagcccttgcgtctgttgataatgagagtataactttcggatactgtacggaattttttattaatgtgcaaaatgctcccgagtctacagtcggcggacttaaaaactatctcagttcaataggagacagccttgtagtagttgccgatgatgagataataaaagtccatgtgcatacggaccatcccggtatggctatagaaaaggctctttcaatcggaagtctttcgggccttaaaatagataatatgcgtgaacagcatacaaataaaattgattttgagggcgagggaaaagcagctgttaaagctgaacccgaagaaaagaaagaacacaaggaaacgggatttatttccgtttgttcaggaagcggcatagcggatatatttaaaagcctcggcgttgatgtaattatagaaggcggacagactatgaatccaagtacagaggacatacttaacgccataaataatatagacgccgataatatagtaattatgcccaataataaaaacataatacttgcggcggaacaggcaagaaatttaacggaggacaaaaaggtttttgtaatacctacaaaatccatgccggaagctatttccgcaatgctttgctataatgccgaagaggacatagacagtgttgttgaagaaatgaaagacgccatagccaatgtaaataccgcgtccgttacttatgccgtaagagatacaaaactcggagataaggaaattacaaagggcgatatactgggaatgttaaacgacaacatagaaatagtcggaaaagatattcagcagtctacaaaagatcttataaacgaggctgttaatgacgacagcgagataatatgtatttattacggaagcgacgcaacggaggaaatggcaaacgagatagcggaatatgccgaagagaatttccctgactgtgatattgaggtacattcgggaaatcagcagctttattattatataatttccgttgaataatttattgcaaataatttaaagggcgtctttaagacgtccttttttatggggtgcggttatgaatttggaaagtccggtaaacagcataaaaggaatcggcgcggaaagagaaaaatatttgagaaaattaaatatagtaactgttggggatattattgaacactatccgagggattatgaagacagaactgtcgttactcctatatctgagctgtgtccggatgaaaatgcagttatactggcatatgcaaaggaagagccgaaaaattcgcatttcggaggaatgacgattacaaaggtaagagtttatgacgaaagcgggagtataggcattgtatggtataatcagccctatgcaaggaataatattaaggtcggcgtgttatatgcttttataggaaaaatgacggtaacgaaaaataaccgcagagagataaactctcccgaagtagagaaaatagatgaaaacggcagttatgaaggtaaaatagtacccgtatattcgctttgtgcgggtttaagccaaaaggttttcagaaaaacggttattgaagcgttaaacaaaacagaagatagcatatcagactgtctgccgttttttataagaaagaaatataagcttgccgagaaaaaattcgcagtaaaaaatattcatattccggaaaataaagagtgctatatgcttgcaagagagaggctggtatttgaagagctgtttacactgcaagccgcgcttttacagataaaaaacgaaactgtagctgacagaaacggacaaataatggaaaaagtggatatggctgaattttttaaagcgcttccctttgaatttacttcggcgcaaaagaaagtatttgaagaaattcaaggcgatatgtatgatagaaaagtgatgaacaggcttgtccaaggagacgtcggaagcggaaaaacagctgttgccatggctgccgcatatgtggctgtaaagaatggatttcaggcggcaatgatggctcctacagaggttctggcaactcagcattatgaaagctttaaagacatatttgaaccgctggggataaaagtggttttgataacgggaggacttaaagcaaaagaaaaaagagaggcatggtcaatggcggcgaccggagtcgcagatataataataggaacacatgccattatacagagcaaagctgaattcagaaaactgggtctggttataacggatgaacaacaccgcttcggagtaagacagagacagattttatccgataaaggagacaacccgaacgtacttgttatgacggctacgcccataccgagaacgttggcgcttatattatacggagaccttgatatttccgtaatcgacagtctgccgccgggaagacaacagatagatacgtttgccgtaaacacaggttatagggaaagatactataattttatagataaggaactggaaaagggaagacaggcgtacataatatgcgctatggttgaagaaaatgaaaatgtggaagcggaatcggtaaccgagtatgccacagcacttaaaaatactgtcttgaggaagagaaatattgccgtaatacacggaaaaatgaagcctgcagaaaaggaagccgccctcaaaaattttgccgacggctcaaccgatatacttgttgcaacaaccgtcatagaggttggaataaatgttcccaacgctaccgttatggtgatagaaaacgcagaaagattcggactttcacagctacatcagttaagagggcgagtaggcagaggcgcggaaaagtcatattgtatactggtttccgacagtaaaaacgaaataacaaaaaaacgactgaaaacaatgacagggacaaccgacggatttgtaatttctgaaacagaccttaagctgagaggaccgggagaatttttcggcacaagacaacatggattgcccagtctgaaaatagcaaatttatataaagacatggaaatacttaagaaagcgcaggcggcagccgctgaactgacggcagacgatccgctgcttattaaagatgaaaatatggagcttaaaaatgtcattgaaaaaatgttatcgcatgaaaatataggaatataagctgttgtattgaaatcatatagacatatattgtcttattttaagactttttgtatttaaaagtatattaagggttaaatttttgttgttttttataaacaagtttggtatactcattatagtttgttccagagtatatgaatgcgctttggtttaagatacagggaggttttttatatgcgtgttattgcgggaaaggccagaaggcttcagcttaaagcgccggagggaatggatacgagaccgacagccgaccgtgttaaggaatctctttttaatatgattaatcccgatttatacggctgttcgtttttggacttgttcagcggttcgggagcaataggaatcgaagcgttaagcagggatgcagacaaggctgtttttgttgataagtcgactgtatgcgccgatattatcaaagctaatttggaatttacaaaactttcggagaatgcggaaataataaccgatgatatatgttcggctattgccgaattaggggtaagaggagaaaaatttgacattatatttatggatcccccatataaagaaggatattattcacatgtacttacggaaataaaaaaggccggcatactttcggaaaacggatacgttgtggcagaagccgcaaaggactacgatttttgtgatggaaacggatttaaaataatcaaacaaagaaaatgcggtccggctgtgatgatttttttaaacttggaggaagaaaaatgttaaaagcaatatatccggggagctttgatcccgttacaaacgggcatcttgatataataagaagagcctcggctatggttgacactcttattgtaggcgtttgcggaaacccaaataagagatctttgttaagctccgatgagcgtttggaattgcttagaagtgtaaccgatgatttaggcaatgtagaggtgatggaaatagacggtatgctgggagagtttgcctccagagtaggggcgaaagttatagtaagaggcgtcagagatatgagcgactttattaacgaattccagcgggctatcataaacaaacagctcacaggcggtgtggaaacaatcttccttgcggccagtcccgaaaatataacattaagttccagcgcggtgagagaaatacttgcctttaacggaaatttagatatgtttgttcctgaaaaagtcagagataggttgaaagaaaaattcgaaagagagggataagaatggatgatacagtattaaagcttttggaagaactggagcaggtagtagatgaaggccgttcttcgcctttttcaaacaaggttcaggtagataaagacgaaatttttgaaattattgatgaaataaaaatgaagcttccgaatgagataaaacagtccaagtgggtcattgaggaaagaaacaaaatccttgtagacgcacagaaagaggctgacgaaatgcttaaagaggctgaagtacgtcttggaaaactggttgaggaacatgcggttacaaagaaagcatacgagcaggctgccgaggtaatggacgccacaaagaagagcgctaaggaaatgcgtctcggcgctattgagtatgcagacgatgtaatgggtgttgcggaacagcgtttgagagagatgcaggatacaatcgaacaggaaaatcagaaaatcattgatttctttaaagaaaatattaatgtgatattcgagaacagacaggaacttaaaggcgttaaaaaagactaattttaaacgctttaaaagagcttttggtaaaaccaaaagctcttttttactttttttccctaaagaaaataaatatgaatattgcgagaaaagaagccgccgcaaaagcggaatggtatgtgtatatttcgctgaatacaggatacacactgcttttaaagaaatatatgtcatataagataaatgatgttatgtatgcgacaacagatgaaaatgctttgcatactatgtatttttttatattgatgtcactttccccgataacggctaatgtttgtaaatgtacggaaaatccgccccaacacaatatagcggcaatgagagaataggcgattttgggagaatagccggaagcggcagtcagacttatacctcttgtaaactcaagcataccgcctattattccaccgacagctttataatcttcggggatgatgttcataaaagcttcggtaacaacagagaaaaaaattatacatccgcctactaaaagtatggatttaacagatgacgacagagaatcgtaaataccgctttttgccgatacgagtggtttcatatatgatttgtaacggcatggaaataaaagattatatataaagcctgtcagcagtgaagaaaatatacagattgctaaaaaaaacggagcggaggctctgtcggataatattgacgatgaaacggcggatattataaaaacagctccgggattattgcagaaagacagcatatgttcggcagtgtcttttgatatgctgttttttgaatacagtgatgaaatgatacgcgcgcctgtcgggtagcccgaaagcatacttattaaaaagaccggcataaggcctgacggtattccgaaaagcttcattgttattttatcggctgttccgaaatgcggctttgtattaaaagaaagccatgaagaaattaccataaaaggaaacaacgacggaataacggtatacaaccataaattcaaaccgtcaaaggccgctcccgtcattttatcgctgtatagaactatactccctgccagaaaaactgcaaaaaccgattttaaaacagtaagcataaaaatcccccgaaagtctttaaataataatatgacgttcgggggacaaagatgtttggtaaatttacaaattctctattataaccggcattgtatagtccaacgcgcgtttttttgcggaaggagtaggctgaccgaggaaatatatatcggtagatttcttctcaatctgcaaaagagatttttgaagttccgaaagatttcgttcatctttatttacgttcattattacgggaacggaggaattatgacataatgcgcttacaagcggctctgcggattttctgaacccgagtacccttatataagggtcgaagtttagcggtgaaaagatttcctcctgttctttggtgattcccaaaagaatatggcagagtatacgcataagccttgtatgcgtgtacctttttgttttaagctctgaacatatatctgttattttatatgaactgccgacggttttaagtattctgttttccagtccctcggaaatgccgcttatgtttttcagattttcggcggaagttgttcttaggatatatgccatggcgtcggaataattatccgtaaatataggcgttgacttttcgtatatatcaaaacattccggaggtacagcctgcgttaaaagatttattcttccgctgtatattacttttctgacagcggcggcagacgctatggttccggtaattttgtccgaattatatgcggcgccgactctttttgtgataatgggctttatatttgaagaaaatattttaagcgcttttaaatattcgattgccaatatattattggaagtgcttagaatttcggggtttttgccggttacggcgctgaaagcggcagctctggcagaagggaaagacattccgtgtgaaagttcggatttaagcacttcgttaaataacggagtaggatttataaaaagctcggctgcggcggacagggcagccatatcggttgtttccgcaccgaaagcgaggttatcggctattcccgaggcgcatattatttttattgcgcctcgggcaaaattttcagccgaagccgtagaatatataacgggaagctctatgaccatgtcggcgcctcctcgtaaagccgcacgggttcttgcccatttatcatatactgcgcattcgcctcgctgaacaaatgacggactcattacggcaaaaatatagtctgccgaagatgctctccttgccgagcgaagatgaaatttatgaccgttatgaaatggattatattcagctataacagctgtagttttcataataaaacctcctgattataagcagatacaagaaatattctatttatttaaaattatatcagaaataagatcatttgtgatataattaataggattctatcaaataaaaattatgacggaaaagcttgtttgtatatatattaaaacataaaagcgaatataagaccgtttattggaaatacgaaaaacattttgccgtagatgtcagtaatacggtggtaatatttaaaaaattatgtattttttatatagactattttttgtacaagttatataattaaacttgtataattatgagggcagacaataatattcgtctgctatgatttctaataattttatttctaggaggcttttttgatggatttcttaaccagtataaaagagagagcaaagaaaaataaaaagactatagtattacctgaggcttatgagagaagaactcttgacgcagccgatatgattcttaaagaagatatagccgacgttatacttgtcggtaacagggataaagtacttgaagccggaaaaggctgcgacctttcaaaggctatcattatcgaccctgaaaactatgaaagaatggatgaagtagttgcagctttctgcgaagcaagaaagagcaaaggacttacacccgaagaggctcttcagacagcaaaggctgactacacatactttggagtactccttgtaaaaatcggagttgcagacggtatggtatctggagctgttcattcaacagccgatacattaagacctgctcttcagattcttaagacagctccgggaacagagcttgtttcttcattcttcgtaatgtgctgcaaagacgacacatacggaaacgacggcgtacttcttttcgctgactgcgctcttaaccagaatcctaatcccgaagaacttgccgctatcgcaacagcttcagctgcaagctttgaagcatttgtaggcggagacgcaagagtagctatgctcagccattcgacaaagggatctgcaaagcatgctgacgtaacaaaggttgttgaggcaacaagaatagcaaaggaaaaacatcctgaaatcaaacttgacggagaacttcagcttgacgcagctcttgttaaagaagtaggcgaacttaaggctcctacaagcgatgttgcgggaaaagcaaacgttcttattttccctgacatcgacgcaggtaacatcggatacaagcttgttcagagatttgcgggagcaaaagctttcggacctatacttcagggtcttgcagcacctgtaaacgacctttcaagaggctgcaacgcagaagatatagtagcgtgcgtagctcttacggcattccaggcaacaataatgtaatctaactttttaatataaagataaggagaaaaacaaatgaaaatacttgtattaaactgcggaagctcctcacttaaatatcagcttatcgacagcgagacagaaggcgttcttgcaaagggtctttgcgagagaatcggtatcgacggtgttcttaagcatgaacccgacggtaaggaaaagtttgtatcaaacgatcctcttcccgaccatgcaacagctgttaaggccgttatggacgctcttgttgacgctgaccacggtgtaataggttctacacttgagataggcgcggtaggacatcgtgtagtacacggcggagaatattttgcaaattctgtattaattacagaagaagtaaaagaagctttaagaaagtgtatagaccttgcacctcttcacaaccctgcaaatattatcggtattgaagcttgcgaaaagcttatgcccggcatacctcaggttgctgtatttgacacggctttccaccagacaatgcccgaaaaagcatacctttacgctcttccttatgaatactatgaaaaatacaaagttcgtaagtacggtttccacggaacaagccacagatttgtttctcaggaatgtgcaaaacttatgggcagacctatcgaagaacttaagattgttacatgccatctcggaaacggcgccagcatttgtgccgtaagaaaaggaatctcagtagacacatcaatgggcttcacaccacttgacggtcttgcaatgggaacaagaagcggtagcgtagaccctgctgctgttctttacatcatgaagaaggaaaaccttacaattgaccagatggatcatgttcttaataaagaatcaggcgttctcggtatatcaggcgtttcaagcgacttccgtgatatcgaggctgccgagggagaaggaaatgcaagagcaacatcagctattgaccttttcgcttaccgtgttgcaaagacaatcggcgaatatgtaacagctatgaagggtgttgacgctatcgtatttacagcaggtctcggtgaaaacagcgcaacaatgagacaggttatctgcgattacctcagatacctcggaatcgagcttgactcatacagcaacagccagagaggaaaagctattgaaataacaacaaaacagtcaagagtacaggtattcgttatccctacaaacgaggaacttgttatcgcaagagatacaaaggaaatcgttgaagctcttaagaaataatttgtttattaattaaaaaagcctagtaaagagagggttttaaaaactctctctttgcaattgatttaagttacaaattaaaaatttttgattgacaaatttttatgttattagtataattgataaagtatgacttgcaggggtgattaataattatgaatattaacatttccgctgtttcgggcagacgggaggccaggttttctttcagctttaatgaaaggattgaggaggtcgattgtcgcgatggggcggttttcgtaacgcctgttagtcttgagggagaagtaattaaggacggagatatatactatattgacggagcaggttctgttgacatggatataccgtgcgacaggtgcttgacgccggtcagggtttccgttgacttcaaactgaatgaaaaattcagcagcaatgcaagttatgacgaagagatagaaactttttcgggagattctatagaccttacatcaactgtattcaggaatatattggcagctatgccaatgaaggttgtatgcagcgatgactgcaaaggcttatgccctgtatgcggacaaaatcttaatgtaaaagattgtggctgcgatacgacgtatatagatccaaggtttgaaagtttacgttctcttctcaaattcgatgaggaggtgtaaagagaaatggcagtacccaaaggaagagtctcaaaatcaaaaaaaggtaaaagaaaagcagctacatggaagattgcgacacctacacttgtacagtgcagcaaatgcggcgaattaatggtgccccaccatgtttgtaaagcatgcggctcatataacaaaaaggttgttacacctgtagactaattataaaccttaaggcagctgttattggctgccttattttgttcttaaaaatattaaagaggtgaaagtacttggaaagaaatatagttgtcgctatagacgccatgggaggagacaacgccccctttgaaatagtaaagggagttgttgaggctgtaaagctttatcctgtaaaagtgcttcttgtaggaaaagaagatattgtaaataaggaactttcatcatattcctatgaaaaagaaagtatagatgtaataaacgcagacgaagttataggaacggacgaggctcctacagaggctataaggaaaaagaaaaattcatctatgatggtcggccttacgcttgttaaggaaaagaaagcgtctgcatttatttccgcaggaagcacaggagcaatatttgtcggcggaactgttactgtgggaagaataaaaggaatagacaggccggctcttgccacatgtctgccgacgcttaaaggattttcgcttctgctggacagcggagctaatgtagactgtaagccgcagtatttggagcagtttgcaaaaatgggttcggtatatgcggaaactgtactcggaatgaaaaatcctacggtaggacttgcaaatataggcgttgagaaagaaaaaggaaatatgcttgttaaggaagtttatgaaatgcttgagaaatcagatcttaactttatcggaaacgccgaaatagttgatattccaagcggagtagcggacataatagtatgcgacggatttgtcggaaacactatacttaagctgtcggaaggactcagcaaatcactgcttacgattataaagggagagattacaaagggcccttataaattggctgctgctgcacttaaaaagcctttttccaacattaaaaagtcctttgattcggatcaggtaggaggggctccgtatatcggccttaaatcccttgttatgaagatgcacggaagctgtaaatctccggcggttgtaaactgtgtaaagagcgcaataaacttcattgaaaatgatacagttgccaaaatcgaaaaattgatacaggaataaaaggagagaactttatggaaacatcaactgttattgatataattgccgagcagctcggtatttcatctgatgagataaccgaggatacttcttttgcggatctcggagcggattcctttgacctttttcaggtaatatccgcattggaagaagagtttgaaattacatttaatacagatgatacggataaaataaaaactgtaaaagacgctattgactatattaacgaattagttgcggagtaaagatgaataataatttggagcagtttcagaatataataggatacaaatttaaagatataaatctattgaaaaaagcttttacacacagctcttacgcaaacgaaaagcatatggagaaataccataacaatgagcgattggagtttttaggagacgctgtgctagaactggttatcagtgattttatttataaaaattatccgcatatgcccgagggtgaacttacaaagcttagagccggcacggtatgtgaagggagtcttgccgaaagagccagagaaatcggtataagtgattttataatgctcggaaaaggcgaagaaacaacaggcggacgttatagagagtccatattggccgacgcttttgaagcggttataggagcggtttatcttgacggaggaattgagccggcaagggctcatattttaagacagcttgagaatactgtaggcaagataaggcttacgctcaatataatcgattgtaaaacaagacttcaggaagaaattcagaaacacagtaaggagccgatacattatgaaataatcggcgaaacgggaccggatcataataaattgtttcaggcggctgtaagccatgaaggcaatttactcggcaaaggtatcggaaaaagcaaaaaggaagcggaacagtctgccgctctcgacgcgctcagagcgatgaaaattataaaatgataagactgacagccctttcagccaaaatggtttgactgaaagggctgttttttgtataatacaatattgaaaaaaatcggaacagatgtttgtataaaaataatggatactatatactttataatatttatgtgatatacttttaagacagttagttgagtttacttgtttttgctgattttatcggggatttgttttataaaaatgagtatgaaaaaccaatcatacattcccgtataatatgatttctgtttatttttttgtggcaggaggcttagttgtggaaaaaaagtttaaaatacattcaaaatataaacctaccggagatcagccgcaggctatagaaaaaatagccgacggctttaagaaaggtcttaaatttcagactttattgggtgttacaggttcgggaaagacttttacaatggcaaatatagttgagaagctccaaaaacctacattggtaatagcgcataataagactcttgccgcacagctttacagtgagtttaaggagatattcccggaaaatgcggtggaatattttgtttcttattacgactactatcagccggaagcatatgttccgagtaccgatacttatattgaaaaagactcgtcaataaataatgagatagataagctccgtcattccgctacatcggctttgtttgaaagaaaagacgtacttgtagttgccagcgtatcatgtatatatggcttgggcgatcctgaggaatataaaaacatgtctctgtcactgcgaacgggaatggaaaaagacagagatgacgtactcagaaaacttgtcgaattacagtataatagaaacgaaacggagtttgaaagaggaacattcagagtaaggggagacgttgtggagatattccctgccgccaacagcgaaagcgccataagggttgagtttttcggcgatgaaatagataaaatttccgaaatagacgttgttactggaaatgtaataggactaagagaacatgttgtaatattccctgcgtctcactatgttacatctaaagagaaaatgcagaaagcgcttgttaatatagaggcggaactggagcagaggcttgcggagcttaagagggaagataagcttttggaagcgcagagattggaacagagaacgagatacgatatagaaatgctgtcggaaatgggtttttgttccggtatagaaaattattccagacatttggaattaagggagcccggcagcgcgcccggaacgctgttggacttttttcccgatgattttatcattatagcagacgaatcccatgtatcggttcctcaaataaggggaatgtatgagggagaccgctccagaaaaaccacgcttgttgaatttggcttcagacttccgtcggcgcttgataacagacctctgaagtttaatgagtttgaaagcaaaataaaacaaatgctgtttgtttcggctacaccgtcaaaatacgaagcggaacactctcagcagacggttgaacaggtaataagaccgacaggactgttagaccctgaaattacggttaagcctgtgcagggacagatagacgatcttataagcgaagtaaataaaacagttgaggcaggacataaagtacttgtaactacgttgacaaagaaaatggcggaaaggcttaccgactatatgaaagaaatggggataagggtaagatacctccattctgatatagatacgctggaaagacttgaaataataagggacttacgtatggacgtattcgacgtgcttataggaataaatcttctgcgagaagggcttgacattcccgaggttgcacttgttgcgattctggatgccgataaggaaggttttttgcgttcggaaacaagccttatacagaccataggcagagcggcgagaaattccgaaggaagggttataatgtacgcggatgttatgacagactccatgaataaagctattacagagacatacagaagacgggaaatacagataaggtataatgaagaacacggcattgtgccgcagacaataaaaaagaaagtttacgatataatacaggctacaaaatctgttgaagagaataaatcaaatgggcttgataaagattttgaatcaatggatataaaagaactgcgtaaacaggcggcaaagacagaaaaagatatgagaaaagccgctgccgagctacagtttgaacgtgcggcggaattgagagacagacttatcgaaataaaaaaatatatgaacggtgaataagatgacaaagaatatgattgaaataaggggagcgcgctcccataatcttaaaaatatagatttgaatataccgagggataaatttgtcgtatttacgggcgtttcgggttcgggaaaaagttcccttgctttcgatacgctttatgcggagggtcagagaagatatgtagagtcgctgtcatcatatgcaagacagttccttgggcagatggacaagcctgacgtagattatataggaggactgtcccctgcaataagtattgatcagaaaactacaaataataacccgaggtcgacggtcggaacggtaacggaaatatatgattacttccgtcttttatacgccagagtgggtgtgccgcattgtccgaaatgcggaaaggaaataaaaaaacagactatcgaccagattgtggatcagattatgcttttgcctaccgacagcaggatacaaatattggctcccgttgtaaagggaagaaagggagagcatgtaaaactgcttgatgacgctaagaaaaacggatatgtcagagtaaggatagacggcgaaatatacgacctgtcagaggaaataaaacttgaaaaaaataaaaaacacgttattgaaatagttgtcgacagactgaaaataaaagacggaatacaaaagagacttgccgattcagccgaaacggcttcggcactgtcgggaggagtaatcacagttgatgtaataggggataaaagcattacattcagtgaaaattttgcatgcccggactgtggtataagcatacctgaaatagaaccgagatcgttttcgtttaacaacccaagcggcgcatgtcccgaatgttcgggcttgggaatgatgagaaagttttcgccggagcttatagtacccaacacagctctcagcatatctaaaggggctatttcagctccgggattcaattcggtaagcaataacggaagcatgagcgccgaactgtttaaagcattggctaaaaggtatgatttcagccttgatgtgccgtttgaagaactttccgacgaggtaaaagacataattttctacggtacaaagggagaaaaattaagaatagaatatatgaatgccaaaggagtaagttattatgaatattcctttgacggagttataggcaatcttcagagaagatataatgaaacttcggactcgatgagaggcgaatacgaacagtatatgacggaaataaaatgtcctgtttgtaaagggagaaggcttaaaccggaaatacttgccgttactgtaggcggaaaaaacatctcggaagtaacggaaatgagcatcacggaaataaaagagttctttgataaccttaagctttcggaaaaagaaagtatgatagcagacaggatattgaaagaaataaatgccagaataggatttttgatagacgtaggtctggattatcttacattgagccgttcggcaggtacattgtcgggaggggagtcccagagaataagactggcaacgcagataggctccggacttgtaggagtcgtatatatacttgacgagccgagtataggtctgcatcagagggataatgacaaacttatagcaacgctcaaaaacctaagagatatgggaaacacccttattgtcgtagaacatgacgaggatacgatgtatgccgccgactatatcgtagatataggtccgggagcgggaagaaacggcggagaagtaatatgcacaggaagcgtagacgacattaaaaattgtgaaagaagcgaaacgggtgcatatttaagcggaagaaaaaaaatagaagtacctaaagaaagaagagttaatcccgaaggaaaacatattacagtactgggagctgcggaaaacaatcttaaaaatatagatgttgaaatacccataggcgtgtttacatgcgtaacaggcgtttcaggctcgggaaaaagctcgcttgttaatgaaatactttataagagactggcgagagacttgaattatgcaaagctctatcccggaaagcacagcgacattatcggaacggaacagttagataaagtaataaatatagaccagtcgccaataggaagaacgccgagatcaaatccggcaacatatacgggacttttcgatatgataagggatttgtatgcacagacaaacgaagcaaaaatgagaggctatacaaaaggtcgcttcagctttaatgtaaagggcggaagatgcgaggcctgctgcggagacggtataataaaaatagaaatgaatttcctgcccgatatatatgttccctgtgatgtatgcggaggaaaaagatataacagggaaacgcttgaggtaaaatataaagggaaaacaatttccgatgtattggaaatgaccgtcgaggaagctcttgagttctttgacagtataccgagaattaagaataaactgcaaactttatatgatgtaggactatcatatgtacagcttggacagtcgtcaacaacactgtcgggaggtgaagcgcagagagtaaaacttgccacggaactcagcaaaaagagtacgggcaagacaatgtatatactggacgaaccgactacaggtctgcacacttccgatgtacacagacttgtagatatacttcagcgccttactgacggcggaaataccgtagtcgttatcgagcataatctggacgttataaaaactgccgattatataatcgaccttggaccggaaggcggaagcggaggcggaacggttgtggcatgcggaacgcctgaagaagtaagtaaaaatccaatatcgtatacaggaaaatatttgaaaaagtatcttgataaataaaattgccgcatattggtcgaaaaacatattattttgtcgatttttagtgtataatgaaatttatccgtaaatgagtaatgcaggatttaactgactataatgcactgaaggggatagatatatgagtttcgg

SEQ ID NO: 3634 - DNA, 10506 bp, Unknown
  16S sequences of unknown bacteria
ccgtccgatgaccggatacgtcatgccgatagccggacggtcgattcctggaatccggcctaaattaaaaagggctccggccatgagagcgcctgtatttccggcggaaatcacaaaatcgcactttttttctctcaccagagaaatcgcgcggatcagcgaagaatctttcttcgtccgagctgctttgaccggagcgtcatcgttagtaatcacttccggcgcgtgaacgatcttgatcttgttccgatcgaacttgtgtctcttcagttccttttttaaaacatcctccggaccgacgagataaatttcatcgtcaatcactttcgaagcttcgatacagccctttacaatttcctgcggggcgttgtctccgcccattccgtcgactgctattttcatgctgttttacctccgatagcatcctaaaattcgcgtaaatatatcatattagtataacatgacagacggcggattgcaaagagcgcaggacgggatcgcaaagatattcaaaaaggcggacagacccgtctgtacgcctttccgggggatttcagaccccactgtgtcagttcaatctgtcgaattctgaacaggaccacaggccgtggtggctgcagaatacgaaagcgttgcgaaactcatctccgtcattgatggtaaagaccgcttccggaaacatatccggatagagaatctgtctctgaccgcctcttgcggtcttgatatatacccatccgatatgatgatcgtgtccgacggtatgaggaaccttgctgaaatccacatatatcttatccccatccgcacgaacgcttacctgtcccatggaaaccgcggtgagtcgatccatgatgctgtcgcaacactttatttccgcaccgctgtcattcagcattcccgccagatttccgcatttcttgcagagataaaatttctgttcgccgtccagatctgtctttgtatgagaacgggagctctttcggccggacgctctgctttttaccacttttttatcgggcacagccgcagactccgcaccagggcttccgaagactctctccgccgccggtctgcttccgaggccgtggacctgctcgtaagaacggccgaagacggatacgtccgtcatacgaatatccgtactgctgttcatttctgtattcatcaaaaaacctccttacatatatcgtattttttatctgatatatgtaaggaggccggatcgcagaataccggatcctttccgttattctgcgcgtattttataaagttatgaattttcagatgacattttctccggccgctttttcttttcagcagttccttttttccccttctgcgcggaaattttctccggtgtgtttttcttttttttcttctctactgaaaacccgaatttgcccagtttccgtccctgtgcataataaccgccgtggctgtagaccagcggccgggaagcggacaggtcgaaatggccgtcttcatccatgtaatccatatctgcggtgacgcccagaacctcggcgagaaacatatcgtgcgttcccagagggatgatctgttttactctgcactcgatattgaccggcgactccgcgatcgaaggcgcagagacatatttcgacggaaccggcgtcagattcatctccttaaatttgtcgatatcgcggccggattttacgccgcagacgtctgtggcccgcgccagttcctccgtggtgagattgatgacaaattctcccgattctctgatgatgtcataagaatgccggctttcccgtacagaaatatagaccatcgccggatcgctgcagacggtgccggtccacgccacggtgataatattgggccgctcgccgccccgctgacagctgaccatgaccgcaggcagcggatacagcatattgccggctctccagtactcttttttacccataattttccttccgcatcttctttttctcttaatccattatgaaacggaatttttccgcgtcacaacgaaacttaaattgacagaaaacagctgttttgccggttttcccggcggacatcaaatcccgcagaaaaaactgaaaggaatcctgccgtccgcagaggcgacggcagaactccttctgtacgatattacaggacttgaaaagtttaccataatatttatcggttaatctttccgatatctttccgatactgagcgccttcaaacgtaattttttcaacatttgcaaaggcctttgctctcgcttcgtcgtttgtagcgcccacagcggtaacgccgagaacccttccgccgctggtgacgatttgcccgtccttttcggcagtacccgcatgaaatacgacgatatcctcatctacatcatccaggccgcggatcacttttcctttttcgtagctccccggatagcctccggatgccagtaccacgcagaccgcccggcgatcgctccatctgatatcgatctgatccagcgttccatcgatgcaggcgtcaaagatatccgccagatcggtctccaagcgcatgagaaccgactgcgtttccggatctccgaaacgattattgaactcgatcaccttcggtccgtcctcaccgatcatgagaccgataaaaagcactccgtgaaaatccagtccgtcttcgataaaacctcgaatcgtcggctgaagtattttttcatcgatttcctttttcaattcatcattgaaaatcaggctcggcgaatacgtccccataccgccggtgttcggacccttatcaccgtcaaaaatccgcttataatcctgggcggattccatcggaacgatagtcctgccatcgacgaaacagagcatggaagcttcgatgccccggagacactcttcgactacgatgagatccgccgcatcgccgaaaatccgatctcccatcatctcttcgatggccttctccgcttcttcataattttccgctaatacgacgccctttcccgccgccagtccatccgccttgagaaccatcggataaccgaaaatgccgatatcttttttgagggcttctttctcggtatattctctgtatcccgccgtcggaatatgatgtctttttaaaaatgctttcgtaaaagatttgctgccctctaactgagaacagtttttatccggcccgaagacacggattcccgcttcgttcagcagatctgtgatccccatagaaagcggcacttccggtccgatcaccgccatgtccactttattttccacacagaaatcgcggattccttccagatcctccgctttgacaggaacgcattccgctactgatgcgattcccgcatttccgggagcacagtaaagtttttccactctcttgctcttcgccagtttccacgcgatggcatgttctcttccgccgcttcctacgactaatattttcattttgaagtacctccgaattcgagtagctccgttatcttacagatgttccaactcgccgctgcagaatttttttgcggccagcggcagaattctgtgctctacctccagcacccgtgcagatagtgtatccggcgtatcgtccggcagaaccggaaccttttcctgaatgagtatctttcccgtatccacgccttcatccacaaagtgaactgtcgcgcccgattccgtctcaccgccggcgatgacggcttcatgaacaaaatgtccgtaaaaacccttaccgcagtatttgggaatcagcgaaggatggatattgataatcttgtttcggtacgcctcgatcagcttcggctcgagaacgctcatatatccggctaaaattaccagatctgtcttttcctcatcgagagcgcggatgatagcatctgtgcgctccgacatgaccggataattttttttgccgatatatacgcctttaatattgtgattttttgcccttgtcagagcgtaagcgtcttctttgctcgcgatgacctgaacgattttcgcattttcaataaatccgttttccacattatcgatgacggcctgcagattcgttccgccgccggaaacgagcactgatatatttttcatttaaaacctctatttataatatttctccgtctttgatgatcgagacgccttccttcgaagagatcttcccgataatgctcggtttttcgccggcagcggtcagagtgtccatcacacctccggcatctgccggatcaacggtcaaaatcataccgattcccatattaaacgtcgagaacatttcctttgcatcgacatttccgcatttcttaatatacttgaaaatttccggaacttcccaggaacccgtttcgatttccgcacccaagccgtccggaaggatccgcggaatattttcataaaatccgccgccggtcatatgtacgataccgtgaatatcgaatttaccgaagagcgccttgcaggccttgacatagattctcgtcggcatgatcagcgcgtcgcccagagtggttcccagttcttccacatagtcggcgacatccatatccatcttatcgaaaaatatctttctgaccagagaatatccattgctgtgaattccgctggaaggaagtccgatgagaatatcaccttccgcaactttgcttccgtcgatgatatttttcttatcggcgattcccacggcaaaacccgccatatcatattcgtcatcaccgtagaaggacggcatttccgctgtttcaccgcccacgagagagcattccgaaagcacgcagccatccgcgattcccttcacgatatcggcgattttctccgcctgcacttttcctgtagcgatatagtccaggaaaaagagaggcaccgctccctggcagatgatgtcgttgacgcacatcgccacacagtcctggcctacggtatcatgtttatccatcaggaaagcgattttcagctttgtgcctacaccgtccgtaccggatacgagcaccggctccgtcattttgcccagatcgagctgatacatactgccgaagctgcccagaccggtcagaacattttcgctgaaggttctctttacatggtccttcatcagttctacggctcttccgccttctttggtatctacaccggcgtctttataagtcaatttatctcccatgttgaaatttcctttcttcatcatgtattttccgaatttgcacatttgcgaaagcgctgatctgccgttttaaatcaatcgtattcgaaaataaactctctcttgctggcagcctcttcgtgttccgcagcataatctacgtcggagagctccaccggataatctcccgtaaaacatgcgtcgcagatacagtcaccgaagccgatgcattctttgagaccttcgatactgatataagccagggaatcggcgccgatgtgctgccgaatctcttcgatggtataattcgcagccatcagattcttccgattcggcgtatcgattcccagatagcaggaatgcgttaccggaggggagctgatgcgcacgtgcacttcggaagcgcctgcgtccttgagaagtttcacgatttttccgctggtcgttcctcttacgatagaatcgtcgatcatgatgatccttttgcctctcacattttcctcgagaacgttgagtttcatccgcacaccgagttcacgcatttcctgcgtcggctgaataaaggttctgcccacgtatctgttttttaccagcccttcaccgaaaggaatcccagactcttccgcatacccgatcgccgctaccgtaccggagtccggaacggcgatcaccagatccgcttctacgccgctctctctggcgagaatacggcccgcttctctgcgggcatgatagacgcttctgccgtccattcggctgtccgtcctcgcaaaatagacatattcgaaagagcagacttttttcggagcctcttcgttgaaccggatcgaacgcagttcgttattctgaatgacgacgatttcacccggctctacatcgcggacaaattccgcgccctgcagcggaaatacacaactttccgaagcaagtacataaccggacttcgtgcggccgatgcacaacggccggataccgttagcgtctctcactcccaggagtttgtcgcctgtggtgataaccagtgcaaaagaacctttgatgatatttgcgactttggcaaccgcaacctccacgcttccttccttgaggttctgagcgatcagagccgcgatgatctcggaatctgtagaagtctgaaaaatatatccctcatcctgcattttatctttgagagccgtagcattgaccagcgtgccgttgtgagccaacgccagagatcccatcttagaatagactaccaaaggctgagaattcaccgcctggctctgacccgctgtggaatatctcacatgaccgatacagatatctcccggaagagttttcataatatcatcgttaaaaacctcctgaacgagtcccatgtccttgtaacagttgatattaccgaacatattggatgcgattccggcactttcctgccctctgtgctgcagggagtgaagaccgaaatagacgtctttcgcaatattctgagctcccggagaagcaattcccacgacaccgcattcgtcatgaaacttatcgtcatccatcagttctgtcagccattctttgtttacgttcatatatgtttcctctatatttcctttcggtaaatcgccggatccggtttccgccccgcgctgcagacgcacagaagccggatcctcctgtattttgtctatctgttctcttcgactctctttagtacttcctgataagtttcttctacgccgcccagatctcttcgaaatctgtctttgtccatcttttcgccggtgcggacatcccagagtctgcaggtatccggagatatttcatccgccaaaatcacttcgccgtcgtataagccgaactcgattttaaaatcgatcaacttcaagccgctcttcaggaagaaatcctttagaaaatcattgatcataaaagcgtacttcctgacagtgtccagctgctcctgcgtagccagccccagagccagaatgtgatcgtcgttgatcatcggatctccgagactgtcatttttataggaaaactccagaacggtcttcgccagctctctgccttcttctacgccatatttctgggaaaaagaacccgccgccacatttcggatgatgacttccagcggaaggattttcacagcctttaccaaggtctctctgtcgctgagaagcctgaccagatgagttggcacgccgttttcctccagctgctgaaagataatagccgacatcttgttatttacgacgcccttggaagcgatggttccctttttctggccgttgaatgccgttgcgtcatctttgtaatctacgatgtagagttccggatcgtcggtcctaaatactttcttcgctttgccttcataaagctgttctaatttctgcatttttgtcttttcattcctttctgcgccccgcagggtctttcccgccactgatttcggaaataaacaatgacactgtcatttttcaaacaatcagactcgccataacctcctgcagttacttttgaaattccgcgtcgatcgccatgacttcacgttccatcttcgccttataatctttcatcgcctgtctcagttccggatattttaaagacagcatctgaaccgcaagaataccggcgttttccgcaccatcgatggctactgtcgcgacagggacgcctttcggcatctgaacgatagacagaagcgaatcgagaccggtcagagtggaggatttaaccggcagaccgataaccggcatcggtgtaaacgccgccaggacacctcccagatgcgccgctttgcccgcagccgcgatgatgacttctatgccgttttcttccgcttttgatgcaaattccatcgctgcgacaggagttctgtgagcagagatgatcctcgtctcaaactccacaccgaaatcagtcagaactttttctgccctctctactaccggataatcggatttgcttcccatgacgattccgactttcattttatcattcctttccatttatataattcagagtaaaactctgcagctgtcctttattttatactgctctgaaaacgacaaactgcatccggaactttgcaaaaatttccggatgcctgtcgatatttcagtcacgcagtctgaagtctgttacttaaaatagttgattccagactcgaagagcttctgatcaaaattgcccaaaacattacggtagagatttcttccgattcgttccgaatgtcccattttgccgaaaattcttccgtccggagacaggataccttcaatcgcctggttggagttattcggattaaaccgaatatccgaggtcggatttccgtccatgtccacatactgtgtagcgatctgtccattttcagccagttctctgatcagagcgtcagatgcgataaatctgccctcgccgtgagaaacaggaatcgtatggatatcgcctacttcggtgcctgccagccacggtgatttaaccgacgcgatcctcgtattgacgagacaggacacgtgtctgcctatgctgttgtatgtcagcgtcggagcgtcttctttcgcttcgacgatttttccgtaaggtaccagtcccagtttgatcagcgcctggaatccgttgcagatacccagcatcaggccgtctctcttttccaggagttcggtaaccgcgtcagaaacggcaggattccgaaataccgccgtgataaattttgcggaaccatccggttcatctccgccgctgaatccccccggaatcatgatgatctggctctgtctgatctttttggccatctgatgaatggactcgtccagaacttccggcgtcagattcgccagaatctgcatttccacctctccgccggctctttcaaatgcgcgtttgctgtccatttcacagttggttccagggaaaaccggaataaatactttcggtctcgcagtcttaaccgcaggagaaaccgcgcttcttccggcaaaagagaaagtctcgatcttctccccgtcttcctttgcccgtgtcgggaatacaccctccagaggctcactccacgccgtgatcatctcttccatggaaattttttctcccgtggaagcgatttcgatttccccggaatccgccgtcctgcctatgatttcgaaacagataccgtcaaacagagcccccgcgtcttccgaaccgtcaatttctgcgatcagagcgccagtctcgatcttgtgaagatcttctccctctttattttctataacagcgccgattttattgcccgccgccatttcacatatggtgacgaaaataccgccgcctcctaccggattcatcgacagaatttttttctgtccggacagttcgatgactctcgccatattctggcgatactgttcgaaatcaatcacgccgaactcgtcgttttcctgatagatatgcaccagagtgctgcccgctttcttgaattcggtagagaccacccgatcggcgtcggccgctgcgacagcaaaggaaatcagcgtcggaggcacatcgatatccataaaagtaccggacatgctgtcctttccgccgatggccgggatcttcagttccgcctgagcggtcaggcctcccagcagcgcgccgaaaggcttgccccatctcttcggatcgtcgccaagcttttcaaaatactcctgaaaggaaagtctgacttttctgtaatccccgcccagcgctacgatcttcgtgactgaatccaccactgcgtgaactgcgccgtggaacggactgcgcttagataccgccggatgatatccgaaggtcatcagtgtcgccgtgtctgtatccccttccgtgaccggaagtttcgccgccattccggctgccggagagagctgatattttccgcccagcggcatgagaaccgaacccgcaccgatggtgctgtcaaaacgctctgtcaggcctttctgactggcattgcccaattctctcaaatagtcggccagaggcttcttttccggagcgggaacttcaaaatcatcgttttccgcgatggtgaccgcggtcttctgctttacgccatttgtatcgaggaatgatcttctcagatcgaggatacactttcccctccagtacattctgacgctgccggaatcggtgacctccgccaccgctaccgcctccagattttcttccccggcgtaagcgatgaacttatccgtatcttccgctctcacgaccaccgccattcgctcctgggattcggagatcgccagctcggtgccgtcgagaccttcatatttcttcggaacgagatccagattgatgtccagactgtctgccagttccccgatcgctacggatacgccgccggcaccgaaatcgttgcagcgcttgatcagcgtagaaacttgtctctggagatttctctctaccggaggattccccttctgcac

SEQ ID NO: 3635 - DNA, 7704 bp, Unknown
  16S sequences of unknown bacteria
ccgggcgggcgttccggtgcgtcggggtcttggggtttaccccaagtcgcttttgggcacttttggcgagtcaaaagtgccaccccgccgggcaggcgtgcttactcaagcctcgtaaaagacttgccccaccggaggtgattacagaccatgtcacgaacgccccggcggcgagccgtacaaactgggctttctaaaaaccttgccccaccggaggtgatagcaaactttttcacgaccgccccgccgggcaggcatacagattaaaactttttgtaaagctctccccgccgaaggcgagatgaaattatgccatagtttgtgccgacaatccctccgtcacggctgcgccgtgccacctctctttgcacaagggaggctttcgccgacaggcgaccgctaatttggccaattcccttttgctgcttttgcgggggaaagcggccttccgccggcgggcggcaatattcccccggcgggtgggaaaagcgggaaaaaaccgcatgaatacaggcaaaaaggcttgacttaccggttgcatctgtgttatgatgtcattacctctcggagaagggcctttttttcgtgtgcgtttttggccttttgggccgttgcttttcccgcacggaagagcggctgattcacttctcgccacaaagagggaggcaaaagaaatccgaagtataataggaggtgccgactaaatgagagtcaagatcactctggcttgtaccgaatgcaagcagcgcaactacaacaccatgaagaacaagaagaacgatcccgacagactggaaatgaacaagtactgccgcttctgccgcaagcacactgttcaccgtgagaccaagtaataaggaggagtaggaaaatggctgagaccgctaagaagcccaatatctttcagcgttgggcgcgctccttcaaggatatgcgcggcgagatgaagaaggtagtatggcctaccaagaagcaggtcatcaataataccctcatcgtactggcagttgtcctgatctccgcaattgttatctgcggactggatgccctgttctcgctggttatcaagctgctcatcaaggcctgatccgccgccgatgagccgggaaactcaaaaatcaataccaaacgggagggaaccaaatggctgaagaagcaaaatggtatgtggtgcatacctactccgggtatgagaataaagtggccgacagcatcgtgaacgcggtggaaaaccggcagctgcatcacctcattaccgatgtaaagatcccgaccgaaatggtggtcgagatcaaggatgacggccagaaggtggaaaaggagcagaagctcttccccagctatgtatttgttaagatgatcatgacagatgacagctggtatgttgtccgcaatatccgcggagtaacgggctttgtgggcccaggctccaaaccggtgccgctgacggaagccgagatagagcgcttccaggtggagaaccggcagatcacgaccaactatgccgtgggcgacagtgtagaagttaccggcggctatctggaaggctttgtgggcgttgtggatgccattgataccgaaaagcagctgacccgcgtcaccgtttcgatgatgggtaaggatgtaacggtagagctggccctgaacgaagtgaagcccctggaataaataaaagcaacacaaataaaccgcaggcccgtgcgtaaacgggccgataggctaagcccccaaaagagccgggagcagagcctgtgggaggaaccatccgcaaaacaaaatgggatggcccgctatcattaccacatatttggaggtgcagaaacatggctcagaaagtagtaggctatatcaagctgcagatccctgccggtaaggcaacccccgcgccccccgttggtcccgcactgggtcagcacggcgtaaacattatggctttcaccaaggaatttaatgagcgcaccaagaacgatgtcggcctcattatccccgttgtgatcaccgtatacgcagaccgtacttttagctttattaccaagactccccccgcggccgtcctcatcaagaaggccatcaacctggaatccggttccggcgtgcccaacaagaccaaggttggcaagatcacccgcgagcagctccagaagatcgccgagctgaagatgcccgacctgaacgctgccaatatcgataccgccatcagcatgattgccggtaccgcccgcagcatgggcgtagaagtagaaggctaaacgctttcttgtaacagtgggaggaaccattccgctaaacaccacattataggaggataataaacgctatgaagcatggtaagaaatatacagacagcagaaagctggtagacagcaccaagctgtatgagccggcagaggcgctggacctttgcgccaagaccggcaaggctaagttcgatgagaccgtagagatccatgtccgcctgggcgtggacagccgtcacgccgaccagcaggtccgcggcgccgtagtgctgcccaacggtaccggcaagagcgtgcgtgtgctgtgctttgcccgcggcgatgccgccgaggctgccaaggctgccggcgctgagtttgtaggtgccgaggacatgatggagaagatccagaaagagaactggatggacttcgatgtagtaatcgctacccccgacatgatgggtattgtcggtcgtttgggtaagattctgggtccgcgcggcctgatgcccaaccccaaggcaggtaccgttacccccgatgccggtcgcgctgtgaccgaggcgaaggccggtaagatcgagtaccgtctggataaaaccaacatcatccactgccccatcggcaaggtttccttcggcgcgcagaagctgcaggagaactttgataccctgatggacgctatcgtaaaggccaagcccgcggctgccaagggtcagtatgtccgttcctgcgtggttgctaccaccatgggccccggcgtcaagattaaccccgcccgctttgttgccgtagcgacgaccgaaaactgatcgaaaaaccgataaaagcggactctacggagcccgctttttttcgcaaaggaggaggccctatgaagaaaatcgtaacggaattcaaggactttatttcccgcgggaatgtgatggatatggcagtcggcgtgatcgtcggcggcgcctttggcaagatcacctcctcgctggtgaatgatgtgttcatgccctttttggggtgggtcatcggggatatcgacctgacggcgctgaatatcaccctttccccggccgtgatggagggcgatacggtgataaaggagccggtggtggtaggcatcggcagcttcctggccaccatcatcgactttttgctcatcgcgctggtggtgttcctgtttgtaaaggcggtgaacaccgctcgcagcaagctggaaaagccggccgaggaggaagccccggccgcgccgccggagccctccaatgaggaaaagctgctggccgagatccgggacctgctgaaaaaccgctaaagccgcaagctgctattggggcgcccctgccggggcgcccttttgcgtttggcacagggcggcggggaggcagaaggcggcgcagccgcctcgcgcgcgcccagcgcgcgcgagggacgcgggggccgcaggcccacgcgcggcccggccgaaggccgggcccggctgcgccgaatctggccggctgaaaaaatttttggaaggagtgcagtaaaatgccaaaaatgaggcactcattaagtagagggcccaaacgaagccaaggaggaaaaaccatgaaaaagcggatttttgcacttactgggatactgctggccctgttgctagtgctggcgggctgcggcagcagcaatatgaccagcaacagcagcaaggatatggcctatggcggcagctataacggaaaaaacgaaagtttttccaccggcggtctgtacgataccgaaagccccatgatgccatccccggagccgggggagagggacgacgatgcagcgctgaccaccgaccggaagctgatccagacggcgtggatggagctggagagccgggactatgcccaggccctggcggccctggagcagatggtaaccgactgcggcgggtacatcgagagccggagcgagcagggaggcagcctatacagcagccgctataacgcccggtacgccagcatcaccgcgcggataccggccgacaagctggaagcggcgatgggcatggcgggtgagctgtgcaatgtggtaggccgcagcaccgatgtggcggatgtgaccgaaagctataccgataccgaggcccggctgaagaccctgcgcctgcaggaggagcggctgctggagatcctctctaaggcgacggagctgagcgatgtgctggagctggagagccgattaagcgatgtgcggtaccagatagagagctatgaggccaccctgcgaaactacgacagccgggtgagctattccaccctgcatattaccctgcaggaggtggtggagtacagcatcatcaacagcccgccccaaacgctgggccagcgcctttccgatggctttaaggactcgatgcggctggtgaaaaacagcgccgagaatgcgctggtttggctggtgacctatctgccgctggtgctgctgtgggcagtcattcttgcggtggtggtttggctggtgctgcggctggtgcgccgggcccaaaaggccggaaagctgccgaaggtgagccgcaagggtaatccacaggcggaagcgcccgctgagcagacggcggaggagaaaaagaacggctgagccgggagagcggggaaggaaggttcgggccgcaggcccggcggcggagccgccgaagcggaccggaggtccggcgggcggcctgcggcccgaataccggccccttgcagggagtttaagagggcgtaccgcagaggcccggacatcggacatcagcgatttgcaggaatttgaaagagccaggtgatgtatggcccagagaataaggaggagcgaaatgaagaagatcatgctggtgctgctggcgggactgctggtgatgggtctggcggcctgccaggagaaagaaccgccggtttccggcggggacttgactgatgagcccggcaaggtacgcatttttaatgagggaggggaccaggtccattcttccggggcacgatatgtgcgggtcgatggggagctgtataccgataccggggagatcatcactttggcacgctgtggggtgatggatggcgagatcaccaagacggtggcggagaccgagctgccgggggaggacgactgctccaactttggaacaggataccaataccaaattgccggtgtgtacagtattgatgtggtgatcgacggagactggtgccgcttccaacgggaggtgccgagctgcagttatgcggaggaggcttcggcactggggctggcgatggcggctgacccgacggcagccactatccaaaccgagggatttatctgcaccggagaagaagctgcccccgatgtggaaacggcgatccagctggcgtggacggaatgtgaggactatgatgtagcggatgcggcctatgacgctacggcaggaatgtggcggatccatatgaccggagagggcaaggacgccacggtatggataaatacagacggtatcacacaaatgattgtatacggaacggcgaatatgtgcggctatcctcgcgcggaagcataagactgaaagtggaatatttgatctggtaaaatctcatttcagtacggactgtatataaaattaggataatacaatatggtgatataatgaagggaaaagaacttttgacattggcggtggcgctggtgctggcgttagcactgactggctgcgcgcccaaggacgccggggtggcgattttgacgggactggataaaaaggaactggcccagggcgacctgccctgccgcagctactacgagggggagaccctgatggtgccgctgtgtgaagtagcccgagcgctggggtattccgccgaatgggacagcgcgaaccaaaccgccattattgatgatgagtatatccaaaaggcgacgctgactgcggggagcaagacgaccctttttgagggacatttgcaggtcatcaatatgagccgggaggtggagctggcggaggctttgacggtgcaggaggggaccccttatgtgccggcggagtttttcacagaattcctgaacgaggtggaatacggcgagggaattgtgaccattgcccccagtgtggtaggcctggatgatatcggggactttttagcaggcctgcattgaccgtaaatggaaccgagctgacgaaagaaaaaggaggagcggacatgaagaaaacagcgacgatctcggcaattttagcggttgtaggatttatggcggtgtatgtggcgctgtgctacttggtaccgggctggcggctgaagctgcacgccacggcctgggtgtactttacggcaagtctgcggcacatggcactgctgaaaggcgtttttgccatggcggcggggctggtactggcgacgctcccgttcctggggatgctgcgtgagccgttgccggaggaataaaaccgaaaaagcaggagggcagtcccggtggtgggggctgcccttttgattttgcagaggcggtgcagggggaggggcggccgcaggcccgatggcggagccatcgggcctgcggccgtaagctgcgccttgcagggggtaaaaaagaagagcagcccccgtagggactgctgtttggctgtattttggtgtgggggccgaaatatcatggggtgaatgctgacccttttggggtggtgaggacggcctttagggcttcgaaggtgcattccggcaggtggatggcgtgggaggcatcgggtaaaagtgcctctgtgcggtgggcatcgctgcaggtgaggatgtgatatttttcagggtaggaggcatttctgccgccgatgaaaaacttttccgggtcggcgatctcaacggtgtggaagccgagatgatccgggacttcgcccaaagcggcaaggacgctcatgctgtcgcggtcgatgtgggcagggtagcaaaagccgccgtaccgggcagccagggcaggggcgtcatcgatggagaggaaggtggcattggagaggagcttttccaggcggccgagttcgttatcctcggcatccatgaggagctgggcaccgaagatctcttcccggttggagatggggggcagggcggcgtagatctcctcgccagcggcttcggccgcttccgcagtgggaaaaaggcagaccatatgcagctcctcggcgcaggtgagttcgataccggggataaccagcaggccgggggccaatgcagcggcagcctgctgcacggcctggacattgccggcggtattgtggtcgcagatggcgatgatatccaacccggccaacgccgaaagccctgccacggtggcaggggtcatgtcgttttccccacagggggaaaggcaggtatggatgtgcaggtcgtagtaaaagggggtgagttccgcggcggccatctccttatccttataatgggtgcggggcagggaacgcggcgcagccgggccggccgaaggccggccgcccgcgggggcggagcccaaaggctagatcggaaga

SEQ ID NO: 3636 - DNA, 5224 bp, Unknown
  16S sequences of unknown bacteria
acgggattctatcactcccgtcctttgtaagaagggcgggagtatttttatgcaaaaatatgtggaaagcttctgtccgagtcacatatttctatggagaaaaaaggagaacaaagatgcaggtttatgacgaactggtagcccggggactgatcgcccaggtaacaaacgaagatgagatcagagagatggtaaataacggaaaggcagtattttatattggatttgacccgactgctgacagccttcatgtaggacatttcatggcactgtgtctgatgaagagactgcagatggcaggcaacaaaccgatcgccctgatcggcggcggtactgctatgatcggagacccgtcaggtcgtacggatatgcgtcaaatgatgacgaaagagactattcagcacaactgcgactgcttcaaaaagcagatgagcaaattcatcgacttctcagatggtagagcaatcatggtaaataacgcggactggctgcttccgttgaattacattgagatgctcagagacgttggagcacactttagcgtgaaccgtatgctgaccgctgaatgttacaagaagagaatggagaaaggtttaagcttcctggagttcaactacatgatcatgcagagctacgacttctatatgctgtatcagaaatacggctgtaatatgcagtttggtggcgatgaccagtggtccaacatgctgggaggaactgagctgatcagaagaaagcttggaaaagatgcacatgccatgactatcacccttctgctgaactctgaaggaaacaagatgggtaagactgctaaaggcgctgtatggctggatccggaaaagacttccccgtacgagttctaccagtactggagaaatgtctctgatgcagatgtgctcaaatgcctgcgtatgctcacattccttccgctggagcagatcgatgagatggataagtgggaaggaagtcagctgaacgaagcaaaagagatcctggcatatgagctgaccaagctggttcacagtgaggaagaagcaaagaaagcgcaggaaagtgcacgtgcactgttcggagcaggtgcaggcgacggatctgacgcaccggttgcagagctttccgaagaggatttcaaagacggacaggtagatatcctgaccatcgtgcataaagctggtctggcagcatcacgttctgaggcaagaagaaatgtacagcagggcggcgtgactgttgatggagagaaagtaaccgatattgctgcagcttataccagggagcagttacagacaggtcttcttgtaaaacgtggaaagaagaactttaagaaagtgatcgtgaaataaacatggcaagacaggaaaaagcagggcaggcgcaagtctgccctcttgctaaaaaatgcggtggctgtgattatcagggaatcgcatacgaagagcagttaaagaaaaaagaacagacggtgaaaaaactcatgaagggtatgggtgagatcctgccgatcattggtgcagaagatccctattgttatcgtaataaagttcatgcagtattttccagaagacgaaatggtgagatcgtctccggtatttatcaggagggaactcataaggtggttccggtggaaacctgtcagattgaggatcagaaggcagatgccatcatcggaacgatccggggacttctgaagtcattcaagatcaaggtctatgatgaggatacggattatggtctgcttcgtcatgtgctgatccgtaccggtgcgaagaccggtcagatcatggtggtgctggtgacccgttctccgatcttcccgtctaaaaataattttgtcaaagcactacgggcagtccacccggagatcagtacggtagtcttgaatgtaaatgaacgcaagaccagtatggtactgggggcaagaaatattaccttatatggaaaaggatatatagaggatgagctgtgcggatgccggttccgaatctcgccaacatccttttatcagattaatccagcgcagacagaaaagctctataagacagccatgatgctggcgcgcctgaataagagaaatgtggtggtggatgcttactgtggaatcggaaccattggtatggtagcggcaaagactgtaaaagaagtgatcggtgtggaacttaatggcgaagcagtacgggatgcaaaagtgaatgcgcatcttaacaatatgaataatattcgctttgtagaaggagatgccggtgtctttctggaaggtatggctgaccgggaagagactgtagatgtggtcttcatggatccgccgagaagtggaagcagtgaagcatttttgcagtctctgcttgtgatccgcccgaagaagatcgtctatatttcctgcgagccacagacgcaggcaagagacttgcaggctttgaaaaaagattataaaatagaagcgattcagccagtggacatgttccctatgaccgagaagatcgagaccgtggtactgctgacgagaaaagagtagcacagaataaggggtgtaaaaatggataaaacatacaggatcctggtgatcaatccgggatctacatcgacgaagctttccatgtttgaaaatgagacatgtttatttacggaagatgtttttcatgattcatcggtattgaagcaatttccgaccatcaatgaccagttggactatcgcatggaagtagttgataaatttctgaaagatggaaatattgacctgaccggagtggatgccatcgttggaagaggcggtggatgctattccgtggaaggcggtatctacaagattgacgaccgtctgatccaggataccaaggctgcaaagggtggactttatcattcttccatgctgggcgtgcagatggcagatgtccttcataaaaaatacggcggcatcatgatcatgatgaatccgcctattgtagatgaactttgtgatctggcccgtgtgaccggagtagacggcgtttatcgtcgtgcagtctgccatgcattgaatctgaaagagacagccagaagacatgccatcagccttggaaagaaatacgaagattgcaattttattgtctgccatattgacggtggaatctctatcactgctcacaaaaagggaaaaatgatcgatggaaatgatgcaggcggtggagagggaccatttaccccaacccgaatgggaaccatggcggtgacagatattacccgttatttctgggataagacaccggcggagatgaaatctctctgcagccagaccggagggttaagcagctattttggaacatccaactctgataccattcacaagatggtggaagaaggagacaaaaaggctacccgtgtctggaatgccatgatctatcaggtgatcaaatatattggttctatgagtacagtactgcagggaaaagtagacggaatcgtgctgaccggtggattgcttcgcttcccagaagtagaagaaaagattcgcgagagctgtggctggatcgcaccggtgacttcctatccaggtgaatttgagcaggaagccatggcatttggtgcgctccgggtacttcgtggagaagaggaagcgaagatttatccaggcaaaccagtgtgggatggatttaaggattgaaaaagagaatcgtattctcgctttgaattgctgagggtacgttgatgttctcttttgatcagctggcagagttgtttaccagactcttcacatgttcgatgaaactttcagcagtacgtgacagctgatgatttttattccagatcaatgcgtaggaagccatggcgtccggatgatcgatcctgcggatacaggaaccggcattttgtgccatattggaaatagaagccggatagatggcaacaccaactccacatcgacttaattcacaggcgttcatcatatgggcaatacgacctcgtatgacgggcgtctttcctgtttcaataaaccatttatcgatctcacttttccgggattcacgggagggaatcagaagctcataaggaatgagctcttctggtgcaagcggttcgtccttatggagagctaagggatgatcttccggaaatacagcaacccatggttcctgaaagacggggagaacttcgtagccttctttgttataaggagcagtgatcatggccacttcacacagtcccttggagactctggcatgtacatcatcggtattgccgttccacagattgtactgcacatgaggatgcttcttctggaaagaggagatccactgggcaaagagccggggaccacagccctccacggaagcgatataaagtgtgccttgcagcccctccttcacttcgcgaacttcttcagaagagcggctgaccagatcaagaatctgattggcatactgaagaaacagttcgccttcttttgtaagggtgatcttatgggggcttcgcataaacagctttgtatcaagctcctgttccagatcctgaatctgacgacttagaggcggctgagcaatgttgagcttttctgcagctctggtaaagctcttctcttctgcaactgctttaaaatagcggatatggcgtaattccatagcgtggctcctttacgaataatacctgaaaagtattgatatattttcattatatataccatgaaaatgaaatgcaagagatgggtttttacagcgtgtgaacaatatatgaataatttgtaaaaaagtttgaaaaagttgttgacatttatgctcgagaatggtattatagtcgagctggctgcgagaacagctggtaacacacagacagtcaatcacataacaacaaacagctttgaaaaaagttaaaaaagttgttgacaagatacgacagagtgtgataagatatcagagttgctgctgaggcaacgagatagaacatgaaccttgataattaaatagtgctttgaaaatcttcgaaaattcttttgaaaatttttaaacgaacagctttaacttatataagtcaaagcaacctagaaacagtaacggatagaacagccaagtgttgttctgaacggaacaaactttaatcgagagtttgatcctggctcaggatgaacgctggcggcgtgcttaacacatgcaagtcgaacgaagcactttgatcgatttcttcggattgaaattttagtgactgagtggcggacgggtgagtaacgcgtgggtaacctgcctcacacagggggata

SEQ ID NO: 3637 - DNA, 32759 bp, Unknown
  16S sequences of unknown bacteria
ccctttacatcgtataaagttataacaaggcagaaaagggaaaattgacgaaaaaaaacagtcctcgaaagagggctgtttttgctttcggggaaggtaaagagtatcctctgtctccaaccgccggacatatttgcacatcaatgtcaatataaaatatgcaaaaattgcacatttacattttttacaatatgcaaaatttgcacatttgcgttttctgctatatgcaaaaatgtatgttcccgctttgtattatgcgtgggaacgcccgacgaatacatctgtcgcaatccgcgcctcaaccgaaaatcgcgaatttaccgtccctcgtgcttttgcctgtactcgccgggtgtgatgcccgcgaattttttgaacgcgcgcgtgaagtggctctgcgaggaaaagccgagatacgaggaaattgcggagagggatttatctgtgtaccgaagaaggcgtttcgcctcttctgttttctctttttgtatataatcggaaagcgttattcccgcctgcctgtgaaattccgcggataggtgagtgcggctgatatacatttcttttgcgaccgtctcaacggacatcggttcgcagatatggcgtcggacgcttgcggcaacgtcggagacgagtttagaccgactgccgtttacgcgcactttttcgacgcgctgcgtgtaatccgctatcatgtgaaattgcaggtttgagatctgctccgagccgtttgtcagttcgcacctctgaatgtatctgtcgctgagcaaaagcgcctcttccgggtcaagtccgcctcttattgccgcgcgggaggcaagcgtgacggagacgatgaacatatttcgcagttggcgaagcgtgtcgaatgccacagttcccccgcgtatgggcggtgccgaacgaatccatgcgttcagcgcttccgtgtcgccttttcccacaatgctcatcagcgcgttttcgagagagaccgtgttgtgcaggtctgttttttcgtattcgccgcgcggctcttcatctcttgtcatttgcgccgtaatgctttcctgcgttttgtcgtatatcgaaatgtcggacagcgaaagcttttcgccgttcagcagataattcatcacgcattgtatctgcataacgctttcgggcggcatctggattatgcctttcattccgagcagaaaatcatccgtgtcctctgcgggaacgtccgcgagaaacgcaagttcgcgcagctccgcgtccgtggcgcgtacacggcttgtggggcccataactatccgcttttcgccgtaacggacgaccccgtaataggcaaactgcggcgtgacgtaatatcccacattctttttaatggaaaaaatctcttccttatatatattcatcgggtctttcggcaacgccgagacagataaaaaaaacgtctgcttttcaccgtcgaaaacacggacgggcaaccccgaaagccctgcgattatgccgcaaacatattcaatatcgtctgctttcatcttttacaacccctttcaatacaattatatcatattcaatacaaatatgcaatacacattgtgcctttattttgtataatatacttgcaaagacaaattgaccttttgatattacttattttgaggatttttatgaaaaaagacgaaagttttaaaaacctgacgcttgccgaaaaggcgcggctcgttcagggcacggattttatgtatacctgtccggtggagcggctcggcatacctcccgttgccatggcggacggtcctcacggactgcgcaagcagataggcagcggcgataacggcgtttcttcttccgaacccgcgacggcgttcccgaccgccgcggcggttgcctgttcgtgggatcccgaaaacgcgcacagaatgggtgccgcgataggcgaggagtgccgctgctacggcgttcatacgctgctcggtcccggcgtcaacataaagcgcaacccgctttgcggcagaaactttgagtattacagcgaagaccctttgcttgcgggcaaaatgggcgctgcgttctgccgcggcgtgggagaaaacggcgtgaccgcctgcgtgaagcattttgcgctgaacaatcaggagaacgcccgtttttacggcaacagcgttgttgacgaacgcactgtcagggaactttatctgcgcccgtttgaactgactgtccgcgagggcgagcctcatgccgtgatgacgtcgtataaccgtatcaacggcgttttttcgtccgaaaacaagcgtcttataactgatattctgcgcggcgagtggggctttgacggaattgttatgagcgactggggcggcactttcgaccgctgcgcggggctgtgcgcaggcgaagacctcgaaatgccgggcgacacggctgtcagtataaagaaggtctgcgacgccgttgccgacggttcgcttgacgaaaaagacctcgaccgctgtgttgaacggctgattgcttttgcagacaggtttgcgaccgttccgaaaaccggttcttttgacattgacggacacgcgaaccttgccgccgagatcgccgcagacagcgcggttttactgaaaaacgacggtattctgccgtttgacccgaagaaaaaaatatgcgttatcggcgacctttttgcaaaaatgcgctatcagggctcgggcagttccatgataaacccgacaaagaaggtttctcactccgatgcgtttgccgtccgcggcatagaatatgctttcgcgcgcggatacagcgcggacgcgtcgccctgcgaaacagatcttacggcagaggccgtcgcgcttgccgcagaatacgatgagattctgctgtttctcggtcttacagaccttgccgagagcgagggcggggacagggaagatatgcgcctgcccgccgaccagctgcgtcttgtttcggcgctgctaccgctgaaaaagaggattgccgtcgttcttttcggcggctctcccgttgaactgccttttgcggacagcgtgaacgccgttctgaatatgtacctcggcggtcaatgctgcggtgaggcgtgcgcaaggctgttgttcggcgagacctgcccgtccggcaaacttgcggaaacgtggtttgaaacgtattcgcagctgccttacggcgcggaatactcgaaaaccgaaaacgaactttacaaagaaagcgtttttgtcggctaccgatatacggcaagcgccgatgcaaaaccacgttatccgttcggattcgggctttcgtataccgaattttcatattacgaccccgaagttttcagtgaaaacggcaaagttttcgcgagcgttacggttacgaacgtcggcgcttgcagaggtgccgaagttgtgcaggtatatgtcgcaaacccgtcggattccgccgttttccgcccgaaaaaggaactgcgtgcgtttgaaaaagtttggctcgcccccgccgaaagccgatgcgtaacgctctcttttgatgaaaaagacctgtcgttttttgatgtgtcccaaaaccgttttgtgcttgaaaacggagaatacgaggttcagatatcgtcttcttccgaagatcccgttttttgcgaaaaacttacggtttcttccggtgagaaagtcgcttgcccgtattccgccgaggtcaatgaggcgatgaaagacggcaaacggattgacaacaaaatatttgaagagctgctcggcgcgccgctcccgaaacacgtcccgaaacttccgctgacgctcgaaagtcctttttcggatttccaaaaaacgtttatgggaagaatactgtacaacgccgtcacctcgacctcgaaaaaacaactcaaagcggcaaaaaaacttcccgagggtgcggaacgcgaaaaccgcataaaaggcgcggtattcttaaagcgcatttttgacacgaactgtatgcgcacgctttcaatgtccgcgggaagatcatttcctttcaatatcgcggagggctttgtcgaactcggaaacgggcatgtcattcgtgggataaaagcaatgaaaaaatcgtataaaatcaaagaaaaaggagcaaaaaccaaatgaaaaacggaatgttgtcttcacgcttttttgattcgaaggttcgttcgcgaaatgtcggaacaaaagaaaaatggctcggctatctgctcggaccttgcggtgctctgctgctgaatgccgttttggcaacatatttgaacgtatattacaccgatgttctcaaactcacgggcgtatggggcggcgcgttccttgtcattttccccatcgtttccaaaataatagacgcaataacaaacgttgcaatgggttacataatcgaccgcacgcgcaccaagcagggcaaagcccgtccgtggctgctgctttcggcgccgctcgttgcgataacaggcattctgcttttcaccgttccgcaggcaagcgagactgttcaggtcgtttgggtcatgctctcctacaacctgttctattcgctggcgtatacgatttacaatatgtcccacaaccttatggttccgctgtccacccgcaacaccgttcagcgcggttcgctttccgttttcaatcagatttcgaccattatgatgagcggcataatcgtcgcgctcgtttttccgatggttgttatgcccgttatcggcacggacaaacgcctttggatagccgttatgggtacgctttcaatccttgctcttccgctgacgctccttgagtattacttcaccaaagagcgcgtaactctcgaaaccgagggcataaaagagaagaaaataccgttttcattgcaactcaaagcggttttcacggataaatatctggttataatttttgcgtatttccttatatataccgtcgggacgtgcatgaaaaacagcgcgctcgtttattactgcaactacgttctcggaacgtacaacgacggcgtaacgcaaatgctcgtttccgttatcggcggcataccgatgggtataggcatttttgccgtatggccgcttgccaagaagttcggcaagcgcaacgtcacctttttcggctttgtgctttacgctctcggttcgcttatctgctgggctgctcccaccaatatggttgtcgttcttatcggacagttcataaaaaatatcggcggtctgccgtgcgcttatgtgtttatggcgctttttgcagacgttctcgaccactccgaatggcgcagcggcttccgttcggacggacttgcgatgtctgtttacagcattatcgccgttgccattctcggaatctgcacgggtattttcaacggcgttatctccgccgcaggctatgtcccgccgcttgaagccacctccgccacgctttccgataccatggcatccgttgccgcaaacggatacacgacgcagctttccgtagatgcgatagcctcgggtgtcgcaaatctcggcgcgaaccgcgtatttacgataggcatcgttcaaaacgccgccacctcgtccgccataacgttcttctttgtcgggcttgaagttataacaggcatagcgttggcgctcatgctctcggcattgaacgttgaaaaaacggtgggcttaaaacagaacgttatcagacaaagacagcgtgccgccgccgaagcccgcggtgaaaaatgggtctcctcagatgaaaaagaagaggcggaacaaaaggcgctcgccgccgaagcccgcgccgtataccttgccgaactcgaaaagaaatgcggggagaaaggcatggactttgaggcagccaaagccgaatatattaaaaagtgcgacgaaaaagacgcaaaacaggcagtcgacaaagctgcgaaagccgaaaaagaacttgcgaaagaaaataaaattgccgaaaaagaggctctccgtcgttcccgcatgaccgaagcgcaaagaaagaaagcggacgaaaaagccgcgaaaaaagcggctgcgcttgccgaactctggcaaaaagagcaggcaaaagcaaaaccgttttatgagaaaatgcaaaaagcgctcggagaagataatatatgaaagcatttgaattgaaaaccgaatatcttgtcaaccctctcggactggcaacccgttccccgcgcctttattggaaatgcgaagacggcgtaaaacagaccgcttacgaacttgaatataccgtaaacgacaaaccttttccgtccgtgacggtcaagacctcttcgacaacgcatatttcgtttccgcaaacgctcgcttcccgcgaccgcgttctgtggagagtgcgtctgcgcgacgaaaacggtgtctggggcgaatattccgacaccgcatcatttgagatgtcgctgcttgaccctgccgacttttccgcggaatggataagcggagattattgcgtgaacaaaagaaaacgctatcccgtggattgcttccgcaagacttttgaagcggaaaacgttgtccgtgcccgcctttacgcaaccgcctgcggactttttgaggcaaagataaacggcaatcgtgtcggcgattttgttctcgcgccggggcataccgattacctcaaacgtgtccgtctgctgacttttgacgttacccctctactgaaaaacggcgaaaacgaaataaccgccgaacttgcggacgggtggtaccggggttcctgcggcgcatggggtctgcgcaatcagtacggcagcagaacaaaacttttaatgcaactcgaactgttttttgccgacggctcttcaaaaaccgttatgacggacggctcttggcaatggtcaaacgacggctctcggcgctttgcggacaacaaggacggagagcgtgtcgatgcccgtatgaacccgacgtattcgggtcacgccgtgccgacttctcattccgtttttccgaccccgacagacaacgtatatctcgttgaaaaagagagattcaaacccactcttatcaagaccccgtcaggaaagaccgttcttgatttcggcaaaaacatcgcaggttatatcgcgttttcgctttccgcaaaagcgggcgaaaagatatttctccgcttcggcgaaatgtttgacaaaaacggggagtttacacagataaacattcaatgcgcaaacaaaaagcgcacaagggtaacgccgcttcaacaggtggaatatatctgccgtgacggaaaaaacgactacaaaacaaagtttgcgattttcggctttcagtacgtccttgtcgaaacggacatcccgttttccgccgatgatttcgaagccgtcgccgtgtattcggatatgaagccgaccgccgagttctcatgctcaaacgaccttgtaaaccgctttgtcgcctgcacgctgctttctgcaaagaacaaccacgccgatgttccgacggactgcccgacccgcgaacgccacggctggacgggcgacgcgcagattttcgcggatacggcgtcctacttctttgaatacgcgccgtttgcccgcaaatatatcctcgatatgcttgacggacagcgccgcaacggcaaattccgtcagataaccccccgcggcggcatagaccgctatatgaacgcgatggacggctctgcgggttggtcggacgcgggcgtactgataccttacagaatatggaagcggtacggcgacgaatccgttatacgggataattacgccgcgatgaaaaaatatgttgattacaaaataaaaacgctcggcagattctatccgaccgcgcgcccgacgggtatcgaccgccgacagaaaaagaacatctcgaattacggtcaatcttacggcgaatgggctgaacccgccgacgttcaccccattgtttggcaggacttcgtttctcctcatcccgaagaaactacggcgtatatcgcctatgtttgccggctgatgagcgagatcgccgaagttctcgaaaagtccgacgattcaaaacgcttcgcggcaatcgcggaccgcgtaaaactcggctacacggctctccgcaaaaccgaaaaatttacgcttgacacttcccgtcaggcaagtctcgtgcgcccgctttactttgatctgcttgcacccgaacagaccgaattcgcgaaaaaacgcctcgtaaaagcacttgacgaatacggttggcggttaggcacgggctttctttcgaccccgcttattctttacgttcttcaggatatttcacccgaatacgcttaccgtctgcttgaaaacgaacagatgccagggtggctgtttatgcccaaaatgggcgcgaccaccgtttgggaagcgtgggaggggacggaaaccgagaacggcggcatagcctctcttgaccactactcgaaaggtgccgtatgcgaatggatattctcccgtatgtgcggcatcaatgtctccggcgagaaccgctttgagataacgccctgcgtcggcggcagcataacgttcgcttcttttgcttacgacagcctctacggcaaggtctcctgcgcgtggaaacgcgacggcggcaaggttacgtttgaagtctgcgttcctcccaacacttccgcgcgtttttgcgcctgcggcatcgacagagaactttcggtcggcgtgaatgtgattgagtccgaaatatgctgaccgaaaacctcggctttttgaaatagggaacttttcgcccgtttttagacggaaaagttccccataaatgcgataactgctgggtttttgtttttgcacgatgttcatgtcgaagaaaaaccgccgatactccttttcggaaacatttttgtaagtgtttcccgtcaccgtttcgccaaaatcgaaatgattgtaaaatagcgaaagaattatcttcaaactttataaaacagacacgatgtttacactgtgtctgttttatttatttacaactacgcgcgtttatactataatatctttgattattataggggtattgcgccctgttgcaaaccgtgtatactgaacgggagcgcagccgaaaatgtaaaagagtttttccgctttgtctgaaccgaggcggtgcaaagaccttttcaaggagaatttatgagcaaaaatgcagtcgatctgcgcggcaggcgagaggttttctgggacgattttatgatcgagcccgaccgcacgaacgccgaactgcgcttacacaagcccgtcaaaaaagagcgtgtgctcctgcttgacaaaccgtgggagggcgacgggtgcgattattacaacatttttaaggacgaagacgagaacggcgttctttacagaatgtactatctcggttggacgatgataaagcctgacggcacgcacaacggctcggacatcaaagtctgctatgccgaaagctgcgacggtatcaaatgggagcgccccgacctcggtatatgcaaattcggcagatacagaaaaaacaacatcattctggatcagaaaacggatatttacgataatttctttgcattcaaggatacaaacccgaactgcaagcccgacgaaaaatacaagggcgttgccgagtgcggcagagacggaactctttgggggtacgtttcgaccgacgcaaagcattggactcgcaaggctcttttgacaaagcagggcaagttcgactccctcaacgtatgccattgggataaatacagcggcaaataccgttgttatatccgcgattttcacgacaacgaggaaacggacgaatatgctatccgcgatgtccgcgtgataacttccgacgatttctggaactggtctgagccgacgatgatagatttcggcgaacaggcggactatcctctttacacaaacaatgtcggaccgtattaccgcgcggatcacattctgacgggatttccgacaagatacgttcagcgttacggctggtcgaagaattttgacagactttgcggacaggagcagagaaaacttcgctgcaacctcaccgagcgtctcggacttaccgtaaccgactgcgtgtttatgacaagccgcgacggcgttaagttccaccgatttgacgaggcgtggctgacccccggtcccgaaaacggaagcaactgggtatacggcgactgctatcccgcgttaggcatgatagagaccccgagcgaatacgagggcgcggcaaacgagatatcaatgtataattttgagggcaagtggacgggcaaaccgtcaaacctttacagatacacggttcgtctcgacggctttgcttcgtattacggcgcatatcccggcagaaatcttgttacccgtcctttcacgtttgacggcgacactttgaagatgaatttcgccacctccgcaagaggatttatgaaagtgaaagttctggacgagaactacgagcctttcgagggcttttggacgaccgagatattcggcgaccgcgttgacagcccgatagactttgaaaacggcaatatcgcagacctgaaaggcaaaacggtgcgccttgcgctcgaactctgcgacgcagatatatattcgtttataatcgaataataaacgggaggttaaaatgaagaaaaagataatccttttggctatatgccttttctccgtttttgcgttctttaccgcctgcaacggagataaagggcagacccaaacgggaacgccgaccggcgaaagagatttcggcggcagaaaattctattatcgcggcacgataataaccgcagacccgtccgacgacgaccccgatatagaccccggcacgcttccttatatggaaagccgcgaggacgaggtcctttacaaccagtgcctttatatcgaaaaagcctataactgcaagataatccgttccggattctccgaaaccacacagacctttgccacaatgtttgcggcgggtgacattgaagcggatatctgttccgcaacgttcggcgaactccgcgaatattacaaggcgggtatcctttgcaacatggaagagttcacgagccttgacgcttccgacgaggaaaaatggggcatcgaggcaaaacgtgacgcaacccgttacggcggcgtgctttacgctttccccgtaaaaggttcgatgtacactccgttcgtatccgtttacagcggcgcgcttatctataactacgaactttatgacgagttcaacataggcaccacgcccaaggaaatggttgaagcgggcgactggacgttcgacactttcctcaacgtcgttcagcgttgctccgacctcacggcgcaaagacctgtttacggtcttcaaagttcctgttcccttgaagcctccgcgattgatgccaacggttcaaacatcattataacaaagaacggcaagtatatctgcgggctcaacagcgaccctgcactcaacgcgcttgaatgggtcagaaaaatgtatcagacaggttgcgtcgttgtcagtggcaacgactttgataacggtacagccgtattcgcactcaaaacttccgaaaacgcgataaacaccaagtgttccaccgtccattgggttccgttcccgaccggtccggacgcgaccgacgccacaaagaacaccggcgcatatttcggttaccacgaaagaggcacttctatcttcaagcacggcaacgacagtcaaagagacgaagacgccgcttatattcttgacaaactgtttgccccgaccgaagaatggggcaagaccggttacgatgattatatggctcgtaatttctttgataccgttgacgactacaatgtttacaaaaacaccagcataaacatgagttaccagtacgctcttgaaatccttgccgacgaagaattcggcaaagagtatcagaacgttatcaacggtgcggttgcggcttctttcaccggttcgatcaagaaccaactttcctcgcttgttaccgcgatgaacgaacagatctgcaagccgatgaacgaggcaaaataagaggtattgaatatgaaaataatactttctccctcctatttcggagaaaaggaaaagacgcttttcgaacacggaaagatgagcctttccctgtttaaatattcaacgggtatctgcggtatgacgctcaaaaacgcgcgcggttacatcaccgtgcttccgttcaagggatttcaggtgtggcgcgcttgctttgacgaacacgaacttgttatgaaaacgctgttcgacgaaccgacgcagagcaccgaatactgcaaaacttacggcgcgtttcttatccattgcggtcttaccgcaataggcaatcccgatgttgccgcgggcgatacgcacccgcttcacgcggaactgcccaatatcggttacgacaaggcgtgggctgtctgcggcgaggacgaaaagggcagatatgtggaactctgcggctcctgccgttatgtgttcggttttgagacagggtatgagttccgcccgacttaccgcctttacgaaaacggaacgacgttcgacgtgcacaatgagatagaaaacctgcgcggctgccgccaggaatactcgtatatgtgccacatgaacttccgtcccgttgacggctcaaaactcgtttattccgcaaaaacagagaacatttatctgcacgaacttgttcccgatacgctgacggacgacgaacagaagaagttgaaagactggttcaaagtgctgaaaaaggacattcacgcgcacgatacgttgggcggcgagaaacagttctatcagcccgaggtcgtcttcaccgtcaagtatgaatcggacgaagagggcagagggcactgtatgcaggtgttccccgacggttatgcgggctatgtttcgcaccaccccgcacaactgccttacggcgttcgctggataagccgtttcccgaacgaagacgcggtcggtatgcttcttcccgcaacgggcgagcataacggacacgcggactgcgtaaagaaaggttatatccgctacatggaagcgggcgagaccgtgaagatagacttcacaacgggtcttctgacacccgacgaagcaaatgcgatgaaagataagatcgcaaaaatgataggttgagtttataataatacatattatataaaagatattcaaaggagaaaaacaccatgtccagagtttgtattcccgactacgaatacgttgaaagacgcaaaaaatgcgttgagatgatgaaagagcagaaccttgacgttatgatagtcaacggtaccgagtccgactatgccaacccgcgttacttctgcggcttctggccccttttcgaaagagtcggcgtagccattgccgccaacggcaacgctgccgttatggtaggtcccgaatccgtcatcttcgcaggcgacgtttcgagaatcaagaacatttatccctgcctttattacagagagggcgcaaacccgtcctatcccgaaatcaagacgaacacctacaacgacgttcttgaagacctcggcgttaaaggcaagcatatcagaataggtatcggcggctacatggagaccaccgttgttatgatggacggtcttaaagagtgctatcccgaagcagagataataaacgcagacaacatcatggtttcgcttcgtcagatcaaatccgaaaacgaaatcgcctgcatccgcgaaggtttcagaatcgcgcagatcgcaacagatgaagttgtaaaagctcttcgtccgggcgttaccgagcttcaaatggtcggtatcgcacagaaagcggtttacgagaacggcgcggaatacgaaggtcttccgatgtatgtattcagcgaaaagagcacttctcacgctatttccagaccttcttacagagttataaacaagggcgacatcgttcagctcaacctttccgcaaaagttgacggttattctcccgcaataggcattcccgtaggcatgggcaaatattctcccgagaagaaagaccttgttgacttctgtcttgaagcgcacaagtggacagaaaaacaactcaaagcgggcgttcttgcttccgacgttgcaaagggcttccttaaattcttcgaggataacggcagaagagaaaactacgtttacggtccttgccacggaaccggtatcatcgaagttgaagcgccctggatggagaccacttccaactacctgcttcaaccgaacatgaccttccagatagacaccttcgtttccggcccgactttcggtcttcgttgggaaaagggtatcgtaataaccgaaaacggctttgagtccaactgtgacgaactcaaatatatcgaacttgatttctgatttgaggagatgtttgttttatgagacttgaatatatgatgaccgccgacgtgcaggaagcaaaagaaaaaaatcttcccgttatcctgccgataggcaccattgagtggcacggacctcactgtgcgctcggctgcgacacgatgatctgccagggctttgccgataaaattgcggagagcaaagaatgcgttgtttgcccgcccgtttggtacggcgttgcgtcttatgcggtaggcggccccgaaaacggaaccgttaccatcgacgtcgatgtttacgagaactacatttacggtattcttaaatcaatgctttacggcggattcaagaacatctatatgctcattcatcaccagttcgaggacgaaaactatatgcccatgactctcgcctgcgcaaaagcggcgaagaaactcatcatggagtatatggaggacaccatgggcaaaggctggtggggttccaacagcttctcttcttactacgacaacctcggcacggattccgacttcccgttcggcatgataaaggtttattcctgtatgtccaccgccgcacagcacgccacgggctacgaccatgcaggcaagtatgagtccagcctgctcaaagcgttctatcccgatgcggtcaaactcgaaagacttccgcagtccgacgcttggttcattcagagcgcgtatgaagcgtccgccgaactcggtcagaagatgatcgaagtttccatggtagacctgctcaaacgcatcaagtaatcgtctgtaacgatatgataaagaacattgcccgacatagtctttttgtcgggcaatgggaattatataatacgagggagacaatattatgaaaacatgtcctaattgcaacgtacaacttgacgacgctgccacattttgcgccaactgcggcgcgcgcatttccgaatccgctcaggcacagccgcagtatacccaaaacaccgccgttcctccgcagggcgacccctacgaccacaccgcagagttcgacccgcgggatatttctgacaacaaggtttttgccatgctcggttatcttctcggcacggtaggcataatcatcgcgcttttggcaagccgcaagtcgcctttcaccatgttccatgtcagacaggcactcaaattcacggttgtcaatattctcatgcttgtatgcgtagtgcttcttttctggacgataatcgttcctgttgcatacggcgttatgagttgtatatttcttgttctcagagttatctgcttcttccagatctgctcgggcaaagccaaagagcctgcgataatccgcagcctcggcttccttaaataatcacggacagagtatatacataaataaaaagcgcacggggctgtaaaaacgcaggtttttacagccccgtgcggcattgtttgcgcgtccggatatgctcggcatacgaccgtgtttttattgttttatatcggtcgggtcaaagtctatatatccgtcaaaattattgaattccgcggaaaggtctttcatgctcggaaaaatttcggaactgtccgtggacatcagcgcaaaattctttcctacgaattggtatatgtaatatacgttttcagaattcggaaatccgtatattatcactcttgtctgcgtcaacaggtcgatatagcatttgagcacattgcccgacggaagcggtgctttttttatgatatattctccgtattgtacctttttgtgcctgatgtaagtgttgtcttttccggctttgcccgcaaaaacaaacgttattatcaacaatgcgacttccgcaatcgcaaaacagatcataaacattttgtcggtcggtgtaaaatccttgatgtcccgccctccggtcagaatcacgaggagcgctatcaatgcgaacatggcaacaagcccgccgaccgtgaacgccaagtttttgtttatcctcttcgttgtctgcataatttcgtgtccgacttcatttatcgttttgtcgtccgtgatttctttttcggtttccgtttttattctgtcgcatatttcaatactgttggcaagtccgaatatcgtataatttttcccgtttttcatgcgcaaagccagcgtcgttgccgaacagttgcaaaaagcgatttcggaatatgcgcactttattttcgaaccccacaaaaaacgtgcgtccatgccgtgttcgtcaagatgcaggtaagcgtttctgttcagcaaaaaagacgtaagcccatacaaaaacagtatcaaaccgacagacccgtatattattgccgtaataagtaatttttctccccgcatattttcaaaaaagtacccgtatgctattcttgcgggcgcgccgaccgctccgagcagcatttcaattatgttaagcacttttacgggggtgcctttcttaaaaatcccgtccattttctcttcattccttttttcggttcttgaaacgattatatcatatcggcggcgaggtgtcaactctcacctcaaaaaaaactgccgaggcatttgccccgacagttctgtttttttattcggtattatcagatatttatcatgtttgccatctcgtatttcttgaagtcgaacggtttttccattttgagcgcttcaagaatgtcgaggtcgataatatcggtttctttcataacaacaactctgttgctgattccgtttttaagcaagtttacgcagtagttgcccatttcggttgcgataactctgtcttttgcggagggagcgccgccgcgctgaacgtgaccgagtattgcttctctggactcaacgccggtctctttctcaacgcgttttgcaaagtcagcgatgttggcaatgccgttgtcaacgcagtatttgtagtttttgttggacggaacgtcgaagaaaagaccctcggaaacaagcacgataaagtggtttttgccgtatctcttgcctcttgctattctgtcaacgatgtctctctggaaatcgaactcaacttcgggcacgatgatggacgttgcgcccgccgcgatacccgcttcaagcgtgacccaacccgcatttttgcccattatctgaacaacggagcagcggttgtgggagttgcaggtgtctctgagtttgtcgataaggtcgatgcagatgttgactgccgtgtcaaagcctatcgtgtagtcgctgcaaacgatgtcgttatctatcgtgccgggcatcgcaacgcagggaatgccgtgcagggtaaggtcgcgtgcgcctctgaacgagccgtcgccgccgataacaacaataccctcaatgccgaactctttgcaggtgtgaaccgcttcctgaattttttcctcggtcttgaattcgggacaacgcgcacttctcaaaaacgtgccgcctctgccgagaatgtcgcagacatctcttgcggtgagttcctgaatattgccctcgataagtcccttgtatccctcacggatacccataacggttatgttctcggcaacacaggttctgacaacggctctgacagccgcgttcatgccctgagcgtcgcctccgctcgtcaatacgccgatggttttcatgattttatcattcctttcagatataccgaaataatctaacggttattatacaccaaaaaaagtaaaaaatcaatatgtttcataaaaaactcatattttgagccgctccgtcacggttcgcatttttccgcggtttttgcgcgttgttgaccgcataaattttagatttctttgcctaaattaacattgacctttcgggctgtaagtgctaaaatagtttttagtaaaaaacatgagttattatgctgttttgaggaggtgaagccccgtgttcggttatattgttgccgatatgaaaaacctgacggaagaagagaaaaaacgctataacgcttattattgcgggctttgccacgcgctcaaaaaaacaaacggcaacctcggcagacttacgctgacttacgacttcacgtttatcggtatattgctctgcgaactttacggcgagggcgagacctgccgcggcaaatgcgcgccgcacccgtgcaaaacgcatgattatgtcaaaagcgacattctcgattacgttgcggacatgaacgttctgctttcgtatgccaatatgcttgacgattgggacgatgacggcaatcttcttgcgctgtttgcaagcggtttttacaagcccaaaatgaaacatatcagccgccgtttcccaaaacaggaaaccgtggttttcgaatgcctttcgcttctttccgaagccgaacgcgcggggcagacgaatcccgacattcccgccgccgctttcggacggctgttgggcactcttctgagttaccgcaatgacaaatacgaaaaagtgctttacgatttcggctttgcgctcggcaaatacatctatttgcaggacgcttgcgtcgatttcagaaaagacctgaaaaaagagcgttacaatccgcttaccgaggcgcgagaagaggactttgacgatatattgaatatgctggcgtccgatgtcgccgccgcattcgaaaaaatcgagcgcgtcaaggataattcgcttatcagaaacataatatattcgggaatacgtctgcgttacgcagagtcgaaaaaagaaaaggggaaaaaggcggaatgaacagattcagaaattggcttgtccgttttatgagcggcagatacggcacggactcgctcggaaagtttacgatgataacatacctcgtgcttgcgtttgctcaactttttcttgtgcgcacacccatgatgcgaggcatcggcgggtggatatggaacgccgttctccttcttctttttgcgtggtcggtctttcgtatgctttcacgcaacatcgttgcaagaagccgtgaaaaccgccgctttctttcaataaaaaacggatttaaaaagtttttctggctccgaaagcaaatgtggaaggacagaaaaacgcacgtttacaaaaaatgcccgcattgcaaaagcgttttgcgcctgccccgtcgtaaaggcgatcacggtgtgacctgcccgaaatgcaaaaaggtgttcagagtaaaaatataatcggaaaaatcggagatgaacggtcggcaatggtcctaaaacgcaatacgaacggcaggtcgagtatattctgcctccgaatatgagatgtttgcattctcctccgcacatctggctttgctccgttttcggcagaagaggaaaacgcccgtttttgtcctttgaattgtataaaaatttcaaacttttttcttgcattgctattgacaaatcgggattcttatagtataataagcataggtagatgggaagtgttttctctttctgctttttctgttatatgcaaaagccggaaaaaggaacggtcggactatgaaaaaaacgcttgttttaagggttgttttgatttttctgattgttgctttcgccgccgtcggtgtttttgccgcattcaagatttattcggcaaaacgcgaaaacgaaagacttgccgcagaaaaagaggcacaggcttatccgtataagacggttgaatataacggaaaaacgtatgattacaatgagggtgtttacaatcttctcgttctcggtatagacgccgagggtgagtatgaggaaggtgagtttttcgagacaggcggcaaagccgacgcgatattcattctttccataaacaactcaaagaaaaccgtctcaaccatacagttgaaccgcgacacggtaaccgaaattcaaaaacttggcgtattcggcgacccggtcacaacgcttaatgctcaacttgccacggcttatgcttacggcagcggcggcaaaagcagttgcgaaaatatgagccgtgccgtttcgggcttgctttacggcgtaccgatagacggttatctggcaatgaacatggaaggtatcattccatttgtcaatgcggtcggcggcgtaactgttacgcttaaagacgatttcacaaagtttgaccccgaaatggaagcgggcaagacgcttaccctcgacggtgcaaaagcgtatatatacctgcgcggcagaggcgatgtcggcgaccagctgaacacgtcccgcatggaacgtcaccgaacgttttattcggaacttttcaaacaggtcgataagttgctcggttcggacgtgtcaaaactcaaatccgtttacgatgccatctatccgtattcttacttttcaatcagtttgtccaaactgatgtcgctgtattccgattcttcggattaccgacgtgtccccacggtcacgcccgagggcgttatcaatgaggacgcggagtataccgaattttatgccgacgaaacggcacttcgaaaacttgttttcgatgtttggtatacggaacgccaaaacagtcaataaataaaaaaaatatatatcagtttttaaaggagtcttaatcatgagcaaaaaagtattgagaagcattgctctcataacaatgatcgttcttgctttctccgtttcggctgccgctatcggcttcaaaccgagtgttgacatcaagaagggtcccgactatgtaacgcccgacggattccagtatgaagtaatcatcactccgataggcgaagcagacaaacagaccgatgaaagagttcaggaaggtcttaaacatcttaaaaatgtttacgaagatctcaaagataagaacatcacggatctcgtagacaaagcagcccttgaaaaggcttccggcacaaaagccgagaacctcaaggtttccgatatgttcgacctttggaccagctctcccgaaacgatcgctcttaaattcaaggaaatcattgccgacggcgaaaaattcgcggctctttacagagactacaacggcaactggaagatccttaacgcaaccgtagacggcatcaacgttaatattgacggtcttacgaacggtaccgttgtattcctcaccgcagaaaagggatccagcacccccgataccggtgactacaccaattcctggatgtggattgctgttgcgggcgtagcggttgtaggcattgcggttctcgcggtttgcctcgttcgttccaagaaacaggaaaacaactgattgtaaataactgaaaagttatccaagcggaacggctttgccgttccgcttgtttttttgctgattgcttttttttgttttattctgctccctgataatgctgttaaatcaggcgtcgcacccgattatgccgtcagagaccgatattttcacggcgaaaaaatctttatggcgcaaacgctgttgcgggggaatgcttttttcccttatgtttgattgaatctcttttccattcgcggcagttcagtctcaaaatagtgatttttgtcgtaattcggttgacttgacggcagataagagttataataaatttatatacgggcaaatcgctctgcccgaaaaaacaaaaaggcacttcatttttccgtgccttcgggcgtaatcccatgcccgttttcgccgtatcggcggcaaggagttttcagctttgttcattaccatattttgtatattctttttaaccatgtttgctggaacatattggctttccggcaggtggcttatgcttgtcggcgtgccgtacaacacaaagcgttcccgcatagcgcgctccgttctcggtgttgccgttgtcgttctttgcggcatttggcgtgtcgttgttattgttgtcatgcacgtcatagcgttcgcgctgctgtgcgaaattgccgccgtcatagcccgtcggataagcaagcggttcaagggcaaaagggtctattcggtttgtcgcgtgatttatcgcagcgccgccgttccgttgcttttaaccgccgcgctcatgctttacggcacggtcaatatgtggcatatcgtcagaaccgattacaccgtcacgtctgcgaaacttgcggatgaataccgtatcgtgctgatgacggacactcatttcggctctatacagtcgcccgaagttcttgaagaaaaagtggacgagataaactccctcaacgcggatatgatagtcctttgcggcgacatcacggacgaatccacaacgcgcgaacaacttgaccaagtatttgagatatacagccgcatgaagagccgatacggcacgttttatacatacggcaaccatgacaggcaggaatacgctgtggcgaaccgccgcgcatatacgcccgaggagtttgccgaggttgtccgttcgcacgggataaagatattgcaggacgattttgtcaatatcggcaacgacctcgttctcgtcggcagggaagacaagagttggaaagaaaccccccgcctttcttccgagacgctgctcaaagacgttgaccgttcgcgctttatcatcgtttccgaccaccagcccgttgacgcggaagtcaacgccgaacagggcgcggacttgcaactttcgggacatacccatgcgggacagatatatccgttcgggctgtttatcgaacttgtcggaaaactcaattacggcgaatatcatcgcggcaatttgactgcgatagtctcgtccggcacgacggggtggggcttcccgatacgcaccgaggaacattgcgaatacgttcttgtgacgctcaaacccgctcaatagttctttacacactttactctggctttgtaaaaggaaaaatcaataagcaagtttataatattgaaaggcatccgaacatttcgttcggatgccttgcttttatttaattctatcagccgtttgttttgtctccgtcaacaggcttttcttcgccgttttcgggctgtgttgcggcttttccgtcgtgggagacgggctctgccgtatccgcgttgttttcggacttctgtgcaccgtcagcggctttgccgtcaatcggtgcgaggtcctcgcctttcataatactgtcgaattcgtccgcagagagtttttcgcgctcgataaggtaatcggacactttgacaagttcttgcttgtgctcttcgagtatggatttcgctcttgcatacgcttcatcgattattctctttatttccgcgtcgatcttcgccgccgtgtcatcggagcagtttctctgcgttgtcaggtctctgcctaggaacacctggtcgttgtcgccgccgaacgagatcgcgccgagacgggacataccgtacttggttaccatatcgcgggcaagcgccgtcgctctttcgatgtcgttggaagcgcccgtgcaaacgtcgtcaagcacaacttcttccgcaacgcgtccgccgagaagaccgactatgctgtcaagtatttcctttttggacatatgctgtttgtcttccgagggaacgtagtaggtgtagcccgccgccatacctctcggaattatcgaaatttcgtgaacggggtcctgatttttgaggaagcgcgaaaccaccgcgtgacccgcttcgtgaaccgccgttatgcgtctgtccttgggtatcttgaccgcagatttcttttcaacgccgacgataactttgagtatcgcgtcgtcaacgtcctgcgcggttatcttcttatgacgtcttcttgcgcacagcagcgcggattcgttcataatgttttcgaggtctgcgggggagaagcccgccgtggatttcgcaacgtggttcaggttcacgtcgtccgcaagcggcttttgtctcgaatgtatttttagaatttcttctcttgcctttacgtcgggcaggtgaataactatctgtctgtcaaatctgccgggacgcagcagcgcgctgtcaagaatgtcgggtctgttcgtcgccgccatgacgatgacgccctcgtttttctcaaagccgtccatctcaaccagcaactggttcagcgtctgttctctttcgtcgtttccgccgccgagaccggcacctctctgtctgcccaccgcgtcgatttcgtcgatgaacacgatgcacggagcatttttctttgcctggtcgaacgtatcacggacacgggaagcgccgacgccgacatagagttcaacgaagtccgaaccgcttatctggaaaaacggaacgcccgcttctcccgccgttgcgcgtgcaagatatgtcttacccgttcccgggctgccgaccatcagtatacctctcggaatacgcgctccgaggtcggtgaatcttttcgggtttttaagaaaatcgacaacttccgccaattcctctttttcctcgtccgctcccgcaacgtccttaaacatgacttttgcttttgagtcgttgccgagttttaagcgcgctttcgaaaaactcatcgcttttcccgcgccgcctccgccgttcatctgaccgaacatgaagaaaccgaagaccgctatcataatgattatcagaacgtagggtatcgcgctgacccaaacaggcgtctgcgtctgcggaatgaggtcatactgcatcgtgggctcgccagtttcggggttctttatatagttcttaacatcttcaagaaagagtccgacgttgtaaagcgaatacttttcctccgtcttgccctgcgcgttcggttctttcagtttcagttcaagtgttgaggaatcaacggtgaaagtctcaactttgccctcacggaagtagttgagtatatccgaatacttggtgtctcttgtcgaatctccccgcagcagcatcagaacaaaaattccgatgagaaagagtatgacggcatagaccgccagatttttgaatcttttcaaggtttctctcctttatacgttttgctttatacaatgttcaatatttatgttatacgaaaattatatactcattaagacggatttattaaaatacggtgaaatctgccgtcaaaccgccgttttgcaccgcaaacgcagcgtccgtgccgtatccgcaaacgtgaacgaccttttcgccgcagacaataacggggttcgtttttctccgctccgtcggcattttggtgtccgaataaagttttaagacgcttttcgtgcccgcgctttcgcggatttttattttgtctccgctttttgcgggacgtacttcaagccgcccgagcaattctttcggaattttccctttcggactttccgtcagcgtcagaactcctgttccgtctatcacattttcgcctatgcgcaaaatttgcgaatagccgcctgttgtgccgacatctttcaaaaacagcaactccgaataactcttttccgccgttatgccgtccgtcaaacaaagccttgcgtttgtttttccgtttttcacaagttcgcagagtgcgtccgtcagcgttttcgaaagttttttgccgtccgtcgcatcttcaaacgccctgcgcacgcaaagccccaaaaatgcgtcgccgtgctcccgaaaatattcaagcgacagtccgcttttcgtttttgactttgcgtataccgcttgcgccgcctcttcgataagcccgttttgctcccgctgtgtgccgatgaacctcgcaaccgcctcgtcaaacgacgggttcagttcgcgcagctgcggaattatctcgtttcgcagcacatttcggcggcatatcggctcgtcgttcgtcttgtcgtgtgcaaacggcagtccgtttgcgatgcagtaagcaactatctctttcttgtcaaggtcgataagcggtcttgccacaaggtcgtcgcggagcggcggtatgccgcaggctccgttcgaacctgcaccccttataaggttgagcaaaaacgtttccacattgtcgtttctgttatgcgccgtaaaaatatgcgaatatccgagttccctgcgcagttcgttcaaaaactcgtaccgtttctcccttgcgaacgtttccgttgaaacgccgctcgggcaaaggctcggtatatctatcttttttgagaatatccgaacgtttttctctcgacagaacgcttcaagcactttttgttcgtcgtccgattccttgcgcagtccgtggttgacgtgtcccaccgcaaaaggcacgggggagtttgatatgaaccatgaaagaagcgtcatcgagtcgcttccgcccgaaacggcaagcaccgctcccgagcagttctcgaacatcttttcccgctccgcagtcctgcggataacgtcttccgtcgtcatattccctccggcacgggtgcacggtcaatggatttgattgacgtatgcgtaccgtcccaaagcagttcgatcttgcccgttctgccgtgtctgtttttcgagatataaacttccattatattctttttaggagtgttcggcgtgtgcgtttcgggacggtcgaggaacagtaccacgtccgcgtcctgctctattgaacccgagtcacgcaagtccgaaagttggggggtcttgtcctcacgcttcgttatgcttcgcgaaagctgcgaaagcagtataacgggtacgttcagttcctttgccataagttttatcgcacgcgtgtattccgcaatttcctgcactctgttgtccgttgagccgctgcccataagttgcaggtagtcgatgatgatacagccgaggtctttttctctgcgcagtttggctttcatttccgccacggttatcgtcgaagattcgtcaacgataaagcggcttccgcgcagcgtttctctgtaaaagttgaaaagcacttcccagtccgacatatctatttcgccggtgcggagtttttcgtggtcgataagcgtagcatttgaaataactcttcgcgcaagctgcaattttgacatttcgagcgagaagaaagcaaccgtctttttcggcgaatagcgcgaagacgttgccatattgtaagccacgttcagcgcaaacgtcgtttttccgacgccgggacgcgccgccagaattaccaagtcggagttgttcagaccgccgacgtaatcgtcaaatgcgcctatgccgactttgaccgcttcaaacttgcccgtcgtgtcctttttcatctcctgcaatctgtccatttcttcttttacaagcgattgcaggtcggacatctgcgttgtgacgtcctctttttcaaggtcgttgaacttgcgccccgccgtgtcaagcaccttttcggggttctcgttgtcgtagcacatttcgctgacttccgcgcatatatcaagcgctctgcgcagcaaaaacttcgatttcagaaccttgatgaaatattcgactttcgttatcgccgacgcggtatcgaccagggagagcagatactccttgtcgtcgtccgattcaaacccgccgccgtcgcgcagcgtttgcagcagcacaagtccgtctatcggcaccgagcggttgttcagatccgacaacgcctcgtatatctgcctgtgacgtggaatgtagaacgcgtccgcgggcagttttccgagtatatccgtcagctttgacgggtcacgcagcgccgtgcccagaaccgcctgttccgcttcgagcgaatagggcacctgttttgaggaaaactcttccgctctgaatttatttgccgaaggcataatctcttttttcttccttccgtttgttttgggagcaaaaccgtgtgtgaacggcttacgtccgctttattgcggtgttcggaatatgacttttaatcctgctccgtcgcaaagactttaatttttgcggagacttcgggataaagttttacttccgccgtgtactgtccgaaactcttcacggcaacgggaagatttatctttttcttgtccacgtctatcgaataaagttttttcaactcttccgaaatttcttttgccgtaacgctgccgaacatcttgccgcccgcacccgctttcaacttaaatgtaacggtcgtgccgtctatgcgggatttcaactcttccgccgccgctttttcctccgctttgtggaaatctttcgccgctttctgcgtgttcatattgtttatgtttcccgcattcgcttcctgcgctatctttttcgggaaaaggaaatttctcgcatatccctccgaaacttttaccatttctccctttttgccgagggattttacatcttgaagcaaaattacctgcatttttgttcctcctaacagtgagtgccgagtatattactctcttctatgtattcgtctatcgcttttttaagcatatccagcgcttctttcggagtgctgttctttatctgcgcgcccgccatcgtctgatgaccgccgccgccgagtttttcagttatcaactgaacgttgacctgcccgaacgaacgccccgagattatcactgcgcccgtcgaatcgggaaacagcgtgaacgacgcctgaacgccctcgatgttcagcatttcgtccgccgcctgcgccgaggctatgcggaactgcgaacccgctttgtcctcccaacaggctatcgcaactatttttctgtaaacttttgcgttctgaaccatgtccgtcttctgcatatacgtctgcatatccacctggaacagttttttgacgtttacggtgttcgcgcccgctttgcgcagatacgacgacgcctcaaacgtgtgcaggctcgtgcgtatcataaagtttttcgtgtcaaggtatattcccgccatcagcgcttccgcttcgaccgcgggcatacggttgacgttcatatactgcattatttcagccaccatctccgacgcgctcgacgcatacggttcgtggaagaaaatttccgcgttttcgatgaaatccgccgattttctgtgatggtctataaccacgactctttccgaaaattcaagcaatttcggcatcgccgtcatcgaggctctgtgtgtgtccacaacaaccgtcaccgatgtcggacttgccattataagcgcctgttcgggtgtgacgaacgcctgtttcatatcgcttgactcattcagcagccgctcgtaaagcgcgtttgcgagggaagagttcgggtcgtatactatgccgacctttttctgcgccgccaatgccgttctggcaatgccgaccgccgcgcccaaacagtcaaagtccgcaaactggtgtcccatgataagcaccgtgtccacttttttgaacagcgttttgagttcggacgcaaccactctcgactttatctttgttctcttttcaacgcccttgctcagccctccgaagaactcaaagccctttgtcgagtgcatagccgcctggtctccgcctctgctcagcgccatgtcaagcgcgattctcgcgtgctcctcgttttcggcaaacgtcgcgccgccgaagcccacgcctatggatatggtcggctgaaccgaggtcgccacttgcagatttcttacacggtcgagaatatcaaacctcgtttccgtgaactgctttatatattcgtttctgaaaatgaacagataactgtccttttcggtctttcttattatgccgcccaccgactgcgcccattccgtcagcgcgttgtcgataaccgccatcgccgtcgatttttcgctctctttcgatatctggaaaagttcgtcgtagttgtccacaagaatgtgcgcgataacgggcttttgctgattgtactttatctgcaactgctggtagtcggttatgtcgaagaaataaagaacggcaagttctctttctcttatcttgcatttgtccgttacgaccgtgaaatatttcgacgcgaacgaaactttgacggtccttttcgaaaaaatgtccttgctcagtttgaaaacggaatcaaactttgaaagatccgccccgtccgtggctttgatgaacgggtcgttgtaccagataatgtcgccctttctgtccgccagcacaacgggcaggggaaacgccatcagccgctcctgctcgttaaaatcaagcaggtctataaaactctcagaaagactgcgcgcgctttttctctttatcgccgcataaagttcaaacccgcctacatacacaagcgtcacgattatcagaatgcggaaaaacggcttatccgaaacgatgttcgaagccacggcgaaaacggcaagcaggatatagtgaagcctgtcgattatcgcatgaactgtttttgtctttttcattcagacgcgctctccttgttatcttctcaaatcgcggtaactgtcaactgtgccgagcaaagaaaataccgttgtccgcatcagcagaaatcctatgaccaccgcaattatcatcggcgttttgacgttcatcggcacggagcggctcttcatcagataaatgaacaccgaaagccccgctcccgcaaacacaaaattcatcagtgtttcaaaaatatatatcgcaaacagccatgtcatatcgtatatcagcgccgatgcgtcggtcatctccgcacttccgaaaaacataactatccatgaaagcagcataagcgttgcgcccgctttgcttatccgtatctccgtcagccccgttgcgaacccgacggaaaacgttgtgcgtttgagcagcgctttcgtcagaaaatatgccgctgcggcaatcaagagaaacgcaccgccgataaccgtgggcaaattcagaattatcatatcgtgcaagtccgccgcaagcgcggggcgctgtgccgcaagtttgtcgctcgtcagcgtcgttctcgcaaaaaacatttcgtatatcgaaagcccgcccttgccgcgttcaaggataacgtccgctgtgtcattcgccgcctcggcaatggattcctttatcggttcgataacgtttgccgtgtcaaacgtcgggtgtccctcatacgcaaacgcgcaaaagaccgctattccgcatatcatcgcaactattgcggacgctgtgaccgcgctgttgaccgttttcttttttctgaatgcgatacctgttgccacacccgtcggagcaaaaaaaagataaagcaaaagcgccgtcgcaaattttcggaacaaaagcgccgtcgcaataaacagcgcaatgaacaaaagcgccgtccatgggtttttgttcaacgcgaccgttgcggaaagaaagaccgtcgccgcaggcataagcaaaaacaacagccataccgccgacggcaaaaatgccgcgataagcgccgatgcaacgaccgccgccgcagttataacggggaaaagtatttttttgaaagtgtctcttttttcgctgttcacttgaaattctccgtttgacgtatcttcgtctctttttgccgaccgcctgccgtcgctgttctccgctctgttgccgccgaaaccttggcaataatcaggcattatataagtatattatattatatcatatattactgtttttgaaaagtacgatttccgaaatttttgtgtattatttcgcttttacgccatttttgccgtctctgctccgtaacggtgaaaaaaaaacaggctctgcgctgccgcaccgagcctgtttgctgtgtttgtattatgaccgcaaaatattttttatcaggaaagagtaaacggttcagacagagtaaacgccccgtgattcgtgtatcttttactctattttacggcttcaaatactatggttctgttataatccgcacatctgacatacatcgaaatgcctatgttcatcagatacgcgccgcccttgatctgctcctcgccgtcaagggtgaatttgtattttttgttttcgtcaagccccgcaagtctgaactcgtcctgctttttgtaaaaacgcgttccctttgccgcgataaaaacgaccgccctgtttttgtccctgctcacatactcgttgcagagaatttcctccgtcagcgcgtcggatatcctgtacaggtctccgaactgaacaaggtcgcgcacggatttgtagaaagagatattttttctgcaaatttccaaatcttcgcccgaatacttcgtcaggttgccgcctatgccgagcgcgccttgcatcgccacgttgaacctgaaatcaagcgaacacggtttgttcagccccgttgtgtccgtcacccacgccctcatcgcttttgtcggacggagcatggagtaaccgcgttggatagtcattctgtcaaccgcgtcggtgttgtcgcttgtccatatctggtcaaagtggctcagcgcgccgaggtcgcagcgtccgccgcccgaagcgcaactttcaaactgcacctgcggatggcgttttttgagttcgtccacaatgccgtagaccgccatgatgtgcagatacgaatacatctgcgggttttcgagattttccgctcccacctgcgaaaacggacggttcatatcccactttatatatttgatgttatgcttttcaagcagttcatcaagcctgccaaagatgtactcgcgcacatcgtctcttgtcatgttaagcaccaactggttgcgcagttcgtccgcgtgtctgtgctcaaaatggtatacccaatcggggtgcgcgcggtaaaggtcgctgtcggggttgaccatttcaggctctacccaaagcccgaaatccatgccctgcgcgttgacgttctcaatcagttcgtcaagcccgttcgggaatttttctttgttcacataccaatcgcccaatcccgcaaggtcgttgtttctcttgccgaaccaaccgtcgtccataacaaaaagttcaacgccta

SEQ ID NO: 3638 - DNA, 19078 bp, Unknown
  16S sequences of unknown bacteria
aaaaatacagctgctatttcgatatttttccttttttcggtcttgcttgcacgcataaaacctgctctggcttaattgccacagcaggtttttctacaagctgaaacgccctcggacccatgcggtccgagggcgtttttgtatcacccttccaggctgcggatggcgcggtcctgggagaagccgaggcacagcgccgtgcccgcaaggcccagcaggaagaggagcgcgcccgccgcgccgctctggcccgcgccgaaggctgccgaaagcagcggcacggcgcccagcgcctccgatgcgctcagcgcgtccaccagcgcgccgcccagcaggtaccccagcgggatcgtgaagaactgcagggcgttgcgcgcggcgtagacgcggccctgcatctccagcggcagggaggtgcgcagcagcgcgtcgaggttcgcgttcatcagcgggatgccgatccagcccagcaccgcgcccacgcaccagggcaggggagagcgccccagcgccagcaggaagttctccgtgctcatcgagagcaggagcgtgccgcagatcacgcgcgcgcgccgcttgggcgcgggcaggagcaccgcgagcgcggacccggcgagcatcgccgcgccggatacgctgcccaccaatccgtagccggcctgcccggcaaggggcagcgtgcgcgcgggcagcgccgcgctgtacatcgaggcgatgaggttgatgccggccaggaacaggatcaggtgcaggatgcccgcgtggcgccagaggaagcgcagcccggcgcgcgcggcggcaaggaggctctcctcgcgcggggcgctgtccgcggccttgggcaggcggatgccgaaggccagcgtcagcgccgccacggcaaaggtcgcaaggtcaaaggcgatcacgccgggcaggcccgcaaagccgagcaccgccgccgccagcgccggggtcgcaaggttcaccaccgaggaggacagcgcgcgcaaggaagccgcgcgctggaactgcgcccgcggcgtgagcagcgtcgtcgtcacctcggaggcgggctgctgcacgctgttcatcaggccgctgagcgcgttgagcgcgtagagatgccagatctgcagccggcctgtgcacagcagcaggagcgtgagcagcgtcgtcagcgccgcaaagccgtcgcagatcagcagcacggccttcttgttccagcggtccgagagcgcgccggcaaagacgctcaccagcacatacggcgcgtaggagcagaccgagagcagcgccgtggtcagcgcggagccctcggcctcgtaggaccagacgacgagcgcaaaggcggtcatcgagctgcccagggaggagagggcctgcgtgctccacagcaggaggaaagcgcgcatctccacaaggtctgcgcgcgtgggaagcgaggaaagaaacttcggggtcttcatgggaactccgctccttttttggtttttccgaaaaaaggcgcaaagtccgcaaggggcgaaaagaatgggggttctcaggctccgcgcgcgtttcgcccgtctttagactttgcgcggagcggagacaatgcacagccgcatggggcaagtccctcctttcccgggggatcaggagaaggcctgttcaacggcctcctgctcgaactggcgcgtgtagagcgtgtagtagtgacccttcttggccatgagctcctcgtgcgtgccgcgctcgatgatcttgcccgcgtccacgaccaggatgatgtccgcctggcggatggtggagaggcggtgcgcgatgacaaaggaggtgcggcccttcatcaggtgctcgatggcgttttggatcaggtgctcggtgatggtgtcgatggagctggtggcctcgtccaggacgaagatgcgcgggtccgcgagcaccgcgcgcgcaaaggagatcagctgcttgccgccggtggagagcaggtcgccgccctcgccgacgtcgctgtcgtagccgttttcgagctggtcgatgatcgtgtccgcggaaacggccttgcaggcggcctcgatctcctccatggtcgcgtcgggcttgccgtagcgcaggttttccagcaccgttccggagaagaggtgcggggtctgcaggacgtagccgatgttggagtgcagccagagctggctgcgctcgcgcgcgtcgcgcccgtcgatgaggacgcggccctttgtcggctcaaagaagcggcagaccaggttgaccagcgtggacttgcccgcgcccgtctcgcccacgatggccacgttcgtgccctgggggaccttgaggttgaagtgctccaggatgtattcctccccgtccgggtacttgaaggagacgtcctggaactccacgtcgccgtagaggggctcccagttttcgcgcttgggctggaaggtgtcgccgtacttttcgacgacctcggggctgtcctccacgtccgagcgcgtggccagcaggttcgtgaagcgctcgatgttgacctggacgttgatgagctcggagatcatgcgcaccagggtctggatcggctccatcaggcccagcgcgtagttcatgaagaccgacagcgtgccgatctgcatgagcgtctcgctcgtcatggccagcgtgcccccgcgccagagcaccagcgccatcgcaaaggaggccgtgaacatgacgatggagatgaaggtcgcgcggtagcgcgcggtgcggatggaggtcttgcgcatgtcctcggtcgtgcggccgaagtcctgctccatcttttcctccacgaccagggtctttgtggtcttggcgccggtgatgccctcgttgaagttgcccgtgatctgggagttgatctcgcgcacgcggcggttgagcacggtgagcttgctctggaagaaggccgcgatcagggtgatgacgggggtcagcgccaccacccacagcgccaggcgccagttgatgacgaacatgaccacgatcacgcccacaagatacgagaggttccacaccgtgtccatcaggccccaggccacgatggaaccgatgcggttggtatcggacatgacgcgcgcgtggatgtagcccacgctgttttggttgaaataggagaaggagagggtctgcaggtggttgaagctcgcgcgcttcaggtcccggccgacgtacatctcgatctggcaggcctggtaggcgtcgatcatggagaagacgatctgcagcgcgatcacgcagacgtacaggccgatgaagccgcccaggccctggagcgtgcccttggcgatgaagttgttgatggcgtattgctggaataggggcaggcagatgtcgatgacgccgttgagcagcaccaacaccgccatgcagatcacgatgcccttatagggcttgaggaaggggacgaggcgcggcaggccgaaccacggcagccggaccttgtagtcgctgtgcgttgtcttttctgtcatgcggttacctcgctgctcatctgcatgttgaagatgtggcggtagatgccctcctgcgccatgagctcctcgtgcgtgcccatctgctgcacgcgccccttgtccaggaccaggatgcagtccgcgctcatgagggtggtgacgcggtgggagatcaggatgaccgtggagccgcccaggtgcgtcttgagctgggtgcggatcttgaggtccgtctccgcgtccacggccgagagcgagtcgtcaaagaccatgatcggcgcgcgctgcgtgagcatccgcgcgatcgccgtgcgctgcttctgcccgccggagagggtcacgccgcgctcgcccacgaccgtgtcgtatccgtgcgcaaagtcggagatggcctcgtccacgcaggcgatggaggcggcgcgccggatctcgcccatgtccatgtcgcgcgcggtgatgccgatgttctcccggatcgtgcggctgaagaggaagggctcctgcaggcacatgcccacgccccggcgcaggtagtccgcgcggatgtcgcgcacgtccaccccgccgatggagaccgtgccgcagccctccggcacctcgtagaggcggttgagcaggtacatcagcgtgctctttccggacgaggtcgagcccaggatcgcgaacgtggaccccgcggggatggtgaaggagacgtccttgagcaccggcgggttgtcgtcgtaggcaaaggtcacgtggtcgaacacgatgtcctgccggaggtccggctccagggcgccggggcggtccgcctcctccggggaggacatgatgtagttgatgcggtcgatggatacgctcgccttggacatgtctgcgatcacgcggccgagctggcgcacgggccaggtgagcatcgagttataggagatgaaggcgatgaactcgcccgcggtcatctccccctgcacgctgagcaccgagcccaggacgatgatgagcatcacctgcaggagcgagacgaagtcgcccgttccccagaagatggccagcaccttgcacagccgcatccagaggttggtgtagacgttgttctgcttttcaaagcggtccttttcgtatttctcgcggccaaaggcgcgcacgacgcgcacgcccgtcaggttttcctgcgcgatggtggaaaggacgccttcgctctcgtcgcacttggtgaagcggtcgctgatcttgcgctgaaagatcatggaatacgtgaagatgaccgggatggagaccatcgccacgaccgaaaggcgcaggttcatcgagatcatgaacgaaagcgacagcaccagcaggatgctgatgcgcaccacgttcatgaactgatcggtcacaaagttgcgcaccgtgtccacgtccgaggtgcagcgctggatgatgtcgccggtctggttcttcatgtgccaggcaaagggcaggcgctggatgtgcgcaaagagcaggttgcggatgcggcagacgaacgtctccgacgcgcgcgccgtctccagcaggttgacgaagcggaacaccgccgtcagcgccgcgatcagcaccaccgccgctgcgatccagagcaggttgcccttgagcgcctcgaccccgcccacggcgtcgatcagcgccgcaaggaacccgggaacgcgcagcggttcggatccgatgacgctgtcgacggtgagcttgatgatctgcggggtgatcatctccgtcagcgtcacaaagagcgagcccaggatggccagcaggtagtaccgcttgctgccccgcaggaagaggaagatcagctgcacacggctcatcttcccgttctgtcgtgtcttcataactcctccatacgttgtttttttacacggatacaggcccattgtatcggatggccctgcgcttgtcaacgggggatgtaacaaaatggtaatattttttgcggaaaaaggggagggctgcgcctatggcgcagccctcccaacgtccaagtgagggtttattcctcgcggatcagcgcgtggaactcctgcagggagcgcggcgggcgcttctcctcgtgcgcgacggcgcggatgccggcgatggtcgcccgcgccgcggccatggtggtgacgtagaagacgcggctgcggatggcggccttgcggatgatgctgtcgtcctgcgcgcccttcttgtcgttgggggtgttgacgacgatgtcgatgtccccgcgggcgatgaggtccaccgcgtggggctggccgtggtgcagcttgtgcacgcgctcgaccgggatgcccaggccctcgatgacgtccgccgtgccgccggtcgcgcagagcttgaagccgcactcggcaaagccgcgggcgatctccggcagctcgggcttgtcgcggtcgttgacggagaggaagaccctgcccgacagcgcgatcttggtctgggtggcctcctgcgccttgaagtaggcctcgccgaagtcctcgctcaggcccaggacctcgcccgtggagcgcatctccggcccgagcagggggtcgacctcctggaacatgttgaaggggaagacggcctccttgacgccgtagtaggggatgtggcgcgggcgcagcgcgggcacgggcgagggccggccggtcagcggcgcggtgatgatctcggtggccagcggcaccatctggatgttgcagaccttggagaccagcggcaccgtgcggctggcgcgcgggttcgcctccaggacgtagaccttgccgtcctcgatggcgtactgcatgttcatcaggccctggacgtgcatctccttggcgatcttcatcgtgtaggagcggatgatctcgacgttctccggcgagatgttcttggagggcaggatgcaggccgagtcgcccgagtggatgcccgcaagctcgatgtgctccatcaccgcgggaacaaagacgttctccccgtcggagacggcgtccgcctcgcactccgtggcgttgtgcaggaagcggtcgatgaggatgggccggtcgggcgtcacgcccacggcctgcgccatgtagaagcggagggattcctcgtcgtgcacgacctccatgccgcggccgcccagcacgtaggaggggcggaccatgaccgggtagccgatgcggttggcgatcgccaccgcgtcgtccgcggtcacggccatgccgctttcgggcatggggatctcgagcttgtccatcatcgcgcggaagaggtcgcggtcctcggccatgtcgatggtctcggggctggtgcccaggatgtggacgccgttcttcttgagcgcggcggcgaggttgagcggcgtctggccgccgaactgcgcgatgacgcccaggggcttttccttttcgtggatggcgagcacgtcctccagcgtcaggggctcgaagtagagcttgtccgaggtgtcgtagtcggtggagacggtctccgggttgcagttgatcatgatcgtctcaaagcccagggacttgagcgcctttgccgcgtgcacgcagcagtagtcgaactcgatgccctggccgatgcggttggggccggagccgaggatcatgatcttcttggggtttgcgctcaccggggacgcgtcctcgatgttgtaggaggagaagtagtagttcgcgtccttggtgctggaaacgtgcacgccctcccagccggcgtggatgccgtacgccttccgggcggcgcggatctcgtcctccggcaggtccaggagcttggaaaggtagcggtcggagaagccgtccttcttggcggcgagcagcgtctcgcggtcgggaagcgcgcccttgtgcgcgagcagcgcgttctcctcgtccacgagctccttcatctgctcgaggaagtagggcttgatcttggtcagctcccagagctgcgtgacgcttgcgcccttgcgcagcgcctcatagaggataaactgccgctcggaggtgggcttttccaggagcttgagcagctcctccaggctcttttcgtggaagtccttggcaaagcccaggccgtatcttccgttctccagggagcggatcgccttctggaaggcttctttataggtcttgccgatgctcatgacctcgcccacggcgcgcatctgcgtgccgagcttgtcctcggccttcttgaacttctcaaaggcccatctggcgaacttgatgaccacgtagtcgccgccggggacgtagttcttgagcgtgccgtgcttgccgcaggggatgtcggcaagcgtcaggcccgttgccagcatcgccgaaaccagcgcgatggggaagcccgtcgccttggaggccagggccgaggagcgcgaggtgcgcgggttgatctcgatgacgatgatgcgcccggtctccgggttgcgggcgaactgcacgttcgtgccgccgatgacctggatggcgtccacgatcttgtacgcctggcgctgcagctccttctgcacgtcctcggggatggtgagcatgggcgccgagcagaaggagtcgcccgtgtgcacgcccagggggtcgatgttctcgatgaagcagacggtgatcatgttgccgtccttgtcgcgcacgacctccagctccagctcctcccagccgagcacgcactcctcgaccagcacctggccgacgagcgaggcctgcagcccgcgcgcgcacaccgtggccagctccagcggatcgtagacgatgccgccgcccgtgccgcccatggtgtaggccgggcgcagcaccaccgggtagccgagacggtccgcgatggagagcgcctcgtccacggaataggcgacctcggaagcagccatgtcgatgcccaggtcgttcatcgtcttcttgaactcgatgcggtcctcgccgcgctcgatggcgtccacctgcacgccgatgacctggacgttgtacttgtccagcacgcccagcttgttcagctccgagcagaggttcaggccgctctgcccgccgaggttgggcaggagcaagtccggccgctccttttcgatgatgtcggtcagccgctgggcgttgagcggctcgatgtaggtcacgtccgcgatgcccgggtccgtcatgatggtggccgggttggagttgaccagcacgatctcataccccaaattgcgcagggccttgcaggcctgggtgccggagtagtcgaattcgcacgcttggccgatgatgatgggtcccgatccgatgatgagaacctttttcgctttcgccatgttatcttcccctttttcgcgttcgatggaatgcagaatgcatacaagttcagtatagcacactttttgcaggaaaaggagcgccttcccgcgatttcgggagaaatttacataccggcgcgattgtttgccgccgggcgctcggcgcggcggtaggccagcagcaccacgaacgaccccgccagcaggaacagcgcgaagaacaggaacgtattctgcagccccagcaccgagctctccgacaggtacccgcccactaggctcccgaagatccgggaaaagcccgcggtgatcatggccagcagggtttgcgcggtggacttgagctccggcgggaagcgctcgtggatgaggtttgccgagcagtagtagttcgtcatgtagctgaccgactgcaggagctgggcgaaggtcagcatcgcgaaggcacccgcgccgaaaaacccgctcgcataggtcagaaacagccgcagcgcgcagaagaaggcggaggccacgatgatggtcgtgccgcggatcttcttcatcacccggtcgatcagcaggagcgtcgggatctccgacagcgcggagaaggcgttgagcaggccgcaggcgttgttgtcataccccagctccgaggcgtacagcggcaggtaggtgtaggcgcagatccccaccgagatcacaaagtttgcaatcagcaggaagagcaccatcgggtcgcgcagcaggggccgcagcgagaggggcttcttttcgcccgcgtttttctgcgcggcgcgcatgcgctgttcgtccgaccggggaaagaagagggtcgcagccgccgcggcgcaggtgaagatcacgtatgcgtagaagatgcgcctgaggtccagggagaacagggtgcccagcaggatcggtatcagcgcgtagccgaccgtcccgcaaaggcggatgggcgaaaagcggtagcggttcttcgtgcagaattccagcgccatggcgtccgccatgggcaggaccgacatgttgaagagcacgtacagcaccgcgacaaagagaatatacccaaacgacgcgcccagcaggtacagcagcgcgcacgccgccgacagcacgagcgtcagcagcagcacgaacttgcggttcgtgcggtccgcaaggcgcccccaggccgtctgaaacaccagggacgcgaaggggccgatggccgtgatcaggccgatctggctcgtggacatgcccgcttccttatagtagagctgaatgtagggactgtaggagccgttgcccatgtagatcagcgcaaagaccaagccgacaaggaggattccccggtgccggtgcaggaaaattcgtgcgttcatgtggtccacccatccttttgtatttttgtcgaatctatgataccatttccgatccggaaagacaagagcgagttccgggaaacacggtacaatgagattttacaaaaactgaatctgaatgaaatgggatttcaccaaagcggcgttgacagatcccaattccaatattagaatagagccgtaatattgatgaagcgaaaggcgtttgcgggatgaaaagacgaaagtgtttttggatcggcgcgatctgtgcggcaattttgttttccgccgtgggctgcacggagcccgcacagatgcagggttcgcccagccaccccagcgaacaggagggccaggtcaccatccggtttctgcacatttggagcgagcacgagcagacgatggaaaagatcgtccgcgcggtggaggaggagaacgaggccctgcgcgtggagatcaacaccgtggactggagttcggtgaaccgggaggtgcagtccgccgcggcctccgccagcatgtacgatgtgttttttcaatatgcggatgagttcggcagcgcgcacagccaggggctggtgctggacctgaccccctacatggacgaggaatgggccggcggctttcagcccggcgcccttgcggaatacaccctggaggacggcctgtacggcatccccttccggggcagcggcgtggtcgtgatctacaacgaggacctgttcaaccgctacggctggcgcaagccctcctcccaggaggagatgacggcgctgatgcagctggccctgaacgaaggcctcgtcccgctcgccgccgcgggccggccggacgggttccagatcgaggcgctgcggggcatcgtgacgaattacgtcaccctggaggccgggaacctcgacgacgcggaccgcctgcgcggccggcgcacggactggcagggcgagctcgccgtgggcgcccagcgcgtcaaggactgggtcgagcggggcttcttcgggcccagccccctgtccgtggacgaggaggccgcgatcgacagcttcctctccggccaggcggccatgctcctgtgcaatacgaacgacctgtaccagctgcgcggccaggaggactacctcgccttctccatggactgcttcctgttcccggggccggagtcctgcgaagagaccctcttctccgacgcctgctatcaggacggctttgcggtctacgccggcaccgagcacccgcaggaggcggtgcagctcctgcgcggcctgaccaacccggagaactgcgcctcctgggcggaggagaccctctcggtcatggccgtgcaggacgtcgagtacgaggacgagctgctgtgcgcgttcaacgacttcttccagctcgccggccggagccgcgtcgtcccggactatgccctgggcgattcgcagacgcagaaggcgcagctgttcgtctcctatctgaccagcgacatgaccgcggacgactttgaaaccaactacgagaatatcacccgcgccgccatccgcgccagcgaggcgggatgaggcgcccctgcaaagaatgaaaaggcccctgccgcgcggcggcgggggccttttcgcgcgccggggaaaccgcagatcctgcgcaaaaaatcgacaaaatccgggcaacctgcggcccgatttcgtcgttttctatgcggaagggcgcggtttccgtgcagccgattgaatccagagaaaacctgtggtataataaccaaaaaagaatgcagaaagggcgtgtgcctgtgctctatacgcgaaataagccgcataaaagaagaccgaattggcggaacattctgttgaccgcgctgtgcgttgtgctccttgccaccagcgtcaccttgctcgtgcgcgccgtgcccggctggctgaaaaacagtggggacgacctccagctgaacaacccctccgcgccgccgagcgcgacgccggaggcctctccggacagctcccccgcgcagacgcccgccgcctccccggacggcgagcccacggaaagcccggaagcttctccctcggcaacgcccgcgcgcggctccggcacgcagtcggtgacgctgggcgcggtgggcgacatcctcctgcacgcgcaggagctgcaggccgcaagcctggaggccggtgggtacgactttacgaatttcttcagccgcatcgcggcctatacctcctggcaggacttcaccatcggcagcctgggcgccacggtcggcacctccaactacgacgcggtgaccgcgccggcctccctgctcacggccctgtccgacgcgggctttgacgtgctgaacctggccggggcgcacatcctcgaccgggacatcgccggcgcgcagcagaccgtgcaggccgtgcgcgacgcagggctccacggcgtgggcgcctacgacagcgggtcggagtacgtcaacccgctcatcctcaccaaggacgacctgcgcatcgccgtgctcagctacaccgagtccacgctccagacgcccgagggcgcggccgacaccgtcaagtacctcaacgagaccacctttgacaacgacatgaagcaggtcgaggccgacgccgccggcgtggacttcgtcgtggtctgcgtccgctgggacggcgaggaggacgtgctcaccgactcgcagaagaattgggcgcaggtctttgccgaccgcggcgtggacgtcgtgctcggcacccacgcgagcctgccgcagaccctgacgtacgtccagggccgggacggcggcaggacccttgtggcctacggcctgggcaacttcgtcggccccacgcgctcgggcggcgaggacgcgggctatgtgctcagcgtcaccctcaccaagaactttgacaccggggaggagagcatcgacagcgtgacgtatgtgccgacctgggtgctcaagtactcggcgggcggcaagtactccttcgaggtcctgtccgccgtcgaatacagcgagcggggctaccagaacatgagcgcgagcgaccgcacgcgcgtcgccgccgtgcccgcggagatccaggaggccctgggcgcggacgccggcacgatggacgagacgcggcgcgagatggtcgacggcgtgagcacggtcgtgcaggaggaagaatagaagcgcaaaaaggggcgctccggtcgtttcgggccggggcgccccttttgccgcgcaggggagaggagagagacacgtgaatccacaattctatctcatcaccggcgtcatggcgtcgggaaagtccacggtggccgagtgcctggcgcaggagctggaaccctgcgcgcacgtgcgcggcgatgcgtttcgccgcatgatcgcctccggcaggcgggagatggggccggacccggacccggaagcgctgcgccaatacgcccttcgctgcgacctggccgcgcagacggcccgaacctacttccaggcggggttttccgtcgtgctgcaggataactactacggccaggcgctgcccgatatgctcgaaaggctgcgcggcctgccggtgcgcgtcgtccgcctctgcccgcggccggaggtcgtggagcagcgggagcgggaccgcggcaagaccggctacacacggttttccgtgcgcgcgctgtgcgcggactttctgcgggagacgccggccatcggccttgcgctcgacaacagtgcggagacgccgcagcagaccgctgcgcgcatcctcgcaaaccgctgggcgtaaaaaaacgcccccggatcgcgccgggggcggggaaggggcggacgcgctgccaagcggcgggaaatgcgcctcagggcatgagcagctcgcgcaccaggtcgtagcggacggttccctcgtagttggcgggcagttccagcgtcacgcacacgaggcgggaatactcctcgttgtccacaaaggcgatgaaccagccgatttcgcgcgtcttgtccgagccgatttcggcggtaccggtcttgccgtagatggtcaggccctcgatgtccgcgcggcggccggtgccttcctcgacgacgcggtgcagcatgggcacgatggtgtccagcgcgtcctgcgtgatgacgtcctcccgccagacggaggcgggcatctcctcgacgacgacgtattccgtgccctccatgcggcgcgtggccttgaccaggcgcggggtcatgatgtccccgtcgttggccagggaggagaagatgcaggccatctgcaggggggagatgagcagctcgccctggccgtggcccgtaccggccagaagctggcggttctcgtagttgccgctggacaggtagctcggctgggagacgcgcaggtcgaaatcgatgcgctcgtcaaagcccacccgctgcaggaacggctccaggatgtcccacccggcctgcagtgccacgtaggagaagtagatgttgtccgaataggtgatggcgttggacatgttcaccgggccggagtagtaggtggcgcgggtgatggcgggatagggccagaagcccgagggcgtccactggttgcggtagatctcgcccgtgaactcgtagtcctcgtctacgatgtcgtattccagggccatggcggcgatcaggggcttgaccgtggagccggggatgtaggaaccctgcaccgcgcggttgtagagcgggctgttggagtcctccgcgacataggaggccaaggtcgccgggtccgagttgaggacgaagagattggggtcaaagtccggatagctggacatggccagcacgtccccggtcttgggatcgagcacgaccgcagcgccggccaggttgtccacagacagcgtcgccaggatctcctccgcgcggacctgcagatcgtaatccagcgtgatctccaggtccaggccgtccacggcctccttgcgggcgacggtggagagccactggccgtcgctggcgtagatgtccagggagtagccctttgtgccgcagagcgtgtcctcgtaggcggcctccaggcccgtgcggcctacataggaggagatgtcgtaccgctcggagtccagggtgttcatctcgtccgcggtgatggccgaggtatagcccatggcgtgggagaagaaggagccgttgggatagtagcggatcggcgtcatggaggtgcggttgaccccgacgcccggcagcgtggtcagcgcgctctccgtcgcctcggagatgccgcccggcggataggacttgacgaccgcggagtcgtatttctgcgcggtctcggagtggatgaccttctccacgtccgcggcgtccatgcccaggaccgaggccagggccgcgatggtgtaggcctcgtcctcgatgagggagggctgcacgtagacgctctcggcataggcgttgacggcataggcgttgtgcgcgctgtccaggatctcgccgcgatcggcctccagcgtgcgcaggcgcacgacgttggaggaggtcagcccctcaaagatcatggccggcgtccagttgaggacaaaggtccccgtctcttccgagtagtccagaacgaaggaaacgtcctgcgcaaaggtgcccaggatcgggctgtcgtagaggagggttgcctcctgcgtgtagcgctggcccgcgtccatggtgagcgagccgtattccacggagagcttcgtcagctcgatggcgctgaagatgttctcgtaccgctcggagaagtccaccagcgtcacggcctcctgcgtcccgggcgcgagcatcgcatagcaactgccaaagtcgttggcgttgagcagcgcgatgaattcgtccaaaaaggggcgcgggtcctccgtgggttcgctcgtctcctgggcggccgcggcgacggcctgcaggtcgatctcgcgcgtgctggtgccgcagccggccagcaggcacagggaaaggagaagaaggagaaatttcgttgtgcggtttcttttcatgcgtatcccctcaagtcgtcacaaaacgtgggcatatggtctattatgacggaaaacgccctctctgtaaagaaagaatttgcggggattttgttcccgggcgcggtgcgccgctccggcggcgcggcacgtaaaaaagttgcaaaaaatcccgttttctgtggaaaaactgccttttttgcgcgcgggaatttgacaggcaaccgcaaatcccttacaatatggccggaggggagaaccccggccacccaaatcgaaagcgaggcaatgcaatgaacaatctcggtacggggaagggagatccttcccgccgaaggcagcgcccgaaggggcaacggcccacgggcttggaaatttggaacgggtttgcgcgcggcctggacgccgtcgcccacgccctgacctggtttttccagaaggcggccgccttcctcgtgcgcgcggcgcacctgggcgcggcgctgagcgtccacggcctgagcgtcgtgcgcggcctttcgcccacggtgcgcgcgctctgcctggcgctggcgttcgtgctggcgctgggcgcggcgctgagcgccgcgccggttgcgcggctgctgaacacgcagaccgtgtcgctcgtcgaggacggcatcgcggcgcagatccgcacgcagtcgcgcacggtcgccgacgtcctgaccgagtacgacatcgccctgggcgagggggacgtggtctaccccgccctgtcgacggagatcggcggcggggatgagatccagatccgccgcgcgctggaggtgagcgtcagcgccgacgggcagacgcacaccgtgtcgctcctcaacggcaccgtgggcaaggcgctctacctggccggcgtctcgatcgatccggacgacatcgtctacccggccctgaccgagaccgtttcctcgggaatggacatcacggtcaaccgcgtgaccatcaccgaggaggtcgagcagcagcgcattccctaccacatcacctaccaggacagcgcggacctctacatcggggaggaggagatggtccgccagggcaccgagggcgtaaaggaggtcacctaccgcgtggtgacggtcgacggcgaggagaccgagcgcacggccgtctccgaggaggtcgtcgagcccgcgtacaaccgcatcatcgcccagggcacgcagcccacgcccacgccgcgcccgaccgccaccccgcggccgaccgcaacccccgcgcgcacctcgtcccccagccgcacggcgacgccccggcccaccgcaacgccccggcccgccaacaccccggacccggacgagaccgagaccgaggccgtgaccgacaacaccatcaccgtcaacggcgaaacctatacctacagccgcacgctcagcgtcatgattacggcctatacgcacacgggccgcaagacctccacgggcgtctggccggaggtgggcaccgtcgccgtcgacccggacgtcatcccctacggcacgcggctctacatccccggctacggctttggcgtggcgcaggacacgggcgtgtccggcaaccacatcgacgtcttctttgacaccgaggccgagtgcatctcctatggccgcaagcgcgaccgcaccatctacatactggagtgacgagttccatgacaaccggcgaaatcctgacccttcttcgggcgcgcggctttcggttcgcgcacgcgctcgggcagaacttcctcgcggacgacgaggtcctttcgcgcatcgcggacagcgcgcaggcggacggcgcgtgcgtgcttgagatcggcgcgggcgccgggtgcctgaccgttcccctggccagccgcgcaaagaaggtcctggccgtcgagatcgacgagcggctcatccccgtgctggagacggcgctccaggggcgaaagaacgtccgcatcgtccagggcgacgcgctcaaggtcgaccttgcggcgctggcgcaggagacgttcggggacgaggacttcctcgtggcggcgaacctgccctattccatcacgacccccgtgctcttccgcctgctcgagagccggctgcccatccagcgcatgtgcgtcatgctgcagaaggaggccgtggaccgcgtcgtcgcgcagcccggggaaaaggcctacggccccctggccatctactgcgcctaccgcgcggaggtggagcgcctctttcgcgtgccgccgcactgctttgtgccccagccgcacgtggactccgaggtgatcgagctgcgcatgcgcccccggcccgacccggcgcaggagcaggccttcctgcggctggtcaaaaacgccttccgcatgcgcagaaagacgctgctcaacaacctcctgcagtgcggaatgggcaaggaacaggcgcaaaagaccctggaggcggccgggcttgccccgagcgtgcgcgccgaggcgctctccctcgcggattttgtgcgcctgtatggaattctttgcgagccagatgttgcaaatgggaaatttgtggtataatggagagtagatagattcaatccgcatcgaaaaggaggagacgaacatggaaaatctcaagggtacccgcacagaggccaacctactcgccgcgttcgccggcgaatcccaggcccgcaacaagtacacctactatgcttccgcagcccgcaaggagggctatgtccagatcgccaagttcttcgaggagaccgccggcaacgagaaggagcacgccaagatctggtttaagctcctgcacgacggcgccgtgcccggaacggccgagaacctcaaggacgccgccgccggcgagcgctacgagtggaccgagatgtacgccgagttcgccaaggtcgcccgcgaggagggcttcacccgcatcgcctacctgttcgaggcggtcggcaagatcgaaaaggagcacgaggagcgctacaacaagctgctcaagaacctggaggagggcaaggtctttgcccgcgacggcgagtacatgtggatctgctccaactgcggccacatccacttcggcaaggaagcgccccaggtctgcccggtctgcgcgcatccccaggcctacttcgagctccgcgccgaaaactactgatttcccccgcaaagcgagcgggcggtttccggattttcccggaaatcgcccgcctttttttcatgcctttaggcagttgagcgaagcgaaacaaaaaaccacccgctatgcggg

SEQ ID NO: 3639 - DNA, 31018 bp, Unknown
  16S sequences of unknown bacteria
gtagaaaaatgagcggatttgaggtgttttaggattgcgagagcatgaaatgcgaagcaatccgtgtatcataggagcaaaataccttttgacccttgtatcatcagtatttcaatacccgcggatcaccaatccgctttctcttgccgcaacagcgagctgggtccgggatttaaacccggttttttccagcataatttttacatatttgcgcactgtccagatcgaaaaattcagcgtgtttgcaatttcctcatccgtatctccgccggtaagctcacgcagtaccttcagttctccttccgtaaactctgtgctcaacgcctctccaaccttcagaaccggcgtatcctccggatataccgattctcccgccatcgttcgatccagtacagaaagcaggctgttttccagcggctccttataccagaagctgtcaatcccggctttctttgcccgatgtataaaatcacattccggctgagaggtcacaagcacgatccgtatccccgggctgttctttttgatctttgccgctgccgtaagcccacttgcctttaacgcggtacatacatccataataatcagattgaccggatttttcaggcaatacagctcagccatcgaggcgctctcaattgctgccgccagctcataccttccgctgtgtttcaggtaaagctcaaacagcgtccttgccatcgggtcatcctctacaatcaatactcgtaccatctgctttcctcctcttcttccggaatcaacaaaatcagcacaaactgcggggcagaaaggatctgcatactgccccctgcctcctcgacctgaagccggagtgcgccaagcccaccgccctcgatgatcttctgctttggcggagcgccgttattgcagaatcgaacctgcagcatactaccttcccgacagatatagacataaagactgtctgccttcgcatgcctgaccgcattggtcagcgcttcagctgcagctgcgatcaaaagatcgcaggcgcggccggcacccggaagctttccgtccagccggatttccacacctgcggcctgcgcacaccggcaaaaaatttcccagtctgtctttccctgttttggttctgcctccgcgcgcatcagcgctataattgcttcccactgtttgaaaagacgtgattctccgccgtcctcctgagactgaagccaggcacgcgttgccagaagcgcctgcccgatttcgttatgaatctgcattttcatctccagaatttctctgctgcgcacaaaatctgccatttcctttccatatcgttccagcttctgatgcacctttgaaagctcctcattctttttctccagctccccggcaagcgcaaactgctgcgttgtatctactgccgtcagctgaattacaggacgcccctccgcctgaatcatctgtctggaaaagctgcagatgcttccgtccggaagccggatggccggtacctcacctgcccggatgcggctgcagcctgcctgcaggtctccactcaggagaattttccaaaactcctctgcgttctgcagatccaggccggtcgtcacataagagagctgctccatctgacgatttgccagaagaacaaatccactctcccgtgcaaaggcaagcccggacggcaggttgtcaatgctctctttaatggaaaatgccgtaatcccagttcgctccctgtaaaaccgtaacagctgaacaccactgtatatcgttccgatcagcgcaagtgcagcaaagataagcaaaaaaatggccggtatatcactgatctgttcctcatatctccagaatctcgccccggaaaccgtagaaaggtgtccactgcataccagcacaaatccaagaagtgtcacagcaaacaatccctctgccatcacatgtcgcccatagatatgtaaaaacaccgtcagcaaaaattcaaagagctggataagaagcagaaaaaacagaagcattaaaatcatgcccctgctatctgatgacagctgtatgatcgtccgcatgcacatcccctccttcctccggatctttcctcttgtgaaggtctgccctcgttttcggccaccgcactgttatatacaatgcctctgcctgtatcatttcacagtctaccaactccggcagacatgctatccatgaggcatccacacgcgtcgcatcgctgtccatctgtatacgaaaaagaagctgcccatcttttgtcgcacgcagccagagcaacagcgcccccagctcagataaaagcctctccagggcagactcgcagatatcgtatgctgccacgagtacagctgccggaaatgttccgctgcagtccgcatccagaaagccggacaccccgacaagtttcagattttccagagattcccgcagacaaagctccagctcctttgcggggaggtacgcagtgttttccgaaagcaaaagcaggttactgcggcgcttcacatacgcgccaatgacacagatcctggccagtgttttttgaattttgccttcttctttctcctttaaaagctgatcaatctgaaaaaactgcggcgctatttccttcgcaacctgatcatatagccgattcttttcctggatatgcagctgcttttcctgcagtgcaagctctgcccttaacagatcatttgcaccggatagctgacgccctttctcttccagttcctttcgataccgatacagcccggtataatcctctatccagaagacgtaaccatttgtaatggctgcacagcagaagcggtatccactgatatccatcgcaccctttgccacccttttccgctcttcctccctcagtgatcctgcattgccggatgaaaagcagacatggtattccgtatctgtaatctgtactgcaaccgaagaagcatggaacagactcttatagctggaatttgaccggatcagcccgcactgaatacagctctcaatcagcagtaccgtaatcagacagtccacagctgctatatcaaaaataaagagacgtaaaatatatgcaactgacaatgcggctgccccgacaagcaccagaaccggaagccactgatacggtctgcggaccggtatcctgcacttgagcaaaagccctacgacaaaataaatcccccacaacaggcaccaggcaaaaatgacaaaatatccgatctggtacgtataccggttctgaaaaaagacaattccatccggaaaccgaaatatcagctggtgcagatcgtttgtaagaacaagaccaatcaaagctaccgccggaatataccagaagcgtctgcgttttcccggctggtatctttcggattgtccgatgtgtgggagcagcattccagccagaagcggaacgagcaccattggaatataataggaataccaacaataacggttcatctggctgtcatgcgcaaatagcatccattttgatgcgcggacaaacagccagaagctgagcatgcccccaattgcaagcaaatacctgcgaaccggcctttgtaaaatcctcgactggatggaaatcatccagccgatcagcaatccaatatgaatcatatgacgaagcagctgaagccatacagaccagaagctattgtacataccgcgatccagcacccgtaagccacctgccaccagaatcagcacggtcgccagaaggtaccagatcatctgcgtccgcaccggaagctgttttttcaattttccctccatgtctcctgcccccctgccccaccgcttagtgcttctcgcacctgtagcggaagaatgcttattctacggtaaaaacaatatcccttccatgtcatattaacagaattcaccagcgctttcaattcctatccaacaccgaaaaaagaatcgatacctgcgcgacaccttttatttgctaataaacgcaaaaatccccggaacgcccataatcacaagctgttccggggatgactgcagaaaaaaagagataccttttgaagtatctctttagcagggctaccaggattcgaacctggaaatgacggagtcagagtccgttgccttaccgtttggcgatagccctatgttttattttgtttttgcggttcctcaacgcgagattcattatagcgcagctttttacaaattgcaagtactttttttattttttttaattttttttaaatcgtcccaacagggcattcttgtacccccacaggcagccaaagctcacagaaaaatttttactctttccagtgccatttatcccaaaacctgatcagaatgtggtatattaaaaaccagagcatttttctatcattaatctaaaaaggagtgtctttatgagtacactgaatcttactctgctcacggatctctatgagctcaccatgatgcagggctattatgaaagcaattcaaatgaaacggtcatttttgatgccttttaccgcaaaaatccctgcggcaacggctacgcgatcgcagccggtctggatcaggtcattgattatattaaaaatctgcatttttccgatgaagacatcgcgtatctggacagcctcggcatcttccatgcaccgttcctggaatacctgcggagcttccattttgagggtgatatctgggcgatcccggagggctccatcgtattcccgtacgaaccgctcgttaaggtcatcgcaccgatcatgcaggcgcagcttatcgagactgcacttctgaacatcgtaaaccaccagagtctgatcgcgaccaagacagcccgtgtcgtacaggccgcccgcggagacggcatcatggagttcggcctgcgccgtgcccagggaccggatgccggtgtctacggtgcccgtgcagccatgatcggcggctgcatcggtacgtccaacgtgcttaccggtcagctctttgacgttcctgtcaagggcacacatgcacacagctggatcatgagctttccggatgagtacacggcattcaaaaagtattccgagctgtatccgaatgcctgcctgcttctcgtcgatacgtacgatacgctgcgttccggcgtgccaaacgcaatccgtgtcttccaggaaatgcgtgcagccggacaggatctgaagggctatggtatccgtcttgacagcggcgacctcgcctacatgtccaaacaggcccgcaagctgctcgatgaagctggctttaccgacgcgatcatctctgcttccagcgatctggacgaatacctgattgacagtctgaaaacacagggcgctgccatcacctcctggggtgtcggtacaaacatgatcacatccaaagactgccctgcctttggcggtgtctataagctcgctgcggtgcttgatgaaaagaccggtgcatttatcccgaagatcaagctctccgagaataccgaaaagatcacgaatccaggcaataaaaagatcctccgcatttatgataagaagaccggcaagatccgtgcagatctgatctgcctcgtcgaagaggaattcgatccggaacaggatatgatcatcttcgaccagctggagacatggaaaaagacaaaaatcaagggcggcacctataccttacgggaaatgctcgtcccggtattcttaaaaggcgagtgcgtctacacctctccttctgtcatggaaatccgcgacatctgtatgaaggaaaaagacaccctttgggatgagacaaagcgtctcgcaaatccgcacaccgtatatgtggatctctccgaccgcctgtatcagatcaagagcgaactgcttgagcagatgggacgcgaagctttatctttgtaacctgttctgtcgcacatacgaaggacatttttatgaaaaaaataaaatataccacaggtctgctttgtacggcagcgcttctgacgctgcctttgggttgtggaaaaaaacaggactctgatgctcctgccgaaccggtgaatctcaccgtctgggtctactacaacggagatcagctggaatcattcaatcagctggtggctgaattcaacgataccaccggaagggaaaagggcatcatcgttgacagctacagccagggtacggtaaatgatctggaggcaaatgtcatggcttctgcgcagggaaaggtcggtgcttctcctatgccaaatattttttctgcctatgcggacactgcctacacccttgatcagatgggtgaacttgttgatcttagcagctattttacaaaggaagaacgtgctgcttatgtagacagctatcttgaggaaggagacttctccggcaatggcagcatcaagatctttccggtagccaaatctacggagggtctttatctgaacgatacggactgggaaccgtttgcagctgctaccggggcgagctatgacgatctctctactcttgaaggtctcatagcaaccgcagagagctactacaactggacagatgcgcagacaccgacggctgatgacggacatgccctgttcggcagagatgccatggcaaattacatgcttgtcggcgccaaatcgcttgggtgtcagatctttgaggtaaaagacggcgttatgacactgaattttgataaggaagtcatacgcaagctctgggactattactacgttccttatattaagggctatttttcttcttccggacgtttccgcagcgacgacatcaagaccggcaatatccttgcctatgtcggctccacttcaagtgcctccttcttcccgaatcaggtcacaactgacgattcagagggacatgcgattaccatgaaggcacttccctgtccggaatttgcagacagcgaaccttatgcggtccagcagggtgccggtatggtagtcaccagaggctccgatgaagaaatttcggccagtgtggaatttttgaaatggttcactgatcaggagcacaatcttgctttctccattgcttccggttatcttccggtcaccaaggaagcaaccgacatgaaacagattgaaaaaagcgaaccggcactgaacgatacaataaagcagattctgaccggtgcggttactaccgtcaacaccagccggctctatacaacaccggctttttcaggtgcaaacgatgcccgatccgtactggaatattccttaagtgatgccgcctctgcagaccgcgcagtcattgaggatcgtctttctgccgggcagccctttgaggaggccgccgcagattttcttaccgacgcccgctttgacagctggtatgaggcaacactcacaaagctggaagcctttcagggctgacgtatgatgactcagatatattccagaaggaggattcccttgcaatgaagaaacaaggccgatctatttttcacacgatttttcttgccatgctttcggtcctttttatcgaaactctgctgcttctgatcgtattgtacctgagcagagtaggagaacggctgaaccagaatgccatcgatctgcttcaaaagcaggtcgaaaaccgcagcagctatctggaaagcgtcatgctcgacaaccagaatctatcctctctgtccgacaaaatcaatacggcagcggaatctcttcgggaatccggactgatcgacatggagcatctcggagacaacagcaatgcctgccttcccctgatggaagcgattgattccgatctgattgaggagcttcgatctcactctgcgaccggactctttgtgctatttaatacacaggatctctcccggcgggaaatacattccgatatcccctgcatttatcttcgtgaccttgacccagatgctccggcgtctgaccggaatgcagatttgcttctgctccgtgccccggccgccatggtcaaatccatgggaatttccaccgaccgtgcctggacccctgccctttcctaccgcgggcttggtacctccggtatcctctatccgtcctttcaggcggcatatgaggatcatgcgcagctgtctgcctctgattacggacactggaccatcaccagctatacgctgaccggagatgaccatccggcgatcgcctataccatcccgctgatcctttcggacggaacggtatatggggtactcgggattgaaatgacaactgcctatctgcagtcgctgctccccttttgggagctgcaaaacgaacaggccggctcctacctgcttgcttcccacaccggaaatctgcaggatccggaagtcgccctttccgctgcctgctgttcaaccggcaccggaatggaagcctataactcagaggatacacttctgctgacacataagaaccggcagcagtttcttctgaccaatcacggaaaacgctactatgcggcactcacccccttaagcttctacaaccgcaatgcaccgttctcctccgagcagtggcttctgatcggagcagtggagtttgggcagctgttttccttctccaaccatgtgattctgctgctcggactcaacattttcctgatgctgatcgtcggactgatctgcagtctgatctgcagccgcaggctagcacgtccaatatcgcgcctttccgcggaagtggctgctgtacagaagaaccggagcacgatcccgaacctctctctgaccggtatccgggagctggatcagttctcgactgcgatcacgaccctaagccgggatattctaatgacctcgacaaaatttttgcggatcatggatatggccagtgtcgaactcggcggctacgaaatccgttttgacaccggcagtgtgtattttaccgataatttcttctccatgctcggcgtgaacagtgaggagtcgactgtattgacacctgtccagtttcaggaacggctgcaatcctttactgcctcctgcccccatacgtcctcgccaagcggcggacgggtctaccgcattgtacggccaaatggagaaactcgttatctccgtatggaggtcaggcaagaaggccaggctcagttcgggctgatcgaggacgtcacgatgaccacctttgaacggctccgcatcgagcatgaacgagattatgatacgctgaccgggctctacaaccgccaggcattccagcgggaaagtgaatcacttttctccgaaccaaaacagctgaagcatgctgccctgcttatgttggacatggacaacctcaagtataccaatgatacctatgggcatgactggggcgatcagtatatcagacaggcaggcagatgcttcgcagactatacaccaaaggataccttgtgcgcccggatttccggcgatgaattccatttgctgttctacggctatgaaagtcaggatgaaatccgcaaggtactcaccaagctgcgggaacagctgcaccagcagtcgcttccgcttccggatggcaaggtactgcacctgagtatctccggcggcatcgcatggtatccggaggatggcacacagttggatattttaaaaaaatatgcagactttgccatgtatcagatcaagcattcccgcaaaggtgcactcggtgaatttgaccttggcagctacaatcaggaagcctactccgcgcaggcccgtttggacctgcaccgactgatcgaaaatgagatgctcagctatcatttccagccaattgtctctgcccggaccggacagatcgtcgcctatgaggcgctgatgcgctccatgcttccgaccctgaagtctccggatacgatcatgaagctggccagagaggaaaactgtctgcatgacattgagcggatcactatgtttaaggcgactgaggcctatctctcccttcaggagcgcggcctgattcgcggcacggagctgcttttcgtaaactccattgccagccagcatatgactgacgaggagaatcaggaatactgccgtcgcttcgcggcaatacaaaagcagatagtcatagaaattaccgaagaagaaatgctggatccggcctctctggaggtcaagagaggaacaccgggctttcccggcaccttcgccctggatgactacggaagcggctacagcagtgaaaagaatcttctggagctctctccgaaatacatcaagatcgacctctcgatcatccgcggcatcgacactgacccggacaagcagcaaatcgtggcaaatatcgtcgcctacgcacacccgcgtaagatgctcatcatcgcagagggactcgaaacgccggaggaaatccacaaggtactcgagctcgatgtcgatctgcttcagggcttctgtctcgcccgcccggctgcaatcccgggatcggtgcattccgacgcgctggatgtcatctacgacttttatcacctgcaatgacagtctttacagcttctggcagatcattctgtcaggagctgtttttttattttttcatttccatatatggcaaaacagtaaatccactctttttataaacacggaccgcccgctcattttcttcttccacttccagacgaagcaacgcctccggatacttcgcttctatataatccagaaacttacttccaagaccggttccccggtaggcttcgcgaatatagagatcctcaatccacatacatggctttccaaactctgtcgaaaagctctttgctatcattgcgtagcccagaatctccatcccttcctcaaaaatatatccttccagatacgggctgtcgccgacacaggctgcgatatcgctcagaaaaatgttgtctgagccattcgtaaataccgctggcgatgcataaaacacctgcatcatctccagcacacaatccgtatccttcgccatcatcggccgtatcatgtgatagtccttttgaccttcgatttcgttcatcttcctctccttcctgaatttgacacacctgaagtccccggcaccgctcatcatcctgcgctacagattacggaggcttacttgactcgattaaaccgactatgctataatttcgggcagttctgcccatgcagaacacccaacgaagaatcttacacctgtttttcaaaattttcaaggaggttttatgagacgtaaggctttgaaagtggcattcccccatactttgccgatccttaccggatttgcctttctcggtctggcctacggtatttatatgaatacctccggttttccgttttactatccaatgctgatgagcatgctcatctttggaggttcgctggaatttgtcgcagttgaaatgctgcttagcccgttcgcaccgctacaggtatttatcatggcgctgctcattcaggcgcgtcatctgttctatgggctgtctatgctggaaaaatataagggaatgggctggaaaaagttttttctcatcttcggcatgtgtgatgagacattttcgattaattataccgcagaagcgcccgaaggtgtcgataagggctggttccttttcttcatcacactactggactatctctactggaccgtcagcgccactgccggcggactgatcggctctttgctgaagtttgacacatccggaatcagttttgtcatgacagccatgttcgtcgtcatctttctcgatcagtggctgaaggaaaaaaatcacgtttcctctatcatcggcctttctgtatccgcgctgtgtctcatctgcttcggaccggactcctttatgatcccgaccatgctcatcatcctcggcctgctcacactgctgcgcccaaggcttgaaagacaacaggaggatacactgatatgactgttccacagcaaatcatcacggtcggcctgtgcgtgctcggcacgatgctcacacgttttcttccgtttttcatcttccgggagaatcaggaaacgccggctttcatccggtacattgggaaatttctcccttctgcagttttcggcatgctcgtcatctactgcctgaaaaatgtcagctttctgagcggaaaccacggtctcccggagctgctcgcgatcgccatcaccgtcggcctccacctctggaagcgccagatgcttttctcaatctccggcggaacgatctgctatatgctgctgcttcggtttgtattctgagataccatcggatgaaaaaactatgagaaagatgtatgaagcaaaaacaatcttgaactctttggaagatgtaaaatccaacaacacggtaggcggggacaccgtaatttctaatataagaaacaaatatggcatctaaatttggatgtcagctgaccaaaagagcagaatccgatttagataggattgtctcgtatatcgcagttgaacttgcaaatccacaggctgcatctgattttatagaattcttaaaaaactggatacttgatcacgaaagcaccggtcacgcgttgatcggtgcttttttcgcactttacttctgaactcttgacatcaatactaccgtctcgacatgctcggtcatcggaaataaatcatacggccagcagccctctgcctgataaccgtgctttcgcaggtaagcgaggtcccgcgcctgtgtctgcggattgcaggaaatatagacaaccttcttcggggcaagggtgacgatggaagataaaaatgcctcgtcactgcccgcgcgcggcggatccataaaaactacatccgcatgctctccggctgccgccatctctgtcataaaaatgcctgcatcattttcataaaagcgtgcgttttccacggcattcatctttgcattgcgcaccgcgtccctgactgcatcaccgttcagctcgacaccgatcacctcttttgcctttcctgctgcgatcaggccgattgtaccgattccgcagtaggcgtcgatcacccgctcttttccgctcagacccgccagctccatcgccttcgcatagagcttttccgtctgtaccgaattgatctggtaaaaggatttcggggatatccggaaacggcagccgcagagctcatcctcgatgtagcccttgccatacagcacagtctcacgatccccaagtaccatgctcgtctttttgtcattgacattcagcacgatcgttgtgatctccggatgcagcttcagaagcgctttgacaaaattatttttcgacggaaggatcggcgaaccgagcacgagcacaaccatgacctgacgggtcacatgcccgacgcgaatcaggacatgccggaacagaccatagccggtatcctcattgtaggtcttgatcttaaaggatttcagaagatcccggatgtcccggatgattgcatctgccttctggtcctccaacagacattcatcaaccggaatgacattgtgcgttccttcctcataaataccggaaacgatctgcccgtcccgcttgtgcgtaaaaactgcatgcaccttattgcgataatgcagcggcgcttccatacctgtgatcttgtgcaccgtacagtatggcttcatgaggatcgatacctgcttctgcttctttttcaattgctcctcataggtcagatgaagcagctgacagccaccgcattttttctccacacggcatatctgtcccggaatttgttttttcttcgggaccgcagtaacagccagttctttaccggcttcctttctgcccggcctgatttcgttctttttccttgtggcagatccgctttcactgttttttttcattcccggctttttggctgatccgaccttttcgtttttcgcctgcaaatgccctgcccgacggtctgttttttctgtcactgcagccttttgtttaccaaaacgaaacgattcttttttctgattctttttttcctgcatgtatctgatcctttcttctaaatctctgcctctgattcacggcttccggattcctgcttctttctcttatgctttccttgtcacctctgtcactttttcctcacgccttcataatcgaacttcggaataaagctctcatctgccgtcgcaccctcctgatagaagccgttctctacgccgatctctgcagcatagtcgagcagccgttcgtattcccgctttgtcacacgccggttcaaattggggtcggcaaatttctccgacatcggtgtgtactgattcatcatactgatgtaaatctgatctccgtaagtctcatgcagatagcccacgaccttcttcgcctcccgcacatgccccggaagtaaaaggtggcgcacaatcacgccgcgccgcatgatcggactcgcttccgtccggtcctccggcataaattccgcctgcggctgctgacgtaccatctcagagatcgcctccatcgcatactgcggataatcaggtgcatgggaatacgctgcagccagctccggtgtcagatatttcagatccggcagataaatatctatcagcccttccagctgccgcagggtctctgccttctcatagccactgctgttgtaaacgatcggaatccgcagcccctggctcttcgcacacgcaagtgcccggatgacctgcggcacataatgtcccgccgtgaccaaattgatattgttagcgcccttttcctgcagctccaggaaaatctccgaaagacgggcttctgaaatcaccagaccggcctttccagatgcaatctcccggttctgacagaaaatacagccaagcgcacagccagaaaaaaagactgccccggatccggagcggcctgacaggcacggctcttcccacatatgcaaagctgcccgcgcgacccggatctgggcatccacatggcagcgccccttctgtcccgctgttcgatcgacacggcaggcacgcgggcacagggcacacggtgcgtatgaagtcttttgtgtttgcatagtatcgctttgttcttctttttttatttcactcatagatgtttggttctttcttttgataatgatgataggattgcaatctctccggcatctgcgccagcaagatcgccgcaaacatcagcgcgcagccgccaagctccctcacacttaagcgctgtccgagcagcagccagcccgccagcaccgagacgaccgattccaggctcaggatcagagatgccactgtcggatcggttcccttttgtccgacaatctgcagggtatagcccacgccgcaggaaaagacacccgcatagaggatcggctgccatgcctgcaagatcaggcgcatttccgggtgctctgtgatcagcatgcacacacccgagagcagcccgcacaccaggaactgaatacaggacatccgcacaccatctgctttcgctgaaaaatgatctaccactaaaatatgtaccgcaaagacaacggcacagagcagcaccagaatatcgccctttccgagcgccagccggtctgtgatgcagagcagatacaaccctgccaccgcaagcgccacgctgacccacacgcggatccccgcacgctttttcagaaagataccgaataccggcaccatcacgatgtacagtgccgtgatgaaccctgcctttccgaccgtcgtatactgaatcccgatctgctgcagattgctcgccacaaacagtgccaggccacagcagatgccacctgccagcagcgcgtggctgccatatgatgcaccacttggtgctccggttgattctctgccacatgacgctctggctgattctctgccgcatgatgcaccgtccggccgctgcttccagccatccagaaaccagatacacggcaccagcaccaccgctccgatcagacagcggatacagttaaacgtaaacgggccaacatagtccatccccacgctctgtgccacgaacgcaacgccccacaccactgccgtcagaaacagcagcgccgggcttttccactctgtctttttcataataatctcctcttaagctcttctggtcttttcctttctgactcctcacacaggcaggcagattttcccctctgctgctcatcactgcacacctgtcaatcgcgttttcatgatctgcactccttcagaagctcatttccgagtgtctgtcttctttcccagatatgcaccgaccagttccagatcctggtccttgatgcagtacccgtcctcatgcctctttaccgcctccagtgccttctcatacggcatccactccaccgcgtctacctcatcctcctgcagtaaaagcttcccgatctctaccggcttctgatacacatagacgaacccgatctcccggtcatgaaacggtcttccgtcaaagttcgccagtatctctccgctgtcgaaccgcccgatatacgtcagatcctcttcctgtgcctcaataccaagctcttctgacagctcccgtatcgcagagggcagcggttcatcccctgcctgaatatggcctgcagatgatgtatcatagcagcccggaaacgaatccttgcgaagactccgcttctgcagcagcacctcaaagccgtcatctgccgactgccgcacgacccacgtatgagctgtccggtgtatcgtgccaagcgtatgcgctacagagcgctccgtcgtctccccggtcggattgccgtccgtatcgcagatatcaaaaagctccagcggcttcccatccagcaccgcttccttcagcacatcgccctggtacatcaatttcagagaaaaaaacggtgcttcttctgcaatcagcttcaggaagatcttgtccccctcccacagcttcagcttcgtgacctctgccttttttacccattcgagctttccttcgttgcagtcagtcagctcaccctcaaatccatctgcagtatacagacacatatattccggcggccatccatctgcaataaatgtcacaattgcacggaaccggaatgaggtaagccgaaggcccgtctcttccatcgcctcgcgcagcagacattcctccgggctctcaccctcctcaaaatgtccgccgatcccgatccatttatccttattcacgtcatgcttcttgctcacacggtgcagcatcagatagctgtcatccttctccacataacaaagcgtggtaagtggtgatctcatatgcccctcctgtccataccaccagcctgccagtctttcgacagtccggcttttcttctaatcttccgttccatccagcgcaaacatcgcatgcaaaatacgccgtccggcagcggttcggaaaattttcgtatccacactccggatcaccttacgggtcgaagcattttcaaacagatttacgaggaaatctgcctctacgagaatctgatagtccatgccgtccatatctaaataggtatgatgatgtccgaccagatagcacacgcgatccacgacctcctgcggatagccgatctccgtcagcatctgccgggccaccggcggtccttccttttcttggagctttccgtcactgctcccgtacttctcctccgccaccttgatcccgatgtcatgcaccagcgccgccgcacgcaggatctccattgtctcctctggcagctgctcgccctcaccgatcattaccgcaaatgtatataccttaataaaatgctgaatccgcgccggatctcccccgtcataggaaatcatacgcagccgcagctcctgttccttcgtcatttttctcttccttttattatgtaccttttatcatgtatttttctgatcatgaagcatcccggctgtgcagcttcttgctgcacatttactcttcgaccgggcttggctctacctctcctgcctgctcttcaccggcccggtatcgtctgctctccttgatgagcacatcatgctcatttttctccggataatccagcaccagctcaagcagatgctcaagcacgcggccgatatccggtcccggcgtcataccgtctgcaatcaggtcctttccgctcaccgccagatccttcaggctcaggcaatccccgtgcagctgcacatcctgccagatatgctcaagctcccgcagatagtccagcttgcccggaatcacatccggatgatgcgccatgacatccgcccgcttcacaagcaggaatgaatcaaacagctccggaccgatctgatgcgccgcacgccgcacatcctttcccgtcagctgcgggtacatcgaatgattgcgtaccagcgtgcacacctgccgcatcgtatcgttgtcaaacttcagccgccgcatgatccgctccgcgatcggtgcactgtaggcggcatgtccgtgaaaatgatcctttccattctcatcggtcgtaaatacatccggcttgcccatatcatggaacagcatcacgagccggagtaccttgtccgacgggatactgcgcatcgccacgagcgtatgctcgcccgtcgtatatgcatggtgcggattgtgctgccgctgtaccatgatccggtcaaactccggcatgatcacagatgtgatcccggtctcatacgtcagccggaaccaatgcggcagcggggaggtcacgagcttcaccagctccgtctgaatccgctccgcactgatctgatccagctgctccgccatatcccggatcgcatcccgcacgtcatctgccagggtaaatccgagctgagctgcgaaccgcaccgccctcagcatccgcaaagcatcctctccgaagcgctccttcgggtcgccaacgcaccggattatcttatttttcagatcctccatcccgccgaactcatccacgagcccggtcttcggcgcatacgccatcgcattgatcgtaaaatccctgcgcttcagatcctctgtcagattcgaggtaaatgtcacgctcttcggatgacggcaatcctcatatgcgccatcaatccggtacgtcgtcacctcaaagccctcttttccatccatgaccgtcacagtgccatgctcgatgcccgtgtcgatcgtccttggaaacaacgcctttacctgctgcggagacgccgatgtcgtaatatcccagtcccccggtgtgcgccccagaatggaatcccgcacacagcctccgaccacataggcctcatacccggccccctgcagcgtctctaaaatccgttctgccttttctggaatttcaataaaagtcatcccttttcctttccgccgcctttctttcaaaggctgccattcctctttatcatagcacagcccccatcctctttaaagccaaaaattaaaattctgtgttctgcccgaaagctatttacatttctgatcggaaaatgttatagtaatgttactaatttgttttaggaaggaacgcaccttatgaaaaaaacatacagatatctgatgctcgcccttgccggtaccgcaattctctccggctgcggcaaaaaagacgatgataagcacgcagatgagaccgaggcttccgtatcgactgaagcggctgacgtgacggatacggagacagaaactgagacggaaacagaaagccgtacgctgcagccgatcactccgtctgattaccttgtaaaaaatgcttccgattatgtgacgctcggctcctatgatggcatcgaaatcgtacagtacacctacgatatcaccgatgagatggtgcaggagcaaatcgatgccgcacgtcaggatgccgctaccgaggaagaaaagagcggtccgtccacgaccggcgatatcgtctacgtgaccttaaagagctctgtaaaggacgttgcagacagcgaagaatcagaagatacgtactttacgatcggtgatgcagactacggcgaagactttgatgccgcactgaccggcgtatccacaggcgatgaaaagaccttctcgatcgatttcgacgacgacttctggatcgatacatgggcaggacataccgtgaacttcgatgcgaccgtcacgcaggtgacacagcttctggttccggattatgacgacgacttccttgcgacctacaccgactatacgacaaaggaggactatgaagcctccatccgctcctctctggaagacgaatacacacagacaagctactccgatgcgatcgccgagctgttccaggctgccgaggccgctactaccttcaacggctatccacaggagctctacgattcctgcaaggaggatgttctctccgcttatacggtcttcgccggagatgacgacacgagcatcgacgatatactcgatgcatttggcatcaccgatgcggacatcgacagcgagacactcgatgaggtcaaccaccgcctgctgatcagtgcttactgcgagcagaacaagctcgaagtgaccgaggacgaatacgtctccttcgtgaccgacaatgccgcttactacggtgctgccgacgctgtcgagcttgaagatatgtacacccgcgatgccctcgtatggaatctctacgaatccaagatggcagatcagctctacaaaaatgcaaaggtcaccgagacaccgtacaccgaagatgacatgctctccgaggatgacttcgcgctcgatgagaccgaggcactttccgaaaatacagacgataccgaagctgagaccgaagctttttgaccctaatttgtgcttgacacaaaaattcgttgtgatataatggaaactgctaaaagattgactggttaatgtatttcactcactattatagatcatgaaataaacctttataatctataatagtgagtgttttttgttttccggttcacgcgtaaaagttaggaggtaccaagatgaacaagggtacagtaaagtggttcaacgcagaaaaaggctatggttttattaccggtgagaacggatctgatgtattcgtacatttttctgcaatccagggcgagggcttcaagactctcgaagagggacaggcagtttcttatgatttaacggaaggcgctcgcggaatgcaggctgctaacgtagtaaagctttaataagaataccgaatgttcaaaggcggagctcataaagagctccgccttttttgtacaataattattccctgtcataccgtcaggcgcttacgaccgcgcatccggatttaccggcccgtccgtctgcccctcctggttggacggcatctgcgccgcttcccgcttcttcctcagctcctcgatcgcctcgcgcaccgccgcctgctcctcatcctttgcgatctttccggccagacggatcgtacgcagcaggtttgtcagcaaaatgacaaacagcggcacgagaatcacaggcacaaagatcagtggattcgcggccagacgggagagcttgccgagcagaagtgaggaacctactaccttgccgagcagataattcgagtgcacctcgtatgcatcctccacattgttggcgtcgcccttcgtccggtacaggtagctgccgtccggctgcgcctctgctgcagtcacacggtgtgtattcactgccccgtccaacgccgggtcagaagaatagaaggaaataatatcgccctcctgaatcgcagagggcgcttcctttttcactacaattaacgtatcaatcgcatacgtcggctccatgctcccggtcgtgacacgcagcatcgtatagccaagcacctgcggtgcctgcccggacggtgtaaataatacaagcaccagcactgcgaccgccgccacaatgatcagcagcgaaacagtattgatcaacgtatacaggaatttttttaccataaatactccttaccttttgcgcccgaaccggcgatggcctgcaccggcagctcctgcctgcgccgcagctgcagtgagctttttcagacgctcctgcacctcgcacctttccttctctgactcctgaaggctgcgctgcgcctctgcaagcctccgctcgccctctcttcgggccgcacggatctcgctggctgcttcccggcgtgccgtctctgcctcctgcaccgccttgcgctcggcatcccggatcgtctcttcctgcgcccttctttgtgcctccagtgctgccgccgcctcacgcttcgcatctgcgagcacggtggcagaccattctttttctgctgccagctccctgcgcagtgcatccagctgtgcctgcagcgcctcacgctccagttcggcacgctctgcctttttctgagcggccgtcagcttctcctgtgcttcctgcttcgtctcctttagcaccttctgcgcatccagctccgcagtccgacgctcctgttccgcctgctgctgcgctgcagccagcgctccggcagcctctttctctgcgatgacccgtgcctgctccgtctgatgcttcagctctgcaagcgcgcgctccgcctcctgttttactgctgtcagatccgcttctgcctgtgctttggccgtttccagttcctgctctgcctgtttcttcaccgagatgacgagctcatccgcctcccggcgcactgccgtcatatcctccctggcatgacgcaaagcggcctctcttgccagctcagcctcgtgcagctgctcctccagcgccttcttctcacccttttcattctccagctcggactgcaccgcatcgaactgcgcctgcagcacatctgattgctgctccgcctgtatccgcgcctgcgtctcaaaatccagctgctgggaaatcgtctccttctcccattcaagatcgccgttctgacgttccagctcctggcagcgctccatctcctgcttcagcttctcctccgcctcaagctgtgcctgtgtgacctcctcgacgaatacctgtcggatctccacatccggaatattccggtcctcaacaatctcttctttgatctccctgacgaacttcggcctcaccggctcatacttcttctccgccagctccgacatcttgcgcggatctgactccagaaggctcttgaacaccgtataattcgtgatcatgttcgtgtacatctgcagcaggtactcttcatcaaattccagcgccgtgtcccgctcctcgatcgtatagccgacgtcatcgtagctttccatgaactgccagagcttgtagcaggtgcggtagctcggatccttcatcatcaggttcgtccgctggatcgggctgtgtaccttcgcgcagcccgacatgatctcacagaacgcgcttgaccgcagcgtccgcaccatccggcgcaggcggtcgatccgtttgaatatctccatattatcgctgtcattttccgcgtagctctggcggttcttgatcgtcatctcgatcttgtaggagatctcctcgtaggcatcatcgaccttgctctccatgctcatcacattgcaggtctcgtcaccggtcgaccagaagatcacatccgtccgcttgtccacgaatgcaaacaggcgctgaatcagatgatagataaaccggttctcatacaggtcatagctctcctctgtcgtgacattgagcacgcgcgtcggctggatatcgccgttctcatcactcgcgatgaactgcgtgttcatgctcagatggcgcacactgtccgctgtgatcttcttcgccagcgcgaccggcacgacctcctccgatgtcgtgatgaacctgcgcggcttgtccacgatattgaaaatcgcgtcgatgccttcctcgatcaccttcagccacgtctcatcgacgaccttgtgcagtacccggttcttctggtcgatcgtattctccccggcctgcaccatctcaaacagatattgaaaataccggtcttcctcaagcgcgccttctacctgctccgcatatttttcatataactcactgattgtatttgccatctggcctgttctcctaacccattagtacagattctgaatccgtctcagataatccacactgtccggcatacccgccgcgccgaacagcttctcgatatactcgatcagttccgtgatctcgtcgcgcacgaaattgacgttcatactttcaaatttcttcagcaccttacgtgcaatgatatagtccataccgccgagctccgttccgccgcaggccacatagaccggcacaaaatcatacatctgcttgatgatacgattaccgaacgagagcttgaaccgcgtggaaagatagctgtcaagcttttccagattatccagcatctccttgctgatcggatggtcgagcttcgcctgctcaaagagcgcctgcagatgctctgcggtgatgaagcactgcggatgcagctcacactcaaacgcatcggcacggtcattcagctcgatcggcattgcacggtcatagactgatatgatacccattccgcgggatggaaacttgccagctgtttttctggtaaagcggacattcgcaatccgcttcgctacttgctcatgaacgcagtcgcttcgcgcacttaaagcgggggaatgctcatctgcgttcaattgtagattcttttcactcttttgaagcctctgcgagaagctcgcagatcttttccatgtcgtgctccggggcggtttgctcgatggcatcatagatgcgccggatcagcgccggatcttcttccaacatatctgcggtctgagccggggtatagccttttgcagccttgcgcatgaccaggctgattaattttaatatcattccttcacgctttccttcacgttttccctcttgcttcaattcctgttctaattctttcatggctgtacacatattaaacctccccccttctgcctttatagcggctgcctgttttgcgattttgggtgtctttgtaacactgcctaccatcaaacctatttccggattcatctcaaaattttgataaagctggttgatttcagaaaactggcggttgtaaatcatccgcaccaaccgaaatgcgttttctacatccgggtctgaaaagagtagctggtcacttttccggatttccagtaaattcattttatagtcagacacaagcgttctatagccttccggaattttcagcatatctgtcagatatcttggtccatcccagtctttttccccatagtacacacacaatgtaattacaggatgaagccggtctgtcttcttaaatctggatagatattcatccgtcgaagaatattgattttgttccccatttatcttttgaatatctttgcattcctgaagatagagcatcacatcgccctgcaagattctcaacggcatcgcataatggatcttctcctgattttccagacccaaaataacaaaatcaacaccatgcgccgttttctttacaacatccagtgatttttgatacgcttttcccagatcgtttctttttaatatgccggaaatatcggtatccgtttcctctaaatctccagccttcagtacctgttgtcctttaaacagaaacgcattaaacagatccgcgaaatgttcgttttttctccagaattcttttaatacgatatccggttttggaatctctgtgtttgacgtaatcgtaccctcgctttctataattattgtaccacagttacattcttgggaaaagtatcttttaagttccccataagttccttttcctttcattttgcgtgctttaccgcttcacgcaaagttctttttgttttaaatacatctctttttatattatcataattcgggtttgattacaactttttgtttaataaattcacaaaatcatttttatatagcgaatgcagcaaaaaaagacagccaaacgcttcctctgtaaaggaaccattccgctgtctttctgttttgtctgaaatgagaagttctctcatctttgaaaatgcctgtcgtttatcctttgagtccccgcgactgacggtccatatcctctacgacaatatcgtagatctcgccaagtgtggagcaatactccagcaccttccacggctcatttgtgtggaaatggatcttgatcagctcctcgtcgccgactgccagcaggcagtcacccttgaagtgctcgacaaagtaatcgttgatcgcatcctcatccagattctctccttcgatcaggagctgtgtgtcataccgaaattccagcataagcattttcctttctgatgtattgcatctgactcacattcttccgtacagctctgtcagctcccggatccgtcctgccagctcaggagcgatggcatccggcttcatgcgccactgccagttccggcccagggtcgacggtgtgttgatccgtgcctcggagccaagtcccaggtaatcctgcatcggaataatgactgtatctgccacagaggcaaatgccgcccggatcatcgaccagttcagggcatcgcccggatgaatattcagatatctgcgggtaaagtccagatcctctgcactcacatgctctttccagcccataaccgtatcgttgtcatgggtgccggtgtagaggacacagttgtgcggataattgtgcggcagataatcacccggctcacggctgtcaaatgcaaactgcagaagcttcatgcccggataaccggtatcttttacgagctgcagtaccgtcggagtcaggaatccaagatcctctgcaataatcggacggtcgccaaatctctccttgatcgcattcatgatatccatgcccggccccggcatccatttgccgtttgccgccgtcgtatcgccgtacgggatcgcaaaatactcgtcaaagccgcggaaatgatcaatccgcacgatgtcatacagctcaaagcatgttgccagtcgctccagccaccactgatatcctgtctttttatgataatcccagcgatacagcggattgccccagagctggccggtcgcggaaaatccatccggcggacagcctgctaccgctgacggtctgccatgctcatccagctgaaacagctccggatgcgcccatgcatccgcactgtcagatgctacatagatcgggacatcgccgatcatctggatccctttttcatttgcatattgcttcaatgcgctccactgctgccggaacagatactgctggaactcatagaaacgtacttcgtcctccagctttgcctgataagcctccatggcagccggacggcgcagtcggatgtcatcctcccagtcacttaagctcttaccaccaaatgcattcttgatcgcactgtaaagtgcatagtccggcagccatgccgcatacttttcaataaatgcttcaaacgccgccgtctcttccttatatcccgcccatcgctctgcgacctgcagtgcgtatgggctgttgtgatacgccatgcgcaggatacggaaccgctcgctgtatattttatcataggaaacgtactccggatctgctccaaaatcagctgcggccagctctcccgcctccaggtagccggcttcggccagctgatccagatcgataaaatacgggtttcccgcgaatgtggagaatgactgatacggcgaatctccgtatccggtctgccccagtggcagcatctgccagtaggtctgtcctgcttctgccagaaaatctacaaatttatacgcttcctttgaaaaagctccgatcccatacggagacggaaggcttgagaccggcattaatactccgctctttcttttcatccgctttttcctccattgatcttagttattatctcatctgtttttttgtcacgatttatgttcgatctgccggacggactccttctccagcagcttcccctcaaatatctggctgcgattgccgcagcgcccgtcgatcatatcatagagctgattgatgatcgcatctgccatcttacttaccggctgtgccacagacgtgagcttcggctgcaggtaatcacccagctcgctcccgtcaaacccgaccacggagacatcctccggaatccgcagtcctgcctcatgtactgcccggtacacgccagccgcaattatatccgagaacgcaaatacagctgaaaacggtgccccggactcaatcagctttttcgtcgtcatatacccgtttgtcatggtataatgctctatctcgtcagatacggggcagatcaactccttcttttccggtatctgatagtctgcaagcgccctctgatatccctgcatacgcagccggccaaccgaagaatcccgctcctccgccgaaataatggcaatatcccggtgccccttccggatcagatactctactgccttatagctttccttctcatcatccagcgtcacatgcgaataacggctcagatcctcatcttcaaaaatcgatccgaccgtaccaagtacaaaaggcacattgatcttttccagctctccttccggatgataataattcagcccaaggaaaataatccctttcagtctcttttccttaatcagttccagtgcaaccgccacctcatcctcattatagttgatatgctgtagcagcatatcaaatttgaagcgcttcagtttctcatctaacacccggatcatagagctgaacagtggattcgtgataccctttaccaggaccgccactgcattggactccgtgcgctttaagttccgcgcactgttattcggaatatatccatactgttcgatcgtttcctgtatctgtttctttgtggtggggttgatgtcagggtgatcgttgatcgcacgggataccgtactaacccccacaccacacaatctggctatatccttaattgtgacttctgacatcactgcctcccctctggatgcacacggacatttccgcatacaccactgctgctattttttatttcgtattcttttactttgcgtcgccgatcacgactgcttcctgaatcggcgcatcggtctcaatccgaagcgctccgctcgtaccaatctgccgcatcggcgcattctccgtatcaccggcggtcgcccgaagcgtccacgtccggatctcgccagctgcattataatcataaagtgtctcctgcatttctccggtgcagaaaatgtttgccttcagatgctcgaaatatccatcctccgtacctgcttccgtgctctgcagtacacatgtattctcccgctgatataccggaagctctccaagcttcggctctacagtcacatactgtccgccgtccagtacctctccggtaaaatagttcacccattttccgatcggaagataaacgtcatagcgcttccggtcaaacggcggtgcaactaacaacgcatgaccaagcatatagctcagctcctgataccgtgcagccggatccttcgggaactctagaacaagcggccgcagcatcggaattccattctgatggcattctactgccgtgctgacaaggtacggcgacagtctgtttcgtattgtatcaaatctgcgcacattttccaatacctcatttccaaaatgccacggttcccgcggtgtttttccatgtgcacgtgacagcggcatcaaaaagcccagctccagagatctctcatactcctcctgcgtcggcgggcattcatttccgtccgcgccggtattgtaaaagccacccatgtcaaagccccagaatgccacacctgacattgcgagactcaggccgccctttacaatcgccgcatggttgttcagcgcactggaggaatcgcctgcccaggcagccggaatccgatgagatcctgcatagccgctccggccccagagcatcggaagctctccggtttcctttttatattcctccatccagcgatagatcgtctctgcatagagataggtcagacggttatgtccttccacaccgtctcttccgtcataataaacagcatcctccggaactgcctcagagaaatcagtcttaattacacccacgcccatatgaagcaccttcatgacgcgcggcttgtaccacgccaggaactccggattggagaaatcaaagcaggctgagcgctctgcggaatctgcggtcgaataaaacagcgccggctctccgctcttatttttcacaaaatagcccttgtcagacaattccttaaagatcggcgaggtctctgccagatacgggaaaatccagagacttaagtggacgccgtgctccttcagccagcggatcattccttccggatccgggaaccgctcctcatcccatacccatgctccggcatatccatccttctgccagccatcaatatgaatgacacgaatcggcacctgctccttctcgcagcgcagcacgacctcctcgatctcctgacgggtctgataggagcaccgtgacatccagaagccaaacgcccacttcggaatcagcggaatcgcgccggtcagctgtacatactgagacagcagtgacttataatctccgcgcccgcctccgatgaagatgtaatccaggcggccatcctctgcctccatctgatagctcacctgcgaagtatggcccatatcaaaggaacagcgggtataggtattcatgagaatggcataacccctgctgctgataaaaaacggatgtgccttgtaggaatcctctgtgtttgtggacagcgcatccttctgccagcagtgcagcagctgtccgcgtttattcagatctgtaaacttctccccgaatccccagaatgcttcatcggagtataagtacattgtttcatggatccggcagcactttccctcttcatcataatgccagccagtcggaaggtatttccaccgattgtctacattcgtgtcaaatacctgctccttcgtcagcagctcgccttcctcgtacacggacatttcccagtaatccttgcaaaaacgcagtgtcagcttttctgtcccgtattcacagaaccgctcctgctccgaaaagcttcccggataccgggtttccggtacaaagaccggattgcccgggcggtctgtctcaccttccggaatcagctgcagccgaaatgccgtctcagtcagaaagcagacctgtacttctgctgatttcccctggtatgtttctactgtaatctgcaggccgtcctgctttgcagaaaaggagaccggttttagaagaaaatcatatgcctccttaaaaatagttctgcgataccccacctgcggattataatctaccttcataaaactagccgttactgaaaacttataaaaaagttataaacttctatgttccattcctactttaacgaatatgcttttgatgatataaatatcaatctactcacaagttcttgtactctccat

SEQ ID NO: 3640 - DNA, 15094 bp, Unknown
  16S sequences of unknown bacteria
ggtggcgggcggcgtgttcatcttttcggcgagttggcgcatcttgtttcgcgcgatgaagggattttccacgttgagaacgccccccacgcagccgcccgggcagacgttcatttccacgaaatcggcgccgtcgagtttgccgtcgctcatctcggtcagaagccccaatacgttgcggatccccgaacaatggatataattgccgagtcccagcccgttgctttcgccgcccgaagagccccagttgatgccgaaatgaccgcatttgcccaatttgcgcggcttttcgatcttgttcatcttttcgaccagacggaaatacacgtcgctctgcgagagcacgcccgatatgtatttttcgttggaaacttcctctttgtgcagggagtatacctttgcggggcagggcgagatgaagaaaatgccgatatcatctgcgggaatgccgcgcccgatcgcccgttttttggcgagtttcgccgcgatcttggcgggcgcgtacacttcgagcatatggtcggcaagttcgtgaaatttcattaagatgagttcgacgacggcggggcacgccgtgctgatgacgggacggggcaatttcccctccgccatgagttttttcgaacagtcggtgacgagttccgccgctagtcccacttcgaacacctcgtcgaacccgagcgccaaaagcccctcgatgacgtaattgggatcgtccagatgattgaactgcccgaacagcgacggcgagggcagcgcgatcttataaggataactcttcaccagatcgaaactgtcgtatacgggacgcttggcgccccccttgcaactgcggatacattcgccgcagttgatgcacttctcatactgtattttcgccttgccgttgacgatacggatcgcttcggtaggacatcggcgcatacacgtgatgcagccgatacacttttcgtcgtctaaaacgaccgttttgagcgttaccatttcttcacccttaccgctaaaaattcacccgtaaaaacaccgtcgtacccacgccgaccgtgctgtcgatgcgcatttcgtcgctgtattttttcatattcgggaggcccatgcccgcgccgaatccgaggctgcggatattttccgacgccgtggagtacccttctttcatggcgagcgcgatgtccgcgatgccgggccccctgtctttgagccagatatcggcgtggtcgggatagacttccacctccgccctgccgccgtgcgcgtgaatgaccatgttgatctccccttcgtacatggcgatggcgacgcggcgcaccgacgcgggggctatgccgatctgtttcaaggtgcgcttgacgctctcgctggcgttgcccgcggaagaaaaattctcgccgtccacgtcaaaaccgagttttacgcattgcatttcattcaccgccgcccagaccgttggtataaagtatgccgcaggcggtaaacagccgctcttcggtggaaagaagcacaatgcccttttgccgcgcgagttcgacgacctccgattccggacgcttgccgcgcacgaacacgatgcagagcatatccatcatttcggcggtgcgcacgacctgcggattcaaaagccccgtcagaagcaccgattgatctttcacgtatgccaaaacatcgctcatcatatccgaaccgcacgccgtatggatatcggtgtccagatgatcttccccgcataatatttcggctttgagaagccgaacaacatccttgattttcattttatgtaactcctttgttctatcataccacaaaacgcgcgcgttttcaagatattcggtcaaaataaaaggacgggaatttcccgcccttacattgccaaacggcaaaacaggtctatgatcagtcccgccgccgtacccacggtatagagcacgagcaccatcagacaattttttttgagatttttcggatttttgaagagcacgaccagccccagccccgcgttggaacacagccccgcgaacagcccgccgaaggaaatgccgcctaaaatgtatgtctgcgtgaggatgacgctgctggcgcagttgggtatcaggcccacgagcgcggtcagaaacggctggaacacataaccgcgttgcaaaaacgcggagatctgttcctctcccgcaaaataaaagatcacgccgaatacgagattgaccgcgaggataaagaaaaagatctttaaagagtggtacaggggcgtgaggatatagcgctcgataaatccgttgcctacgcgggcgcagtcgtcgcattcctcacagcacgcgccgatgggttcttcggtcctgtcgagcctttcatgctttaaaaaggcgttcgccgcatagccgacgacgaccgcgagcagaagtttcaatccgatgagcggcagcacggagagcgctttggaaccgtcggacaacaaaataatgatcgcctcgtcactggtggcgatgaacaccgaaagaatcgttcccgtgcggatcagtttgcggtcatacagtttggcggacatcaccgaaaacccgcattggggaacgatacccgtcaaggcgcccagaagaggcgccagattcccctgcaacacgccgcccttcttgccgatggcggtgttgtgttcaaggacctcgatgactgcgtagatcagaaacaggaacgggaataattttaggctgtcgacgatcgcgtcgacaatgatatccgtcataaactacccgtttcccctgaaataatgaaattatatcacggcgcagacagtttgtcaacggagcgagcccgcagcggcgtaaaaaagaggcggctccgctgcggaaccgccatttttttgtcgaattcggttttttagaaatcgatatcttcgtcgttgtacacggcgagcaacaatttttccatgtcttcctgcgaaggctggcggggattggaacccgtgcacgcgtcgctgatggcgagccgcgcgacctctttcagtttctgcttatattccttctcgtcgatgatcgaagtttccgctttcacgccgccctgtccgtaatttttgatggactgcgggatatccaactcgtcgttcatatggcgcagttccttgacgagcgccttgacgagcgcatcggtggaatcgccttccaaaccgatatagcgggcgatgtacgcatagcgctccgccgcctcggcgtttttggcgttatactgaatgaccttgggcagatacatggcgttggcgcagccgtgaatgatatggccgcccgtaaacgccgcgcccgtcttatgcgccatggagtgcacgatgccgaggagcgcgttggagaacgccatgcccgcaaggcactgcgcgtcgtgcatggtggcgcgcgcctgcgcgtcgccgtcgtaggactttttcagattttcgtgaatgagtttgatcgcccacaatgccagagggtcggtataattgcagtgcagcgtggaaacgaacgcctcgatggcgtgcgtcatcgcgtccatgcccgtatgcgccgtcagtttggcgggcatggtctccgcgagcgcgggatcgacgatcgccacgtcgggcgtgatattgaagtcggcgagcgggtatttgatgcccttcgcgtaatcggtgatcacggcgaacgcggtcacttcggtagccgttcccgaagtagagggaatggcgcagaatttcgccttggtgcgaagcgaggggaacgaaaaaggctgaatgatcgcctcgaacgaggtttcgggatattcgtagaacacccacatggctttcgccgcgtcgatcggcgagccgccgcccatcgccacgatccagtcgggctggaattcgcgcatgacctcggcgcccttcatcaccgtttccaccgaggggtcgggctcgacgttttcgataaaacgcacctccatgcccgcttctttcagatagccgaccgccttatccacaaagccgaatctcttcatgctgccgccgccgagtacaagaaccgcctttttgccttttaagtttttgagttccgccaaagaaccttcgccgtgatacagatcgcggggtaacgtaaaacgtcccatttttgaatgcctccgtttttttaaattttcgggaacggttcaactgccgctcccctttttccgaacatattttatcacttcccccgtattctgtcaacggtttcaatggtatcgataaaaatttatcaataaaattttatcgatttaacacaaaagaaaaatccctccgcgtttatgcggagggatccgtacttattctgctttgttctggtcgtcgggattttcaggctgctcgtcgtttgcggcgccttcctcttcggcggcctcggctgctttcgcgtcggccttgtcgcgcttggcggcggctctcgcttcgcggcgcatcgcggccttttcttccttggtcacgaccttgttcttctcgatgatcgcctgcatttcggcgggcgtcagaggaatgaagttggaagaagactcgttctcgggcgtaacttcatagccctcgtctctggcgagaatggacatttcggtggtcgcgtcgaacaggtggatgtgattcgcgtcgaacgccagttcgaccacttcgcccctgccgatggtgcttctcgaatcgactttggcgatcatgttgttggaatcgccgatgatggtctcgatctcctgtccttccttaaagtcgagtttgcagtaaatgagcgtttccgcgccgagtttctcgacgacttcggtaaacacttttacgacggtgtcgggagaagtagcgataaatctctcttcctcgtgaatatcttcgggacgcacgcccagcatgatgggtttgcccgtattcacgtaatcgtcgatattgatgatcttcgcctctaccgtcttgggaagagcgatcttattgttggtgaattctacatacaccttgtttttggatttggtgagcgtcgcggggaagaagttcatctgcggcgttccgataaagcccgcaacgaactggttgatgggataatcgtacaaattctgcggggtgtccacctgctgcatgaagccgtctttcatgacgacgatgcgggtacccatggtcatcgcctcgatctggtcgtgcgtgacgtaaatgaaggtggtggcaagtcttgcgtgcagtttggaaatttccgttctcatctgggcgcggagtttcgcgtcgaggttggacaaaggttcgtccaaaaggaagactttcggttcgcggacgatggcgcggccgagcgcgacacgctgtctctgaccgccggagagagccttcggtttacgggtaaggtagtcgctgatgcccaagatggcggcagcctcttttacgcgttcgtcgatgatctgcttgggaacctttctcagtttcaagccgaacgccatgttatcgtaaacggtcatgtggggatacagagcgtagttctggaacaccatcgcgatatctctgtccttggggacgacgtcgttgacgagtttgccgtctatatacagttcgcccttggaaatttcctccaagcccgcgatcatacgaagagtcgtggattttccgcagccggaaggtccgacgaaaacgataaattctttatctttgatttccagattgaaatcggtaaccgcggtcacgcccgacggatacaccttataaattcctttcaaaaaaaggcttgccatgaatacacttcctccctacaaatttatctattatctattttacacgatttcaagcaaaaaaacaatgggcaaatattacaaataatcaataagattgtgtcaacattgcccaacgttcggaaaatttgttgtacttttacatattttctgctataatacagatatcgtttcaatcagaccgcgcacatgcgcgtaaggggtcattttatggatatcaataaattttcaccgaaatttaaggtgtcttcgcccaacctgatcaacctttccaggctgaccacagaggacattttcgaatatctgtacgccgccaaggcgctcaaaacaaagtaccgcgcgggagaaaatcccgctcttttgaaacataagacgatcgcgcttttgttcggcaacgtttccacccgcacgcgcatctctttcgaaatgggcatccgccagttaggcggagattttctttttctccccaaaggcgaaacgcaactttcgcgcggcgagagcatccgcgatactgccgccatgttcaagcgctacggcttttccgcgctgatcctgcgcgcgttctccacggaagagatcgaaacgttcgcaaaatacagcggtctgcccgtcatcaacggcatcagcgaaaacgctcatccgttgcagatcctttccgatctgttcacgatctgggaacataaagggaaactcgaaaatctgaaacttgcgtatatcggggacggaaacaacattgccaatacccttttgatgggctgcgcaaagtgcgatatgaatattacgctcgccagccccaacaattaccgcccttccgaatccatgctggaacgcgccatgcagtatgccgacattcaactgacttcggacgtgcgggaagcggtgcagaacgcggatatcgtctacaccgacgtgtttatttccatgggcgacgccgaatcggaggaaaagaaacgggttttgcgccgctaccgcgtgaccgaagaactgatgtcgctcgccaaacccgacgcgctgttcatgcactgtatgcccgtgcaccgcggcgaggaagtgacggaagaagtgctcgacggcccgcagtccatcgtctacgaacaggcggaaaaccgcctgcacctcaacaaagcggcgctcgcgctgctcgtgaaataaatgtacattcacgcaaattttttcgtgctgacgaaaaacaatcggtttaaaaagagaggtctttcggacctctcttttagtctgttctgcccaataaatattctaccgagcaatcaaacaattccgccaatttaataagcgcattcgtgtcgggtatcgttccttcatgcctccatctcgaaactgaggaatgcgcgactccgcacgcctgcgcaattttataatcgcttaaaccgcttattttcgaaagaataataaacctttcatgaaatgattttggatttttgcttaaagttaatttatcgttatcagtcaatcctaacatataatcaatggaactgtggtttaattccgccaactgaatcaatttatcgtaacgcggttttgtatttccactcacccaacaagcgactgttgtgtaaccgatattcagtatctttgccaagcctctgcccgaaacttttaagtcttccatcaactcttttaatctttccacaaagttatctgtcataatttaccctaaaaagttactatgacagtattatgtctatttttagaacaataattttatatgacctaaatatagacgtagttttcgacaaataatgtttaaattagtgttttttcgaagatttttctcatcagattttattgatgacctaataataaacgtattataatataagtacaataacaaaaaggagatttactcacatggaaaacaaaagcaactcacaaacaagcaccgcggaagaactgatgaatttcgttcgaatgatattgagcgaagaatggatcgcaaaaatttctcccgttcatcaaaatcatatcgatatcgatatgctgaacgatgaaaaaaattcagaattcaaattgaaaaaatataaaaaagagcccccgaaatttcgggggctccttacttatctgttatggcgcatatccgcgccgaggtcgcttaaaaaatacgactgtatctttttcagattgcgtgggtatttataatagaaatccgttctctttaccgaatcgtcggaaaaggtaagttccagcgagaatcccgcgccgtcgtagataacttcgtcggttttgtaagaatctttccaaccgtatatgcccgccttgcggatgtgcgaaacaaacgcctcttcctgctcttcagtaaacgtggcgacggttttcgggttgttgtactgctgcaagatctcttctgcctgtccttcttccgcacggtctatcatttcttgcagcgcttcctcttcggcaatcgtaatatcgtagacgatatttttttcaaaatcgaaaacgcggtagtcgtttatgccccacagccccatgccgtcacctccgtgatactcgattttaacgagttccttatcgtcgtattcggtcttgggcgcgcagcctgcgagtgccagcgccagaacgagcgcggcgaaacacgcaaaaacttttttcataaatccccccttgtaaaaagacggagccttgcaatgcatgtcgggccccgtcgttttgtcttataatttttccgcgatcgcttgtaaaaattcgcgggaattcagtttttgcggcgcgatcccttccgccttgaacagaggcacaagatcgcccgtcattttgccttcctcgatggtcttgacggtcgccttttccagttttttggcgaacgccgtcagttcggggatttcgtccagttctccgcgctttgcaagcgcgcccgtccaggcgaaaatggtcgccaccgaattggtggaagtttcttccccttttcgatgcttgtaataatggcgcgtgacggtgccgtgcgccgcctcgtattcgtaattgccgtcgggagatacgagcaccgaggtcatcatgcccagcgagccgtacgcggtcgctaccatgtcgctcatcacgtcgccgtcgtagttcttgcaagcccacagcacgccgccgttgctgcgcacgatgcgcgccaccgcgtcgtcgatcagcgtgtacatataatagatacccgacgcctcgaatttctctttgtactctttttcgtacaattcctcgaagatgtccttgaaatgatgatcgtattttttggaaatggtatccttagtggcgaaccacagcgggaatttcaaatcgagcgcgtattggaaacacgagcgcgcaaagcccgagatagactcatcggtattgtgcattccctgcacgacgccgccgctctttgcaaaagaatgaacgagtatcttttctttttccttgccgtccgcgccgactacgctcagatacgcgctgtcgccttgttccgccgcggcctctacgctcgaatacacgtccccgtaggcgtgacgcgccagcacgatgggcgccgtccatgtgggaatatagggcgtgatgcccttggcgagaatgggcgcacggaataccgtgccgtccaggatcttgcggatggtgccgttgggactcttccacatttgtttgagtttatattcttccacgcgctgcgcgttgggcgtgatggtggcgcacttgacgcctaccccgtattttttattggcattcgccgcgtccacggtcactttatcgtcggtcgcgtcgcggttttccaatcccagatcgtaatattccgtctttaaatccacgtagggcatgatcaggatctctttgatccactgccacagcacgcgcgtcatttcgtcgccgtccatctcgacgagaggagtcttcattcggatcttttgcattgcggtacacctcttgattcgtttttcttctgtattgtatcaaatttatgcaaaaattacaagcgtttgccgtgagcggcgggcattttgttgatgacgccgcacgagagcgccactttctgcccgtccttgacggcgcgctcaacaagcccctgctcgataacgtcggtcagaacttctttaaaatcgccgagtttctcgcagaaaagataatacgcgagcgaaccgggcacggtgttcatttcattgaaatacacttcgccgccgctgatgagaaaatcggcgcgcacgatgccgcgcagatccagccgcttatataaaagtttggtatagcccttgatgagcgtttcgtcgcgtttggaaatacgggcgggaaacgccgcggtgcgctccttgccgccctctatgtatttatcctgaaaggtcaaaatctcccgtttgagcgcgggctcctcgcattcggaaacgatcacgtcgccccctttgcggtaagcggcgcagttgatctcccgcttttcggcgaaaaatttttccgcgagcacgatgtcgtcgtaggcaaaagcggtttcgagcgcgcctacaagttcgtttttatcgtgcgccacgatgatgccgatggacgagccctgccgcgacggcttgatgatgacgggatatttcaggcgcgtttccacgcacttgatcgccattttgccgcgcttgtcgtaatcgcgcttgcagatcttaaaggaatcggcgcatttgacgcccagcgcgcgggcggcgagtttcgtcgcagccttatccataaagagagaagaggcgagaagatctggcgaggcgttggcgagtttgttgaggtcggcaattgcggcgacggcgccgtcctcgccgccgcggccgtgacagcagttcaggatcacgtcggccttgcacaactctttgaggcggctgcccttgcgccgatacagtttgccgtccgcaatcagcgcccgccccgctttttttcggaaagagggatcggaataaaaggaaacgtccctgaggcgcttgtcggcgaacatttcgccgtccgtgttgagatagacgggatacaccccgtatttttcttcgtccacgaggttggataccatcgtgcccgtgataacggaaatttcgttttccgaagacattccgccgaaaacgacgattacgtttttgcgcatgaaaaaaacacctccgctttattttggcatttttatgccctttccgctttggtgtttcttttgtttggaaatttcaatatatatcgggcagatcgtttaaaaacaagaccgtatcccccgttttcaactcggcggcgaggatctctttcgctttgtcgagcgtgggcacgagcgtcagtttttccttttcgccgcccgctttcagatacccgtttttcagttcgcccgcaagcgttgcgccgaccaagataacgcggtccgccgcgacgagtttttcgcccagcgcggcgtttgccgattcttccagaatgcccatttccacgagccccggcgtcacgacaaatttcgtccccccgaagtcacacaaaacgtctatcgcggctttcgcgccctcgatgttggaattgtaactgtcgtcgagaatggtcacgccctccccgtccagtttttgcaggcggtgcggcacgaattcgagttttccgatcgccgcgacgatgtcttcccgcgtggcgcccagtttccacgccatggccgccgccgccgcgatattgcgcgcgttgtgcgcgccgagcagtttacagtgcgccttttcccgcaatattccgaacattaaatcgaaatcgatgccgtccgggctcgtgcgcacgttttttgcgcacacttcgcccccttcgcccgcgaacactttgacaagcccctcgcagttttcggcgagcgaacgcacgttttcatcctctccgaatacggcaaatccgccctctttggtgcccgttaagatctcgcccttggcgcacttgacgttttcgagggataaaaaagtttccagatgctggccgcagatgcccgtgaggatacagtggtcgggctcgaccagtttgcacaactcttcgatatctcccacgtgccgcgcgcccatttcggcgatgaaatattcgcagccgtcgaggtccgtcccgttgatgaatttcgctatgcccagcggcgtattgtacgaggcgggcgtggcgagcaccgtatgcttttcggatagcatggcggcgagaatgtttttcacgctcgtcttggcgaaactccccgtgataccgatgcggacggctttgctttccgcaagtttttgtttggctttcgcgacgtagcgcgcgttcttgggattttcgtacagactgtcgaaaaagtttgccgctcttaccaacagcggcaaaagaacgggcaacagcgcgagaggcacgtagcggagatcccgcacgatcccgatgcccgaatagtgcgccgcggcgttgaccgccagaacgatcgccgcgcctgcgagcaaaaagagaacgtattcggcaagataaatgtgcttgacgcggttcgtgggaacgagcggcactttcagagcgcgcttatcggcatagaaatacagtccgaaaaagagcgggaagggaacgagagatatgtaagccgccgccttgcccgtaaaggcaaaacagaccgcgagcaccgccgaggagagcgcggcgagaaagccgagaagcgccaggcgcgaccatgccatattcccctttttcgtcagccatccggcgtattttttcccgtcgtatcccaactgctgcaatccgcccaacaacttgaacgtgcacagacagcacagcgccgccatggcgagggatatgagaaaatattccgcgatattcggtaatgaaaacataagtcaccttcctgcaaaaaatgaagtttcagcgcaaaaactcccccgcgatcctgttgaatgaatcgggatcttcgctgaaacaaaaatgcgtgccgcgcatcgtgacgagcgcgccgtcccgtacgccttcgctcagaattttgcccatatagaggggcgtggcggtatcttgctgcccgaatacgaacagaacgggattgcgaacgtctttcagacagggcgtcagatcttcgttgacgatctttttataactttcccgcatgacgggagaaagcgttctgtattccgccgaaccgaaatgtttttcggcgtagcggggcgcgatcttgcgcacggcgcggtaggaaaaaacctttgcgcggtacgagatcccgcgcttgggcggaatgcccgcgcagcccgtaaacacggctttcaaaaagcgttcgccgtgcgcggcgagaagtttcagccccaccctgccgccgaacgaatgcgtcagaagatgcgcgcggccgatatgcagttcgtctaaaagcgcgagcgtatgcgccgcgtaatcgtccaccgaccacggctccgtgaggggcgggctcttgccgaatccccagaagtcgaaggcggtgacgcggaagtactttgaaaaatattttatctgccagtaaaaactttctttgcacgagagatacccgtgcagcagcacgagatcttcgcccgcgccctcctgaatcagcgaaacttcgctttcggacaagtttttacctccttatttttacgtcagatctttggccatgatgacggcgtcctcgccgtcgccgtagtagcgcgggcggacgaattttccgcagaaaccgcatttcaaatacagggcgagcgccgcgctgttggaaacgcgcacttccagaaagacgcgcttcatgccctctttttgcaaattctcttccagtttgcggacaagttttctgccgatctttttgccgcgatgcgcctcgtctacggcaatgttggcgatatccgcctcgtcaaggccgacgatcgcgccgccgtaaccgacgatctttccgtcttcttcgcacaagatcgtgcggaaacggccgcccataaacgaatcggcaagcatctgaaaactccacggatcgcgaaaacacgccttttccagttcggagatggcggcgatgtcctcgtatttccactccctgaaaatcattttttctcctcttccgcctgactttttttcagataaaaagcggcgatctcacccatatcttttttcagaacgcgcgcccgcaccgcacgggacaaccctgccgcaacgtccgctttcgtatatgcgaacggcaactcgtccgcggaaacggccacccttccccgcatgagcggcaaaagttccgcttcggaaacatagcggggcgcgatatcgatctgcttattcgggtcaaacccgcatacgtaatagttgccgcgggcggcgtctatgaccgcaagacacgctttctccgtattatatgccagcacctcgaaagaggttacccccatggcgggagcgcttgtccccaaacagaaccccttgacggcggacacgccgatgcggatgcccgtaaaagaaccgggccccgtgaccgcgcagaaaaaatcgcaatcggaaacgccgaggttcgcctgagccattgcgttttcgattgcgtccatcaagcgcacggaatgctgcaaagcgcaatcggacgcgaaaacaacgctttccgtcccctctctgcacgcgatcaccgttaaatatttggaactcgtatcgattgcaagataattcattctaccgtgatttcccgtctgttttcctctgttttccgaatcgtcacctttttgcagtgcgggggaagaacactctcgatattttccgcccattcgatgaggcatacgccgtccgcataaaaataatcggtcaagcccaacgcctccgcctggccgccgttttgcaggcggtaacagtcgtaatggtacaatttcccctgatagtcgttcatgtacgcgtaggtggggctgacgatctcgtcctcgatcccgaaagccttagcgactcccttgacgaaaaccgttttgcccgcgcccatttcgccgcccagaagcaccacgtcgccctttttgagggtgcgggcgtactgcgcggcaaattcaatcgtttgttcttcgctgtcggtaaccatatcaacagtatagtacatttcgcgcgcttttgcaattaaaatctattgaatagccgagaaattctcttatacagaaggacggtcacgagagatacggcaattcccttgacgagattgaaaagcacgatataccaccaaagcaccgcaaaagcctcggcggcggtcatgctgagaaactgcgcgtacaacggaaaattgatatagcggtttacgacgagccccgcggcgtttaaaaggacgcagccgacggcgagcgttatgcaaacggtcttgatgccctttttgtaacgatagacgaacgtaggcacgatgatgaaggaaaaggtgagaagaaagttcgcaagttcccccacgcccgcggtctgcgtatcgagaagggacaaaagttccttgacgccgctgatgacgacggcggtgacgggcccgtacataaatccgcccaaaaggacaaagacggcggaaaaatccaacttcagaaagggagcc

SEQ ID NO: 3641 - DNA, 6937 bp, Unknown
  16S sequences of unknown bacteria
ctgaacaaggtcacggcgcgcaacatcttccgctacaagcgccgcttcttcatggcgctcatcggcatcgcgggctgcacggcgctgttgctcacggggcttgggctgcatgatggcatcaacgacatcctcgacaagcagttcggcgagctgctgcactacaacatgaccgtgcaggtggacaaggaccagaccgacgccgagcgtgacgccaccctcgaggcgatcgaccaaagcccactcgtcgagcgcatgaccgccgtccagatggagcccgccgtcgtgcgttccgcgaattcggacagagacgagcgcgccacgatcgtggtcccacaagatgccgtcgagcttcccgagtacgtgacgctcaggacgcgtctggggcatgagccgctcgacctcaccgacgagggcgccatcgtgagcgagaagctcgccgcccagctgggggtgggcgtcggagacacgatcgagacctacgagcagaacagcgtgggcgacgcgacgggcgaggggcacccggtgaaggtcgcgggaatcgccgagtactacacggggcagtacgtctacctcacgcccggctgctacgagaccgcctatggcgaggcccccgcgttcacgagctacctcgccgctgcgcccggcacgctcgaggagcggaccgcgctgcaaaatcagctgctcgacatagggcatgtgcaggtcgtcagctactacgacgaggtcgtgggcacgtaccagaagatgctcaagactgtcgactcggtcgtgtggatcttggtggtggcagcggcggcgctcgccttcgtggtgctgtacaacctgaccaacatcaacatcaccgagcgcatccgcgagatcgcgacgctcaaggtgctcggcttcacgcccgccgaggtcaacgcctacatcttcagggagacgtttctgctcacgctgttcggcgcgcttctcggctgcgtgctcggcgtgggcatggagagtttcgtcatcacgacggcagaagtcgaccagatgatgttcggtcgcgagatccatctcttgagctttgccatcgcgttcgtcttgacgctcgcgttctcgctgctcgtcatgctgttcatgaagcgcaagctcgaccgcgtcgacatggtggaaagcctcaagtccgtcgagtaatcaacatgcaatcgacagagcgccccggggcacagcgcgtgcgggtagcgctacactacagggcagtcaacagctgaaaggacctttgcatgaaaatcgaacccgagcagctcgacgtgctgcgcacatatctggcctccatctacgacgcctgcgagaaggcgagcgccgcgggggtgagcgcgacggtcaacggcgagaggctcaacttgcgccagctgttcgagatcgagaccacggcgtacctgatgtacctgagcgcttcggataacgtcatcgaagaagacgaggtcgccttcatcaatagcctcatgagccgcacgtattccctcgacgactgcgtcaagttcatcgagtcgagccagatgagcgccgaggagttcctgtcgcagccacccgtctcgttcaagctactcgccgcgtatggcggcgcggactacgctgatgccatggacgccctcatcagcttctacgatgtgctgggcatggcgctcagcgaggtcgacgacaatctcgcgctgcccgagcgcaatgcctacaagagcttcgtctacatgctccgcggctacaaggcgctcaacgagccccagcaggactagtcacggcgcttgttagctctgctcgcgtggttggcggaccggttcagtggcccacgccaatcgtcttgcagagcataagatttgatcactgagccaacatcaaaggcccccgataatcgcctcgtcggcgatgatcgggggctttgtcgtgcacgcggggcgtccttggtgaaaggtgctacgcctgtgcttgctctgcggggagcttgggcgtacggttcttcttgcccagcagatactggatggccgtcaggacgatgatgacggcgatgccgaccaagtcgctgatcgtctcggggaccatcatgctgatgccggcggcggcgaacaggatgcggaacacggggttgatcttcgtgaacaggttgccgttgagtgcgcaggcgacgccgtacaggccgatgatcgacgtgatgatgacgatggaaagcgtcaacgcgttgatgtcgccttccaggaccatgacggggttgagggccaggatgtagggcacgatgaacgccgcgatggcgagcttggcggcgttgaggccggtcttcatcgggtctgacttggcgatggcgctacccgcatatgccgcaagtgctacaggcggcgtgatgtcggcgacgatgccgaagtagaacacgaagaagtgtgcgggaacctgcgggatgccgagtgcgatcaggatgggagccgtggtggccgccatgatgcagtagttggcggtggtcggcacgcccatgcccaagacgatgcaggtgagcatcgtcagcacgaggccgatgatggtcgcgtcgccggcaaagttgacgatgacgttgatgagcgtggaggcaaggccggtgatggtgatgcagccggcgatgaggcccgccatggcgcaggcggcggcgacggtgatgcagttgcgcgcgccggactgcagcgcctcgtaggcggcggaaagcgacaggcgcagcgaatccttgaagacatcaccggcggacttgtcctcgggcttgagcctgagctcggtcatgaagaagttgatgaagccgatgacgaacgcgcccagaatggagatcgcggcggagtaggccatcgtgcgtgtgcccgtggagacgagccacacgagcaggacgagcggcaagatcaggtagcagttcttgagcaagaacgagatcttggggagctggtcgcgcgggatgccctgcaggccgagcttcttcgcctccaggtgcacggtgatgaagatgcctgtgaagtagagcagggcggggatgatggccttcacggcgacgtcgatgtagggaacgcccatgtactcggccatcaggaacgccgccgcgcccatgatcgaggccgcctcgacggcaccggcgaactcgggcttgtagccggtcttcttcatcatcgggatggtgaccgaacccgtggtgaccgtgttgccgacggacgagccggagaccatgccgcacagtgccgacgagatgacggcgaccttggccgcgccgccggacgaccaacccgcgatgcggttagccagcgagatgaagaactcggcgatgcccgtgcgctcgaggaacgcgccgaagatgatgaacagcacgatgtaggtgtagcacacgttgatgggcgtgccgatgaggccgctcgtggagtagaagagcttggacgtgagattgcgcagcgtcatgtagaggttcgtgccgttgttgaactgccagtagaacacgtacacgagcaggcagatgaccacgaccaagatggggatgcccacgcagcggcggcacagttccatcaagatgagcgtgcccaccagggcgaccgcaatctgcagcggctggatgcgcgagcccatgtggatgatctccgtcgcgttgaacgcgaagtagaagaagcatgcggcacccaccgccatgagcacgatgtcgtaccagggcatgtggttgggccgcacgtggttcttgcggatggggtacatcatgtagccgacgatcgtgacaaaagccaagaaaagcgagagcctcgtctcgggcagcgcggtggagaacagcgtcatgaagatgcagtaaacggaaaacgccgcgagcatgatggagatgacgacctttggcgtgccctcccagatgcgggtgttggactcgcggtcgtacttgcgcatgacctcgtcgacgtcggtctctgcctcggcgcgcttgcgcgcctcctccttttccttcgcgtccttctcgagcgcgatcttcttgaattcggccgtgctttggacgtgtccggcgactgccttctggacatcctcctctgccttttgtctatcgaactgccccaacgtaatactctcctactagtaatcgatagagccgccaaggggatttctcccccggcgactctccttgcaatgccgaatcgcacggtgcgagcgtcgtgcgattcgagcggtatgccgttatttggtcgtgaccttcacgcccttttcctcgaagtacttcgcggcgcccttgtggtaggggacagaagagatcgaggttgccttctcgatgctgagctccttgtacttggcgtgactcgagacgaggtcgggggcgttgtcgaagatgtccttgacgaacttgtacacgtcgtcttcggagacgtcgtcgcgcgcgatgatgacggcggagaccgcgacggtcgtggtgtcggtggtcatggtcgagtaggtgccggccgggatgacggtcttgctgtagtactcgctcttctcgaggagcttttggatgtgcgcgtcgtcgatggagacgagataggcggccttggacgtggacaggtcggtgatggcggtggtcggtgcgccggcgacgatgaacgcggcatcgatcttctcgtccttcagggcgtcagcggaatcgccgaagctctggtaggtgggcttgatgtcgttttcggtcatgtcgtaggcgcccaggatgtcgatggcgttgaagtagacgcccgagccggcggcgccgatggagacattcttgcccttgaggtcggcgacggtcttgatatcggggttgcaggtgacgatctgcacctgctcgtcatacagcgcggcgacagtcgagatcatgtcgacgggtgcgccgtcgaagaggtttttgccctcgtaggcgtaggcctcgacgtcggactggcagaaggcgagctctgcgttgccgtcctcgaggtcctgcacgttggcctgcgagccgttgccgttccagccgccgaagttgccgttgaaaggccggcgttattggtggcatgctgggcgatgacggagccgaaggcgtagtacgtgccgctctcgccgccggtcacgaagcgaagctcgcccgagtctcccttggagctgccagaaccggagttgctggacttgttgtccccgcccgagcaacctgctccgacgagtgccatggcggcggcacccagacctgcggaaccgagtacaaaacctctcctggatatagatttcatgtaactgctccctccgatatgcatacttatttgatatctcagcaaaaatatgcattcgaatgaaattccccgtacatcgaatgcatcgagattcgtgcattatacccattgctccactcaactggagtctgaaatagattaatagtcggttaactgcgccaaattttgtcttgaacgagccctctagctgggcttatgctgaattccgatgttcgactatttttgtaggctttgagctttggaggcagctatggcaacgatggaagatgtgtacaagttcttcaaggaagaggcgccgacgtactacctggcgacgatggacggcgaccagccgcgcgtgcgcccgttcggcaccatcgacttgtacgagggcaaactctacatccagacgggcaaggtcaaagacgtctacaagcagattctggctaaccccaaggtcgaggtctgcgggtgcaagggggctgactggtggcgcatcaccggcgagctcgtcgccgatgaccgcaccgaggccaaaaagcacatgctcgacgcctatccggcactgcgcaagttctacgacgagaacgacgacaacaccatcgtcttgtactttgcccccggcaccacctgcaagttcgattcgcttgcgggcaagccgagcgagacggtcgtgctctagcggcgattgtcgcgaaaagggcggacggccgggcctcgagcgaggaaaaccccggcggtctcgggcgcagaaggggcgaagcgacagtacgtcgtttcgccccttgcgctttcgggggcgacggactcataatcgacagccgtgcggctgtgccgagcgatggtacccagttgggactgtacgcaacggaggcgacggcgcgcacgactaaatttctccccgcgcgatgcggggcaagagctggtatccgatgcgaaaggaacgggactctgaactcatgacgtacaaagaaaaactcaagcaggcagaccgcgaggcgcgcgcagcccttgtcggccttgccgcgaccatcgtcgtgtggctgctgctcggctttggggtggcgcagacggggatcgtggtgttctccacgccgctgtgggtgttcacgggctgtctcggcacgtttgcctgcgcaatcgtcgtctctgtggtcatggcaaagcgcgtcttcaaagacgtcgcgctcgaacaggtcgagcccatctccgatgagggggagtgcgatggcgatgcaaggtaatcctctcgtgctcatcccggttgtcgtcttcctcgcgttttccatcgggcttgccctggtcgtgcgcatgcgcgcgaagcagtctgcagagggcggcttcatctccgagtacttcatcgggtcgcgcagcctgggcggcttcgtgctcgccatgacgaccatcgcgacctatggctcggtaagctcgttcgtgggaggacccgggcaggcctggtcggttggattcggctgggtctacatggcagccgtgcaggtcacagcgctgttcttgctgttcggcatcatgggcaagaagatggcgctcgtgagccgccgcctcaatgccgtcacggtcatcgacgtcatacgcgcacgctacaagtccgatgccgttgccaacgtctcggcggcgatcatcgtgctgttcttcgccgcgatgatggtcgcgcagttcgtcggcggggccaagctgttcgaggcggtcacgggctacagctatatcgtcgggctcgcgccgttcggcatcgcggtcctctt

SEQ ID NO: 3642 - DNA, 11414 bp, Unknown
  16S sequences of unknown bacteria
cccagccatgataataaatgccattggcggccaatgcgttggtcaccagcatcgtgcagtcctgcgtacggccaagctgcgccagcgctgcctccgcgatcccattgccgttcacatcataatgaacatcagagccggacgctgcctctgccgcttcttcctcacggcgctgtgcctcttcttcctgtctcttcttctcttcctcggccttcttctctgcctctacgacggctttctccttcgcgatgccctcttcgtcgaacacatacacgatgccgtcgatctctttttcggtatccttcagcagctttccataccggtcgtgataataggcattgtcctgcgcatcataagtccatccggtatacaggacgccgtattcatccagctcatagcgctctccatccacctcgatggtgccggtaagcatgatgccgtcttcatcaaaataatgctttctgccgttgatggtctgccagccggtcaccttgcggccctcgtcatcgacatagacatatctgccctcttcgatctccacatactgcgcggtgatcgcaaagccttgctcgtcatacaggcagtcgccgttccagccgctcagcagcctgccatcttcctgaaagcaatatgtaacatcgtcgatcgtctgttcgccgcttgccattcgtccatccgttccgaaataataacggaagctgtcgatctcctgccagccgaacaccatttccccgttgtcatcaaaataatacgttccatcatccagatgcagccatccgactgcctgttccctggtggattccaggacataataacggtctgcgccttcgccatgccatcccggctgtgcttcatacgcataaacggtggaaatgacaggaacacacgtcgcaaagcagagtgccaatgcaatcttcttgccgtgtctttctaaaaaattcattgaatcacctcgttatcatcgccaatactttagcacagccttggaaatcttgcaaattcgtaagttttaaagccgaaaaaaatgcatgttcaggatcttcgaaaaccctttgtttatcaggatatccaaaagactatgtgatttggtgtgatttctgcatgaaatgatcattcccctgttttcactgttccctcatccatgattttcataccatccaagcgcatatttcacatgatcaggcacacattgaacatgaggtgatcccgatgaacaaaaaagcggcagatgccgcctaccgccgatatatggccttgcttgccaggatggaatccggcgagatcacacctgatcttccccgtcttccccgccgctgacctcgatgggatgcacgagcagcgcgcgccggtaccgctgaagcgtccccatgcactgcaagagcaccacgagccaaaggacgaggtagaccacggcgctgagcatgccgatcatgcgcagcacgacgatgacctcctgcagcgagctcgagcgaagcgccagcagaaacaggacgccgaccgccaggaaatacagcagctgcacgaaggtcatcgcggcatatttccagatgcgccggctgccataagcgaagaacaggctgagcaaaagcagcgcccattcccacagactgagcgcagaaagcgccgtgctcagatagtcccaccaggtgccctgcgcgatcgacatcgcctgcagcaccatcctggagatggcgaaccaggacatgcgctcatcatccagcagaccgaacaggccggcgtaatcattgaccatgatcagccggcttgcggtatagagcgcaagcgcgcacacgatcatccagccaaaccagcacagcagccgcatgagcaggctgcgcttttcccgcgtatccacaaaactgtcaatataatcagccacgatccagccagtcctttcctttgatcacttcctcgcgcgaaagctgcgggtaatccagctgccgcagcacctcatagaccgcgatggccacggtattgctgaggttcaggctgcgcgcggatgccatcatcggcagccggatgcagcgcgaggcatgggcgcgaagcagcggcagcgggatgccggtgctttccttgccgaataccagatagatgtcccgcgtacatgccgcataatcgaatgcgtccggtgtctgatggccataacgcgtaagaaagaacagctcgccctcgccatgcgcagccagaaagctgtcccaatcgctgtgcacctcatactccagctccttcacataatccatgccggcccggcgcagatggctttcatccagataaaaccccagcggttcgatcaagtgcagacggcagccgaacgccatgcatgtgcgcatgatgttgccagtgttctgtgggatctccggctcatacaacacgacgtggatcatcgctctgcctctttcatataagcgatcagctgcgccagtgcgcgtccgcggtgcgatatcgcattcttcttctcctcgctcacttcagcgagcgtcgcgtcatagggcggataatagaagatcggatcataaccgaatcccttttcgccgcgcgcatgatccgcgatctctccttccaccacgccggtgaacacatggccggcgccgtcttcttccacatacgcgatggcgcagacatagcgcgccgtcctcgtcttgcccttcacctgatccatgatgtactgattcttttcctcataaggcgtatcatagcccaaaaaccgtgcggaatatacgcccggcgctttgtccatcgcatccacctccagcccggaatcatccgagatgaccgggatccccagacgttcatggatgctcagcgccttgatcatcgcattttccgcaaacgtcgttccggtttcttcgatctccactttttcctccaggtcgagcaggctgcgcacctgaatgcccagcggtcccagcatttcccgaaactcctccaccttgtgcgcgttgctcgtcgcgatcatgatttccttcatcttatcacctgccgaaaccattttagcagaagcgcatggcgatgtcacggccggcagaagatttcatccagctttcagccggcacagtaaaaaagaatcgttttttccgggcaaagcgctggaaatttttacctgtatcgcgtatagtaagggtgttgaggataaaggaggatattcaacatggctaaatttgtttgtactgtatgcggatacgtatacgaaggcgatgctgctccggaaaagtgcccggtctgcggtgtcggcgctgacaagttcaagaaagtagaagaaggcgagatgacctgggctgcagaacatgaagtaggcgtagccaagggcgtaagcgaagacatcatcaaggacctgcgcgccaatttcgaaggcgaatgctctgaagtcggcatgtatctggcaatggcccgcgttgcacatcgtgaaggttatccggaaatcggtctgtactatgagaaggctgcttgggaagaagctgagcacgctgccaagttcgctgaactgctgggtgaggtcgttacgccttccaccaagaagaacctggagatgcgcgtagaggctgaaaacggcgctacggccggcaaggtagacctggctaagcgcgccaaggaagcaaacctggatgccatccatgataccgtgcacgaaatggcacgtgatgaagcacgtcacggcaaggcgttcaagggcctgctcgatcgttacttcaactaagatccactgaacacacagaagaccgcggtctgcaaggacacttgctcgccgcggtctttttctgtctgcctgcgtcagccgtcacgcaaacgcgttgcagatcttgatgatgaagcgcatgagcgcatataccctggcataatcgctgccttcgatgcggacggtgcatggatcgacgcgcatggtctggggcattctcgagacaaagtcggcgttcctttcccgatggaacgtgatgtccatgacatagcggtcttccgggtagatcgcatactgatcgttcagcgccagccttgcctgctcatcatactgccgtacgagctcgtcatgcgaacagcagatggccgtggaggaatcgatggcctccttggtctgcacataatgcacgctgccccgcagctcatccgacagctgctttttgagcagggaatccccgctggccaggatgatcggaacgccatgatgccatgccagatgcgcgttgagcccgctctcgccgatctcctctccgttcagggtgatctttcggatcatggcgccccacatggtatgcgccatgatgcccggcgtattgctgcggcagtgatagccgatcaggcatacgccgtccatatcagcgctgatgccttccatcatgccatacgccttgaacgcaccgtggctgcagacgagcctgacccgcggatccagctcttccggaagcagattgtccatattgccatgtccgtcattgacgaggatcgtctgcgcgccatgcttgaacagcgccttcgccgcaatattgacctcatcgatcatccgccggcggtactgttcatattctgggacgccaggcatggtatacgcgccgttgacattgccccagatgccttcgatatcggccgaaatgtaaatgttcttcatcgtcatccctcccctttttacaggataacataaaaagacccggttgtcccgggtcattgtcgattaatacatcggagcctgcggcatcggtgccggttctttctccttgatcgcagccacaccggcttctgtcgtaatgaacagagcagagatgcttgcggaattcagcagcgcgctgcgcgtaaccttggtcggatcgatgatgcccttctcgaacatgtcgacccactcgccgttcttggcatcgaaaccatggttttcatcagccttcttctgcgcttcgacgatctcttctgcgttatatccggcattttctgcgatctgcgcgatcggtgccagcagagcgtcaaatacgatcttgattcccttctgcacatcgaccacatcagacttcagctcatccttcagcgccgtgtacgcctctaccagcgcagcgccgccgccgatgacgatgccttcgctgactgcggcacgcgtcgcattcagggcgtcctcgatgcgcagcttcttttccttcagctcgctttccgtcgttgcgccgaccttgatcacggccacaccgttgttcagcttgcccagacgctcagccagacgcttcttgtcatagtcgctggtgctgttttcgatctgtgcggcaatttccgcgctgcgtgcttccacggctgccttgtctccggcaccgccgatcatcgtcgtgttgtccttggtgaccgtcagcttcttgacctgtcccagatcagccatcgtcgcatctttcagctccatgttgaggtccttagagaagaacttcgctccgcacagcacagcgatgtcctgcagcagttccttctggttgtcgccaaagccaggcgccttggtcgcaacgacattgaatgttccgcgcagcttgttgaccaccagcgtggagatgacttcgttttcaaagtcctccgcaaccagcagcagcggcttattggactgcaggacctgctccagcagcggcaggatctcctgaatgttgctgatcttctgatcggtgaccagcaccagggcattctccatatcgacctgcatcttctcgcggtcgctcaccatataaggagaaacatatcccttgtcgtactgcagaccttcgctgatctccagttcggtctcaaatccattggacgtatccacgctgatgacgccgtcgcgtccgaccttttccatcgcttctgcgatgatctggccgacctcgctgctgccggaagaaatcgtcgcgacagaagcgatatcgttgctcgtctccaccttgcgggacttctccaggatatgcttagcgatctccttgcttgcgtattcgatgccttcgcgcatcagcaccggattagcgcccttctcaacggccttcaggccattctcgatcatgttctgcgccaggatcgtcgccgtcgtcgttccatcgcctgccgtatcattggtcttgttggcgacttcatagacgagctttgcgcccatgttttcaaacttgtcttccagttcgatctccttggcgatcgatacgccgtcattggtgatcagcggagaaccatattccttctccagcacgacattgcgtcccttcggaccaagcgttactcttactgcgtcagccagcgtattcacgcccttgagcatcgcctgacgcgcatcctttgaaaaacgtacttcctttgccatgtcaaataccctcctttacgctgcgactgccagaatatcttcatcggcaatcacgatatattctacttcatcgatcttgatcctcgtaccagaatactctttataaacgactctgtcgcctaccttgtatcctgcatccttcacgccttcgccgatcgactcaacgaggccgatgctcggcttgttcttgttctcgctagtcagaatgattccgcttgccgtcttgttttcctcttcttcttttttcaaaactacattgtcatgtaatggtttcagcatttcaattcctccttcaagaattagcactcttagcacctaactgctaacactgactattatactcatttttagcactttgacaacccctctgctaatcttttttacagattttttccaaaagaaaagcagacgtcagaaacgcctgctcgatcaggttattttgcacaggaatgagaaccgcagtcatgtccgccttcatgctcatgatgatggcaggatgcgtcaggatcatccttcagcgcccctttggcaaaagccgcaagggccatgcgcgcgtccatatcgacaccgcggacgacgcagatccctctttcgctcagcgcgttcacggcgccctggccgatcccgccgcagatcacggcatccacgccccattcgctgagcaatgcgctcaaggcaccgtgtccgctgccattggtcgaacgaagctgctcgctcttcacctcctgatcttcgatctcagcgaccagaaatgcagaggtcttgccgaaatgctgaaagatcctgccgttctcaaacggtactgctgctttcatcttactccccctttgtcaacaaggcatccaggtcggcatcgatgccgaagatggacgcaaactgttccagatcgccgcgcgcgctctgggcgtcgacataacggatgttctgtctggaccatgaattgaccgcgatgtccgcgctgggcacgccaagcgtatccacgccagccgcttcgatctgtgcgcgcagcgcttcttcatcgctgctcgtctcattggcgaaggtctcgatggcgtcaagcacgctgctcagctgtgcgctctctccctttttcacgaagatcgccgcctgcggataaccggtgtctgccccggtatcgttcttttccgcatacagctgctgcaagtcggcgatgaccttgagatccttgccagcttccttgcccttggcaatggtcgcgctcacggccggttccgccagcagcgccacatccgccttaccgctgagcagctgtgcctgcgcgtcgctgaccgcattgtaatacgtcacgctgggcgtgatgctgtccaggtcgatggcattctgcagcacgagctgcgggacagccgcttcgccaaacgcggcgagctcgccttcttcattcagcgcatcctcgtcttccgcgacgagatacaggttgccccaggtgatgacggcagccagctcatactgatccgcgccctttgcggcgagggtcatgcccagattgctcggcgccacgatgatatcatattcgccgtccgctttggccagctcgctctgcagcacgtcgctgccactgacgatctccacatcggcgacattctcattaccgaacgcgcccagtatgccaagcgccggggccccgctcggcgccaggatgttcacttcttcattttgtccgctgccgcagcctgccatggtcagcgtaagcaaggcagcgcaggtgatcttccacagctttctcatgcgcgcttctcctcgatctcctgcacgaaggcatcgatcgcttcctgaagcggcagcgtcacgctctgcttctgtccgctgcggcggatggtcacggtgcgctcctcacactcgccctcgcccacgacgatctgcgccgggatcttggcgatctgtgcctcacggacacggtatccgagcttttcattgcgctcatccacgctgcagcggatgcccttggccttcagcgcctcgcatacttcatgcgcatacgcgccatgcttttccgccagcaccgggatgatctcgatctgcttcggcgccagccacatcgggaaatgtccgccgtaatgctcgatcaggatgccgatgaagcgctcgatggaaccatagatgacacggtgcagcatgaccggacggaccttcttgccctcgctgtccacataggtgcagtcaaagcgctccggcagattcatgtccatctggatcgttccgcactgccatacgcggcccaggctgtcgcggatatggaagtccagcttaggtccgtagaacgcgccgtctcccgcattgatgcggaatgtcttgccggctgcgacgcaggcgtcgcccagcgccttctcgcaggcatcccatgtcgcgatctcgcccatgaaatcgtccgggcgcgtcgagagctcgatgtcgtaggtcaggccgaagatcgaatacatgcggtcgatgaacgcgatcagccgcttcacttcttcttccacctgatccgggcgcatgaacagatgcgcatcatcctgcgtaaaggtgcgcacgcggaacaaaccgttcagtgcgccgctggcctcatggcggtgtacctgtcccagctcgcccatgcgcagcggcagatccttataggaatgcagcgtgctgttgtacacgagcatggcgcccggacagttcatcggcttgatggcaaattcacgctcatcgaccatcgtcgtatacatgttgtccttgtaatgatcccaatggccgctggtctcccacagctccttgctcatcatgatcggggtcttgatgaactgatagccttccttcgtatgctcctcataccagaactgctccagcacattgcgcaggatcatgccgttcggcaaaaagatcggcatgccggccgcatattcgctcatcatgaacagcccgagctcgcggcccagcttcttatgatcgcgcttcttcgcctcttccagcagctgcagatgctcctcgagctcttccttcgtctcgaagcatacaccgtagatgcgctgcagcatcttgttgttcgcatcgcctttccagtatgcgccggaatgcttgagcagcttgaagttgcggcactgcttcaccgtgtccacatgcgggccgcggcagagatccacgaattctccctgacgatagacggtgatgctgccatcctccagattgctgatcagatccagcttgtactcatcgtccttgaacatctccagcgcttccgctttggagatctcctcacggacgatgcgctttccatccttggcgatcttcttcatctctttttcgatcagcggcagatcgtcatcggtgatcttcttatcccccagatccatgtcatagtaaaatccttctgaaacgaccggtccgacccagaactttgcctgcggatacagccgcttcaccgcttgcgccatcatgtgcgcacaggagtgattcagcttgctgagctgctcattttccttgatgtcaatcatgttcatgccttcctttccaataaaaaacgacagaacctcaaaggacgttctgtcaagcgcggtaccacctttgttcatacggatcttccgtatgccctctcttccgttaacgccggcgacggcccgcctttcaggggcgactccgagggagtaagcacaccgttctgtcagaaggctttcaccagccgccttcctctctgcatcggaacctgatgcacccatgtcctcttcgctgtcattagctatatcataatcattcccggatccaatgtcaatgccaacgctcatttttcaatattctgaaaatacatccatctttctttaatacatacataaaaacgctatccggatcctgactttcaataaacgagatccagctgaccattcgtcgataaaaaaaggcgccgatttcacatcagcacctttcgctcatgatcgatttcgtttgggcaggatccgtccgctcagcgacaggaaatgcgcctcacggatcggcggccggtacacggcattctgccgcatgtaatagaagcaatactggaacgtatgccagaagaggaaagcgtcaaagtgatcatattcctccatcccgatataccaggatggcttctccacggcgatgcccttgaacttcttggcccagatgtccgccagatcgagcacataggcataaggaagcagccgctcgaacaagccgggatccgctgcctgcatctgcttcagctgcttgggctccacgctttcgatgaactcgcagatgcccatgatctgggcgcgccactcatctccctggcgcgtgcgtttatccatgtacagcatgcagaagaacagcacgatcgtgacgatgaggtaaacgacgatcgcccagctctgcacatcaaagaggaacaggatcaccgcgttcagcgccagcagcacgcagcctgccgtgatcgcgatggccagacgcgcgaagaaggcccgctcgctcaatgcgtagcgatggcggatcagcacgacccacgcagccagatcgacgcccagcagaagcgagacgatcagatgacgggcagagaagtgccacagataataggtgtcaaatgtcgccagccagataaagagcacagaaggaatcagggtcaggatgaccatgagcccctgcaggatcagcgaagagttcgtgtatacatgccgtttccgctcatgggtgaaggagcgttccagcatgcgctttgctttttccatcgaaaaagatacccgcgcttcccgcagtgcatcttccccgaccacatccccggactggaagaccgtggcaaacagctcgcgctcatatgccttcgcattgttctcgttcatctccctgagcttctccagctcgacatgctccccgcagtcgcggatgcggatgaagccgcggatgccccagtcgatgaacagcgacatcagatctctgtcgctcgcataacggttcatcacatagccgatctccgcgctgcgcagatccttcggcggttcgctgcgcacatcgacgaacacctcgcggtcgcgcccgaaacgccagaagacgaagagcacggtcagcagcagcacgatcgagacgagcgatgcccagaggctgacatccaggggctgcggaaaggagaaatacgtattgggcaggttgaccttgatggtcgccagctcattggcct

SEQ ID NO: 3643 - DNA, 32759 bp, Unknown
  16S sequences of unknown bacteria
atcataacatgaagggtatttctttacccacacaataatttaaagttcacccacatggcctgaaaaaatgggtaaaaaaaaccctcatgataatttattgtccacccacacccacacgataatttagagcgccgtttttctttgcactttgtaaggcagaatgtgcagacaaatcataaacgatgaaatgtttaaaggataaacataaattacgatgaataatgtttattctttgatataattgatatagaattagagtatacggtaagcaggagcttacatatgataattgacttgatttgcagattaactataatttggtgatgctatgtattgtgatatgactaaaggaaacatcttaaaaggactgataatatttgctctgcctatgatggcgggcaatctgctgcaacagatgtacaatattgcagatacaattattgtaggacaggttgtaggcagaaatgcccttgcggcagtaggctcatcgtataccattatagtgtttctcacttccgtttttcttggacttgccatgggtgcaggagcagtgttttcaatttacttcggcaaaaaggatatcagcttattcagaagtgcgacagctcattcatttgtactgataatgctgaccgcacttgtaataaatatcctgatatatgtgtttacagacgatattatgaagtttctacaggttccatctgacatatatgagcctatgaatcagtatctcgatataatttttgcaggacttgtggcgacagctctgtataattttctgtcgtgcctgcttagagccgcaggcaactcggtaacccctctgtggtttctgggaattgcggcatttcttaatgtggggtttgatatcctgtttgtaatacatcttgactatgggatttcaggcgcagcctttgcaactgtcattgcccagtatgtatcagccataggacttctcatatatactttgatattttgcaaagaatttgtacctcgcagagatgatattaaatggaacggtaaaatctttgctcagatatgccacttgtccgttatgacctgcatacagcagtctgtaatgaatttaggtattctgcttgtccagagacttgtggacagcttcggcgcagttacaatggcagcatttgcggcagcagttaaaatagactcctttgcatatctgccggtacaggatttcggcaacgccttttcgacttttacagcgcagaactacggggcagggcagagcagcagaattaaagaggctctcaaaaaagccacaatattaagcgctgcattttcctctgcggcagcagctgcggtatttatatttgcagagccgcttatgcgcatattcgtaagcgcatcggaaacagaggttatagccgcaggcgtcagatatcttcatatcgagggagtgttctatgcaggcataggctgcctgtttctgctctacggcttttacagagcagtagaaaaaccgggtatgtcggtggtgcttaccgtaatatcactgggaacaagagtactgcttgcatatcttctggcaggaattataggggaaaccggtatatggatatcagtgcctataggctggctgctggcggatattacaggctacggctactgcatattaaaacgaaaaagacttttttcagactgacattacatatatgttctgatataatgggggaaacagtatagatagcttatagctgccgtttcgcagcggaatggaggaaattatgaaatacaaaatagagggcggcaatctgccggcttaacgctattagcttgaagcgggcgaaacccttataaccgagggcggcgcaatgagctggatgtcaccaaatataagaatggaaaccaccagcaacggcggagtcggcaaggctctgggcagaatgttttcgggcgaaaagctttttcagaacagatatacagccgtaggcggaggcggaatgattgcatttgcatcaagctttccgggttcaatcagagcctttgaaataggaccgggaaatgagctaatatgccagaaaggcgtattccttgcaggagaagaaagcgttgacctttcagtataccttaacaaaaaactgggcaagggactctttggcggcgagggcttcataatgcagaagctcagcggcagaggcactgttttcggtgaatttgacggacatattgtagagtatgagcttgcggcaggtcagcagataataattgatacgggtcatcttgcggcaatgtctgcaacctgcaaaatggatatccagatggtgcagggagcaaaaaatgtgcttttcggcggtgagggactgtttaatacggttgttacaggtccgggccatgtatggatacagacaatgcctcttgcaaatgttgcagcggttctgagaccgtatattccgaccggcagcaactagacagcatttttccattgcaaacaggcctgattttctgtaaaatggatatattaatacaatgcggaggatattatggctcagttatattacagatacagcacaatgaatgcgggcaagtccatagagctcatcaaggttgcatacaactatgaggagagagggcagagggttatgacactgcttcctgctatagatgacagatacggtgtaggcgttataacttcaaggataggcatacagcgtgaggctatgcttgtcaaggacgataccaacatcttagagctgtttctcgccgaaaaagaaaaaggcgaaatagactgcgtgcttatagatgaatgtcagttcctcagaaagcaccatgtcgaagaactgattgaaattgtagatacattcaatgtacccgtaatggcatacggcctcaaaaacgattttagaaaccagctttttgagggctcctattatatgctgatatatgcagataagatagaggaaatcaagacgatttgctggtgcggacgcaaggctacaatggtagcaagagtcgttgacggcaaaatcgtcaagcagggcgagcagattgtaatcggaggcaatgatatgtatgtgtcgctgtgcaggaagcactacaacgacggcagactcggccccgatgagagtaagcctgaataattttttaaaaatataaaatttgccagttaatttacagacttttatatgagtaaaagttttttctctgaaaaaaatatattgtggataataaattttcagagaggagctgaatcaattgaaaaagacaaaaagcataattgcagttatggcgcttctggcgctgatgacatttgcaggttgcggtgaaaacggcgacgatatgaacaatacaacaaagacgccgggcaatacgacagaggataattacaacaacggcacagacggtgactacaacagaaatgatgatgccgacaaaaacctcaaggacgatgccgcagacaatcataacgacggtatgaccgacaataatgcggacaaaagcgataccaacagaaactaaaagacaaaaaggtggcaatgccgcctttttgtgataaaatactaatatgagcagaaaaaacagaaaaaaacaaagaccggcagttaccggtatattaagcaaacacaaaaaaggctttggctttgtgataccagatgagggcagctttgacagagatatattcatatcaccctctgatatgaacggagccatggagggagacagagtagaggtggatttaatacccgaatacctttgggagcagtctcctcagggcatcataaccaaagtgacagacaggaaactcaaagaagtggcaggattttttgacaagggcaaaaaattcggttttgtagtacctgtagacagaaaacataatgaagatatatatatacctaagaaagctttcagcggcgctaagaacggcgatattgtagtcgcagctataacagggtatcctgaccgcaaaaacagcgcagagggcaaaataacgggtatactggcaagagcaggtgagcccggaggtgatatcaaggcgataatccgtcagagaggacttttcttcacatttccgtcaaaagctgcggcgcaggctaaagctatctcaaaggccggtgtaggtgagcaggatatggcaggcaggagggaccttaggggagagaatataattactatagatggggcggactccaaggactttgatgatgccgtatcggttaaaaggcttgacaacggcaatttcctcctgggagttcacattgcagatgtaagccactatataggcgaggactcgccgcttgacaaagaagccctcaaaagaggcaacagcgtatatataatcaatcaggttgtccctatgcttccaaaggagctttcaaacggcatatgcagtctgaatgagggcgaggacagacttacgctgtctgttgatatggagataactccggagggagatattacagagcacaatatatatgagagtgtaatccggtcaaagcaccgcatggtatatactgacgtgtcggatataattgagaatgacgacagagagcttgccgcaaagtacagcgatatctatgatatgcttatggatatgaaagagcttgcgcagatactgcgaagtaaaagagaagccgcaggcagtcttgattttgatcttgacgaggcgtatataactcttgatgaaaagggagttcccgtaagcgttaacctgtgcgaaaggcgtacggcaaacaggatgatagaggaatttatgcttgccgcaaacaagactgtggcagagcagtttttctggcttgagttgccgtttgtctacagagttcacgagaagcctgacgcagagaaaatgcaggaattcaggacatttctgatggggctttcaatcagactcaaaggagagggcggcaacatacatcccaaggctttaaatgaggttttagagcaggttgcaggcacaagctacgagaatgttgtaaatacagtaatgcttcgctctatgaaaaaagcgttttattcaaccgagtgcgaggggcatttcggactgtcgatgaaatattactgtcatttcacttcgccgataagacgttatcccgaccttataattcacaggataatcaaagaatatctgcacggcggaattgacgatgagcggatagcggttctttccaaaaaaacgcaggaggccgccgaaacctcatctgttacggagcgtgcggcgatagagcttgaaagagacgttgaaaaaatgaaaaaggcccagtatatgtcctaccacataggcgaaagcttcgagggcgtcataagcgggattacaggctacggaatgtatgtggagcttgagaatacaatagagggtcttgtcaggcttgaccgtatgtacgatgattattacgatgcctatcctgagcagtacaggatagtggggcagaggacaaacaaggtatattctctggggcagagggtcagcataattgtttccgatgccgactactatgaaggcaccattgacttcagactttgctgatggcgtggagaatatcccctgcctcatcggcaaaaacaggcttttttgcaatgtcacagagggagagtattcctacaactctgccgcctgatattacgggaagccgtcttacaccgtattttgaaaacaggagtccggctgtatgagagtccatatcggggctggtgcagacgggctcttttgtcattatttctccggccttcattgcgcttccagccatatggcgaagcaccagatccctgtctgttattatccccaggatttccccctggtcactgcatacaggtacagcccctatattgttctttttcatctgctgcgctattacttctgcggcagcagaggtatccacgcagcttattcccggcgtcataagatcctttacaagcatttcttctgtttcctttcattaaaaaaagcagcatatgattattcatatactgcccgtaaggaatatatattattcatcagtttttctgtctgttagggttccagaagcttgggaagaacagcagcaatatagtgaaaagttccagtcgtcctaaaatcataaggaaagacataaaaatctgtgaagccggacaaaacattgaaagattaccggtttcgccaaaaagccccatgcctatacctgaattggataggactgcagcagcagatgttgctgtagtttccagatcaagtccgtcaagtgaaagaagtatgcagctccctataaatactacaatatatacaattataaaggttgttatctgcgatactataggccctgaaacagctttatcatcaagcttgacggcaacaaccgagcgcggatgtattcttcttataaagcctctgagaataagctttatcattacaactgcgcgtatgaccttaataccgcctcctgttgaggcagagcaaccgcctatgaacatcagtatgaagagaagcattcttgacattgcaggccacgacatgaaatctgcaaatgtaaagcctgaagttgatataaaacttacaacctgtgtaaaagcatagcgtaacgattctgtaatatttccatagaaacccgaaaaagtgagattaagtgaaattaaaacagttgtaacagctattatccagaaaaatgcacgaagctccacatttttaaaaaagtctccaaacctccggttaagaagcaggaagtacatattgaaattcattgcagctaatatagtgaacacagtaattactatttcaacataaaaactctgataaaaggagagtcccggtgcctgcgccattattccgcttgtgcttatggtggacagggtgtttatcagtgaatcgaaaatatccatttttccgcttaaagcaagcattagaaattctattgcagtaagcagcatatacataaggtaaagaattttggatgaatcacttattctgtttgttatcttgttcattttaggcgccggagtctctgcttttgcgatatgatgtccccctatgccaagagccggaagaacagaaacaacaagaatcagtatacccataccgcccagccagttagaaacagccttataaagcaaaaggcttttgagcgttatgtccgattttaaaacagttgctccggtagtggtaaagcctgcggtcgattcaaacagcgcctgagaaaaactgatatccgaaacagaaaaaacataagggaaagcgccggcaatacagcttacaatccagcaggctgcaactataagatagccgtctctcggttttacatagtagtctcccgaacgtataaaccggaaagccgtaaagcctgtcaggatataggcaaggcagaatacggcaaatactgaaagacattttgtttcattgtaaataaatgcacagattacagacggcagcatacttatacctgttactgccagaatcagtgatgaaatttttaataaaatacgataatttaaatccataatatcttaatacctgtcagaattccagaaatgtggtgtgaaaaaagctaaaaatgtaaaaagctcaagtcttccggctatcataagaaatgaaagcacccccttggcccagcctgaaaaaatatcaaagttcataaccggtccggtaagattgaaacctggacctatattgccaagacaagtcattactgcagagattgtggtaatcatatcataaccatccagcgaaacaagaaccgagccggcagcaatcagacaaaggtacaggaatgtaaagcttgcaacgttgcttaccagatcatttgatatactgctgccctttatttttatttttattacagcattaggatgaagtcttgtgccgatactgcgcttaaccagtttcagcagaacaagtatgcggaaaaccttaattcctcctgctgtggaggaagcgcagccgccgatgaaaaacagcaggaaaataagtgctcttgcaaattgaggccatatatcataatcggcagtgaaaaagcctgtagtcgtgattacagatacgacctgaaatactgagtctgtaaaggccttgccgggattgctgtaactgcccgaaaaaacaagggtaagtcctatcagtactgatattgtacatgttattattaaataaagtttaaactcgggattgcctatgaatgattttatgccctgtctgaagcctgtaaaaaaaagattaaagtttataccgcaaagaaacataaatataatgataacaatttcgatatacaggctgtcaaaatgagcaacactgtcgttatagtttgagaaaccgcctgttcctacgcttccgaatgtatgtatggatgcatcaaacagattcattcctccaaacatcagaagaatgatctgcagtagtgtaaaggaaaaataaagtatataaagctgtcttgcactgtcagaaagctttgaactggtcttatcaaaagacgggcctgtggattcaagcgctatgttctgtttgccggaatacagcataggtattacggcaattgccagtatcagtatacccataccgccaagccagtgagtaaaggaacgccagaacagcataccctgtgacatggcttcgatatcggtaagtacggttgagcctgtggttgaaaagcctgagcagctctcaaaaacagcgtctatatagcttggcatatctcctgaaagcgtaagaggcgcggcacctatgagcggaataagaatccatatcagtgaaaccacaaaaaaaccgtcacgtatgcgcagatgagtatcgtcgggtttaattaaagccttgagcagtgctcccactaaaaatacaaaaacagcaacagcaaagaaaattatcgcattgctcttttctgaatagatgagggatacaattgcaggcaatataaagcagatggaaaaaacaataagaattccacctgttatatttacaatggccttgtagttcagattcatttgagtacacccctgaaaaatcccagtttatccttgatgttgataagtttttctaagtcctctgtttcagaaagaagcgaaagaatcattacgatatctccgtcctgtatctgtgtattgccgccaggaattataacctgtctgcccctgtgaattgatgctatgagaattccctccggaaggtcaaggtcgttaagaggctcaaaggttataggcattctgtcgtctgcaactatctctataatctccgcctgtccctgtataagtgttgaggacagtatgttttttgttccctgaatgtatcttacaatattatttgcgctgatatcaagaggattaagcgctatgtcaatacccattttggatattatctcctcataactttctctgctgattttggcaataacgtcttctatgccgtgactcttggcgataagagcaagcagcagattatcctcgtcaaatccggtagcggttataaaggcgtccatctcctcgaagttctcctcttcaagaagcgtcaggtctgtggcatcgccgtgaagtatcattacattgtttaaatgtgtagacagataatgacatctgtttttgtctatttcgattatcttgacgaatattccgaagtcggaaagcttggaggcaagataaagtcctgttttacctccgcctataatcattacacgctgaatatcggtatatttgcctttttcaatggtatgcttgctgagagccgctatttcaaacttctcacctactatatacagtatgtcgtcctttagtatttctgtatctccgtgaggtatgataaccttgccgttcctgtcaatggcgccgataagcatattcggaagcacatcgcctacgtcgataatcttctggtttatcagctttggaattttgtatgcatgacactcaagcagtgatgttttgctgctggtaaaaacaccgtttgtaagagtgtttttttcgataagatatttgtatatctcatttgtgataagcaggtcggggttgatgacgaaatctatgctcataacctctttgatgaactcaatctggttcatatgctcaggatcacgaagtcttgctattaccttggagcagcctaaggccttggcaaaagaagctataacgatattcttttcgtcattgcctgttacggcaacaagaaaatcatatgaacctatattatgttccctaaggaacgacgcgcttttggcattacctgcgatggtcataacatccatctgcgttgcaagtctttcgagcagttcttcatctttatctattacggtaatggaattaccgcctgtaatcattgattctataactctaagcccaagcttgccggctccgactatggctattttcatctggcacctcctgatgcagtatttgcagtctgcataatttgatgatatacttctattaataatactaagccattatacaactgtgaatcgcaatttgcaaggtgtatggtaaaaatgggaggctttatgagaataaaaagacttataggtggcgaacttatggcaaacggatatataatttcggacagaagcggcggtgaatgctatattatagatccgggctatgattataaatattatgttgactacatcaataaagaaaatctgaaactcaaaggcatactgcttacacatcatcattacgaccataccggcgcggtgggcgatctcaaaaaagtgtttgatgtgcccgtatgtattcacagcagggatatgagcatagatgtataccgcaggaagcccgatgtgtttcttgctgacggcgatgtgtttatgctggaagatgagactttgcaggttataaatactccggggcatactcacggaagcgtctgctttttctcagaggcgggcaggcttgcatttacaggcgacactatatttaatgtagaccttggaactacggagcttgcagacggcagcatgcaggagatgagagagtcaataatcaatataatagataaatggagcgatgatattaccatatatccggggcacggcgatgagtgcaccatgggatatgtgaggaaaataaacagagaatttttagatatagcaggtgagaaaaatgacaattaaacttatagcacttgaccttgacggtacaaccttaaacaaaagcggcaggctttctgccagaacaaaagcggctcttgaagaggctatcagaggcggcgttcatgtggttattgcaacaggcagaacattcagtgcggtgcctgaggaagtcaaggcaatagaggggatagaatacatactgtcatctaacggcgcagagataagaaatctgcaaaaggacggtatgtgcatatattcaaactatatatccgcagaggctgtcgaaacagctgtggcggagcttaaaaaatgggattttatgcttgaggtgtttgtgggcggcatcgcgtataccgacagcgcgcactatgagcttgcaaagcagggcggtctgccttacagaaactcgcagtatgtggttgatacaagaaaccctgtagatgatataatcgggtttactcttgagcataaggacagaatagagaatataaatataaattttgataatcagagcgaccgtatggcaatgcgtgagattttgaagaagctgcctgatgtaactctgactacgtcctttgaccataaccttgagataggcggggcgacaaccagtaaggcttcggctcttgaggctctcggggagatactgggagtttcaaaggacgagataatggcctgcggcgacagtcccaatgacggtgcaatgatgtcgatagcagggcttccggtggctgtgggaaatgccaaagatgaaatcaaagcgatggctgcctatgtgacggatacaaacgacaatgacggagtggcgaaagcggtggagaaattcgtgcttgagggctagagacacgaccggcggtaagcacaaaaaatattttttgatataatctgattgtcatatattagtgattgattttttgaaaggaagcgaggtttacgatgaagaataataatgcactgttttacacttgcagcctgattgaatatattggaagaactataaagtagcgccgttctgctgttgtgaaatatcttggggcaaataccataaaaagaatatataaatatgcagatgtatttcactgtgaccccattgaaaaggttgcagacgagtttatcaaccttgtcaatagcctgacagactcatttgataatgtagcaaaatgcagatatgaggttccggattactggactatcggtgaagtatatgaacgcctgatagaagatttggaagaaaaaacggaagcagatattattgatgtgttaacagaagtttattcttcctggattgacagtgcgatatcaaattacaacacagatttctactatcagccaagagaatacatctgtgaatgctatctggagggagaggtttgtgcatagcacaatagtaaaggagtagcaataaaatgaacataaaaccattaaacagagatttcacggtatgcaagctgaccggttactcacaggttaacctgtcagcagaattctgctttaaaggcaggacagatgaggaaaattcgcttgtatgcctgacagagaatacgccggataatacgattgagcgtgaggacggctggagagctttcagaatagagggagtgctggacttttcactgataggaatacttgctaaaatagcagtgctgcttgcagatgagaaaatcggaatttttgtcgtttccactttcaatacagactatgtgcttgtcaaaaaagaaaacgagcagagggctttagacagactgaagcaagagggctacaccgttatataatataaatgattgaggagaaaacatatgcaaagcagaatgaaaacacaccagttatcagaagcggagattaatgaatgataccgtatatattcccggactgcctgccggcaaaaagttagaaaacatctcggccaatccggatgtatgcttcaccgtatatgaaatgaaaggtcttttatatgacccggaagaaaagccccgtgatacaaatgcggaatatgtaagcgctgctattcagggtcgcgtaatgataatgagagcaaaaaagaggtactgtatgagattatacgcaagtatacgcctcatcttgcataaaaagatatacctgataatatgctaagaggaactgggataattaaaatagagattattcataagagtataaataaagcactgatatgataacaagattgtctgaaactgtgatattcgggcagttttttctttttccggcggtatttttacctgattattaaaaactttcatatcccaatcaaaaactttgctttctttattgacattaaatgtaattaagagtaatataagcaacaaaaggagaaaactatgaatgggattaaaaaactagatattacagacagcgaatatcctgaaattctgaaactgataaaggacccgccgacttcactttattattcaggaaatatagagcttctgtcaaacagatgtatatcgattgtaggcgcgagaaaggctacagagtacggtcttgaaacagcagaggaaatgggccgcaaaacaggtgaggcaggtcttaccgtagtaagcggcatggcagacggcattgatacggcagctcacagaggtgcaattaatacagcagggggaacaattgctgtgctgggctgcggcattgatatggaaacaggagaaagaagaaaaagagctcttgacagaataagaagcagcggccttgtcataagcgaatatccaaacggatatcctgcatcaaaatatacatttccgaggcgcaatcgcattataagcgggctttcggcagctacagtcgtggttgaggcaggctttaacagcggctctctcataacggcagagcttgcggcagaacagggaagatgcgtatatgcggttcccggcaatatagacagcggtatgagccttggaacaaacaaactgataaaagacggcgctgtgcctgttgtttcgattaatgacattttaatcgacgcgggtgtatataataatgaagaaacaaagaagcttggaaaagatgaaaggctgatatacgacatactccttaaaaacggtgagatgaggcttgagcagctttgcaaagcagcgggaaaacagaaaagccttgtcagcagtatagtcacaattctggagataaaaggactggtatttacaagctacggaaaaatttttattgcaaaataactcatttgcaaatataatcagtttttgtaaagaaaaaaatcgaggaggtaaataatggctgcagagaagaagaaaacaaaaaagaaaattctcgtgatagtggaatcaccgtcaaaagcaaagaccatagggaaatttttaggcagcaattataaggttactgcatcggtaggacacgtgagagatctgcccaagagcaagctgggcattgacatagataacaattttgagccgcagtatatatcaataagaggcaagggcgatttaatcaaagctctcaaaaaagaagcaaaggacgcctcaaagatatatctggcaaccgaccctgaccgtgagggagaggcaatatcgtggcatcttgcatatattctgggcatagatccggcatcaccgtgcaggatagtattcaacgaaatcaccaaaaaagcaatcaaagaggcagtcaaaaacccaagaccgatagatcttaaccttgtggatgcgcagcaggcaagacgagttttagacagacttgtgggttatcagataagccctctgctgtggagaaaaataaggagaggactgtcggcgggacgtgtgcagtctgccgccctcaaaatcatatgcgacagagaaaaggaaataaacgcctttgtaccggaggaatactggaacataacggcggaattcaaaaaaggcaggaaattctccgcaaagctggttcagtatcagggcggtaaagttgaaattcccaatgaggaaacagcgcagaagatgctggcagaaatcgaagccggcaaatatacgataagcaaaattgaagaaaaagaaacctcaaggaaaccgtatgcgccttttactacaagtacaatgcagcaggacgcttccaacaagctgggctttaacaccaagagaacgatgtttgttgcgcagcagctctatgagggcgtatcggttaaggggcacggcacaataggtcttgtttcatatataagaaccgactctgtcagaatttcggacgaggcaaggctggcagccagagactatataaaagaaaacttcggagaaaaatattattccaacaactattattcaaacagaaaaaaagaagtgcaggatgcccacgaggcaatcagaccttcatatatagagcttgcgcctgacgatatcaaggactcccttacggcagagcagtacaaactctataagcttatctggtcgagatttatggcaagccagatgtcaaaggccgtatacagcagtatgtctgttgccatagacaacggagactacggctttaaggcagcgggttccaagctcatattcgatggcttccgaaaggtttacggagcagccaagggcgaggacgaggataagatattgcctgagcttgcaaagggcgaagaactcaaagccacagcagtaaggcccgaacagaacttcacccagcctccgtcaaggtttacggaagcaagcctcgtaagagatttagaagaaaaaaacataggcagaccgtcaacctacgcccctataatcgggacaatagtagagagaagatatataaccagaagcaaaaaaatgcttgtgcctacagagctgggatttcttgtgaccgatatgatggagcagtatttcaaggaaattgtagacgtgggctttacctccgatatggaagacaagctggacgatgttgaagtcaagggcagcgactggaagcagattgtatctgatttctatgagcctctttcaaaggagcttgaaacagcagacagggaaatcgaaaaggttacaattgaagacgagcctacaggagagctgtgtgaactgtgcggcaggccgatggtcaaaaaacagggcaggtttggagaattcatagcatgtagcggttaccctgagtgcaaaaataccaaggcgatagtaaaagaacttgatgtcaaatgtcctctctgcggcaaaaatatagtgcagagaaagagcaaaaaaggcaagattttttacggttgcagtggatatcctgactgcaataatgtatactggtataagccggtagatgaaaaatgccctgaatgcgggtcactgctggtagaaaaaaagggaaagggaaccacgttaagttgttctaatccggaatgtaaattcacaaaataacttggaggaaatttttatggtacaattccacgcaacaacaatatgtgcagtaagaagaggacccgacgacatatgtatcggcggagatggacaggttactatgggtgaaacagccattatgaaaaacggcgccaaaaaagtaaagaaaatatacaaaaacactgtgcttacaggatttgcaggctctgttgcagatgctttctcacttacagagaaattcgaaagcaagcttgacgagcacggcggcaaccttaaacgcgctgcagttgcgctggcgcagctttggagaagcgacaaggcggcaagaaaccttgaagcactgatgatagttgcagacagagaaagcctgctggtactgtcaggtacaggggaagtaatagagcctgacgaggattttgttgcaataggctcaggcggcaactttgcatattcggcagccaaagcgctgtttaatcatacagatatgtcagcagaggaaatcgtaagagagtcattaaaaatagcatcatcaatatgtgtatatacaaatgatcatatttccgttgaaaaactgtagggagggcatattatggcaaacacattatacaaaatgactcctaaagaaatcgtacaggagctggataaatatataatcgggcaggacgaggccaaaaaatccgtagccatcgccctcagaaacagatacagaagaagtctgctttcagaagaaatgagagaagagataactcctaaaaacattcttatgatgggacctacaggcgtaggtaagaccgaaattgcaagaagacttgcaaagcttatggacgcaccgtttgtaaaggttgaagcgactaaatttacagaagtaggctatgtaggcagagatgttgactcaatgataagagatctggttgaagcatctttaagagttacaaagcagtccaagcttgaggaaaaatacgatatagcagataagattgttgaagaaaaaatagtcgaggctataataccgggcaaaaagaaaaaccctgccaaaacaggctccagaaatccgtttgacttcataatgaacagcggcggatatcagagccagaagcaggaatacctcgaaagccatcaggaaaacagcagtgtaagcgaggactccggtgttgaatcagcaagagagcaggtaagagagcagcttcgcgcaggacttttagaggagcagtatatcgaaatcgaggttacggcagctccaaagggcaaccagcttgatatgagtaatgaaggcatgagcattgcaatcggcaacatattcggtgatatgatgcctgaaaagaaaaagaaaaagaactgcaaggtcaaagatgcaagaaagatattaagagagcaggaagcccagaagcttatagatatggatcaggttaccgatgaggcagtcgaaaacgccgagcagaacggtatcatatttatagacgaaatagacaaaatcgcagcaggcggacagtaccgctcgggagcagatgtgtcaagagagggcgttcagagagatattctccctatagttgagggaagcgttgtaaataccaagtacggacctgtaagaacagaccacatcctcttcataggcgcgggagctttccacgttgcaaagccgacagatttaattcctgagcttcagggaagatttcctatcagagtggaacttgaaaaccttacaaaagaaacctttgtaaaaatccttacagttcccgaaaacgctttgctcaagcagcagaaagcgcttcttgaaacagagggcgttgaaatcgaatttgcagatgatgcaatagatgaaattgcaaatatggcatttcttatgaatgagcagaccgaaaacatcggagcaagaagacttcatacaatacttgaaaagcttcttgaggatatttcatttaatgtgcctgatgttgaggataagcatatcataattgacagcgaatatgttaaacagaaatttgaagaaaaaattcatccggaagatctggacagatatatactttaagaagacagcagccgcagatttatgcggctgtaatttttacgggcagaagtaataaactctttagctgcctgcatagaatatgctataattatatcaatacatacagggagtaaaagaattgagcaaacgcaaaaaagaccttaatacaatatatatatcggaaagaatgcaggagtcgctgagaaatatttctaactgcccgctgacagcggttgtggcgcctatgggatacggcaagacaactgccgtgagctggtatctcagagagaagtcgctggcagaggatgcggatgtaatccgaatcagcatttattcggacaacagacagattttctggaaaagcacccagaaagcatttgcagatgcaggctttccgcttcttttggaatatgaatttccggcggagctgtctgattcggtcatgctggcagaggacatatgcagtatgtttgatacagacagagcctgctatatttttattgatgattttcatcttttggggagtcagggtgttgtatcgtttttgtgtatgattgcaaagaaactgcccgaaaatgtacatataattatagcaggcagaagccgttttctgcaaaacagtgatattgtacagcttggcagaaagcttcatgagataaatgcagatcagttcagactcaactatacggagctttccgtatatgccggtaaatgcggcatatcaatgaatgattcgcagcttgacaggcttatgcatttaagcgaggggtggttttcagccgtatatattcagcttcgaagtatggaagagtatggtgatatgacgggcgaaactcttgatatttacgagatgttcaactccgccctgatagatccgcttgaagaggagcttagagaatttattgcggtgatgagcattgcagatgagttttcactggaaatggcagaatatattacacagaataagtgctcagaggagttcctgcggaaactgacggaaagcaatgcctttgtcagaaagcttgcaggcggaaatggctatcgtttccaccatatgctcaaaacctgcgcaggcagaattttttcacagtatgacaaatctgtgcaggaaaagtatctgaaccgttacggcagatggcacgaattaagaaatgagtatatcagagctatgatgttttatgaacgcatcggtaaccgcagggcatggcttggagttgttgcagaagacgcaggggtaatgctggcaggtctgaatccgtcagaagttatagaaactctgcaaagctgtacggcagatgaactcaaagaggatccatatgcgatacttgtgcttatgcgcaggctgttttcgtggggcaacatacctaaaatgcttgaacttaaagaactgcttaccgaagctgtcaaaaccgatgcggggcttacacaggagcagcgggaaaatctgctgggagagtgcgaccttattatgagcttcctgtgctataacgatattgagggtatgagcaggcttcaccggagcgcatgcagcaaaatgacccatacggcacagtcaattaaaacctacggttcatttacatttggttcaccgtcggtgcttatgatgtttcaccgcactgttggaaatatgaagcaggaggtggctgttatggagaatgccatgccgttttattacaagctgaccgatgagcacggagcgggagcagagcttgtaatgagcgcagaggaagcatttatgagaggtgagcttgccgcagcgggagtacttcttgcaaaagccgagtacagagccgctgagaagcatcagaattatctgcttcagtgctgtgactttataagactcagaaaaagtctgtttgacggcagcgaatacgtatattgtgacagtagtgaaatcagaaaacaccacgatacaatgctgatgcttgtaaatgacagcgttaattcatactattacgcgctggcaggcatatgcgagcatatacccgatagatttgcagagcatcatattgaatccgccaatattttaaatcctgcagttcctatgatgcagatgattgaaaatcaggtatatctggcgcagggcagctttgagacagtcatagcgcgcagcgaaaagcttatggaaatgtgccgcaggctcaattacgtccttgtgggaattcatattcagatacagactgcggcagcctatgagatgctgggtatgagagatgaagcatctgcaatgcttgaggcggcgctcaaagagtctgcaagcgactggtgcattatacctgctgccgaaaactacagatatacaggaaggcttgtcagagaatttaatcatcgtgattttgcagagcagatagaaatgctgggagaaaaattcgaggcaaactgtactgatatacggaaccggatttgcggaagtgatgcaattgacgggctcacagacagagaaatgcagatagccaaaatggcggcagagcgtatgagcaacagagaaattgcggcagcattgtttctttccgagggaacagtcaagcagtatgtaaacaggatttacagcaagctggaaatcgaaggaaattacagtaccagaagaaaacagcttgcggaaatagtaaacaaaaagaatcagtcttaaaaatttttaattgacaaccggaataaaatgctatatagtagttgataataagagggagtaactggcgcctatagggcgtttacgatgtcgtcagtacgatgattatcatccgtatcgtaatcaaatggtgagacttttattgcatatttttatgtgcaataaaggtctcttttatattttcgggaggtgtattatgctaacacaaaaacaggctgaggccaatcttgagaaatacggcttcaatgagcttacagagggaaagcgcaaaaacgcatttcagatttttatagaacagtttaaggattttcttgtgataattctgattgcggcagcggcagtgtcggcagtattaggtgaacttgaaagcgccattgttatcgctgtagtaataacgatcaatgccgtacttggtacagttcagaccataaaggccgagaactctctggcaggactcaagcagctttctgcgccgcatgcaaaggttattcgtgacggcagcctcatgcagatacctgcaagagaagtaaccgtcggagatgaggtcgtgattgaggcaggtgatatgattgcagccgacggcatcataatttcctgcgcaagccttaaaacagacgaaagcgcgcttacgggcgaaagccttcctgtcgaaaaagccgcaggcggagttacagactctgcggctcttggggatcagaacggcagagtgttttccggaagcttcgtaacctacggcagaggctcatttgaagtgacatcggtgggaatgcagacggaggtcggcaaaattgcgggacttatcaagaatgcggaagaaaagaaaacacctctccaaaaaaatcttgacgacttcggcaaaaagctttccatacttatacttgtattctgcggcatactgtttgccgtaaacgttataaggggcggggctgtagcagacgctttcctgtttgccattgctcttgcggttgcggcaatacctgaagctttaagctctattgttactatagtgcttgccttcggtacacagaaaatggccaaagaacacgcaattataaggaagctgcaggcagttgaggggcttggcagtgtgtctgtaatatgctctgacaagacaggaacacttacccagaacaaaatgacggttgaaaactactatacagacggtgtctgtaccgaagcggccaaaatagatctcataaatcatgcgcagaaggagcttgtcatattcggtatgctgtgcaacgactcacagattgcagacggcaaagaagtcggagatccgacagaaacagcccttgtaagagtaggagaaaatctcggacttgatacgggtgcaataagacaggaatatgagagaataagcgaagtgccttttgacagtgaccggaaactgatgtcaacagagcatatgcttgacgggcagtatacaatgattgtaaagggcgcctgtgatgtacttttagacagaattacggcaattaaggaaaacggcactattcgtgaaataacgcagcaggacagagataatatagaggaagccaacagaagcttttcacagaacggacttagggtgctggcctttgcctttaagacttttgatgaacgcagagaactgtcatatgaagatgaatatgagctggtatttacaggccttacagctatgatggaccctccgagagaggagtctgcggatgcggtttcagaatgtataagcgcggggataagacctgttatgattacaggcgaccataaggtgacggcggcggcgatagccggaagaataggaatacttaaagacgaaaaagaagcctgcgagggcgctgtgattgactctatgactgatgagcagctgaaagaatttgttcctcagatatcggtttatgcaagagtgtcaccggagcataagataagaattgtgcgcgcatggcaggaaagaggcagcattgttgccatgacaggcgacggagtaaacgatgcgccggctctcaagcaggctgacataggggttgcaatgggcatcacaggcagtgaagtatctaaggacgcagccgctatggtgcttacggacgataactttgcaactattatcaaggcggttgaaaacggcaggaatatctatcagaatatcaaaaatgccatacagtttttactttcgggaaatttcggagcaatccttgcagtgctttatgcttcacttgcaggacttcctgtgccctttgcccctgtgcatcttctgtttatcaatctgcttacagacagcctgcctgcaatagcgctgggacttgagccgcacaacccgggagtcatgaaagataagcccagaaatgcagatgagtccatacttacaaaatcatatcttgcaagtataggtacggagggactgtgtataggtgcaatgtctatgattgcgtttatgacaggctacagcggaggcaacgccgttcttgcaagtaccatggcattcggaactttatgtatgggaagacttgttcatggctttaactgcaaggcaaaggaaccggtgatttttacaaagagatttttcaataatatttatctggcgggagcatttctgctgggaacagctctgattacggcagttatggtgataccggcacttcagggcgtgttcagtgtgcagagccttgatattgcgcagcttcttacggtatacggtcttgcatttgcaaatctgcctgtaatacagcttatgaaaaaaatacgatgcagcacagtcggaaaaacccgtatataacaggaaaaaagcctttgcaacttcatctttgtatggaaactgcggaggctttgatgtaatatatgatatacaggaggacatatttcagacatgaagatttgtgtatactgctcatcttccgatgagcttgacagtaaatattatgaagagggcagagcctttggcagagagcttgcaaagagaggacacagccttgtatacggcggctactgcaaggggattatggccgctgtggcagagggcgtgcacgaaaacggcggagagattaccgcagtcgttcccaaggtgtttgacagggagggctttacatacgaggggtgtaccagagtcattaaaactccagatatgaacagccgcaaaaaaaccatggaggcggaggccgaggccatagctgttcttcccggcggcataggtactatggatgagttctttgaggctcttgttcttaaaacaataggagaatttgacaagcctgtgggagtacttaatacagcaggctgttatgatattctggtacagcttcttgacaggagtacggaggatggatttctgagtacctcaaacagagagtgcgcaaggttttttactgatgcagacgtgatgcttgatcatcttgaaaaagagtcaggtctgtatgactatccgtttatacctttgtgggacgaagcctctgaaatactcatactgggcagtttcccgtcagttaaatcaagagaaacaggatttttctacggtcatccgcagaaccgtttctggaaaatgcttgccggtgtgtttgaagacgaggtgcctttggatatcgagcagaagaaggaatttcttcacaggcaccatattgcactatgggatgttatagcctcatgtgaaataacaggcagctcagacagcagcatcagaaacgcagtgcctacggatcttggcattatccttgacaatgcccctatacgcagagtgtatataaacgggagaactgcggagaaatactacaaaaaatatacggcaaaaaccacagagctgccggcggaaaccttaccgtcaacatcgcctgcaaatgcggcgtggtcgcttccgcgtctgatagaggcgtggagcattatcagacaaatcagtccttcttcagaggaagcgagattctgagtacataatcgtcataactgaaacgcgacatatcatcaaggagagtatcttcaaagaagtactcttcttttttgaagccgttatcctctgtaaatttcagcagcttcaggtacattgtatgaagtgaggaataaccctcagtgctttctattacggcataagtcctcggaggtattatcgttacattctctcttgtggttatgtctacaggctctatcttggtataaaggtgagagtaattgtagctgttttcggatgtgaactcctcagtgacaggcaccagcgcacctattccgtagggactgtatatctgattgtcgtggcagtaggctatatgctttgccattgcgggatagatatccctgtcatcactgctgcctgtgtattttgtgattatgtagtattcctcgggtctttcttcaagatatattctgttgtgctgcgcgttcataccgtcgcatgtgatattgatacgcctttgtataaacgatttaagccactgaagctctgcgattttttcatcggcaagaacaagctgctccctgagaagcgttacgaaatcgccggggtttcggctgtttagatattctctgatgtcggcaagaggcatatccagctcctttagcattgatatggtgttaaaggtatcaagctgcattgcggagtagtatctgtagccgttttcgcctgttatttcaggcttgagaataccgatattgtcatagtgaaacagagtctgcttcttgacgttgcacagctttgcaaattctcccgtagtgaaatagccctttgacttttttttgatagtttccatatcctcacctttttttaaaatttaatattgactatacagttacaatatactttaccataaaaaaaaggagttgagaagagacgtatggaacatatttttgataaaggagttacagttaaaaattttgtaaagtttgtctggccgtcagtgcttatgatggtggttatagcgctttattacggatttgactctgtttttgtcgcaaatcttgtgggcgaaacagcgctggcaagtctttcgatagcatatcccgcgcagggtattatgtggggtgttgcagtaatgcttgcggcaggctcaagcgccatagttgcaatcaaaatgggagagggaaatcagaaagaggcggatgagaaatacaccctcatatgtgcggttgcacttgtaatagggcttattatgactgctttgtgcctgatatttatggatacggttatagatttcctcggagccactgcagagcttgaaagctactgctccgagtatcttgggatactcatctggggatttcccgcagcgtttataggggtgctgtttgagtatttcatcagggttgacggaaatccgggcttcacactgtttctgtacatatcgggaggagtggttcatctggcgcttgattacgttctgatgggacctcttgatatgggactcaaaggagctgcatatgcgaacgttgcagggcttgtgactgttatgctggcgggcggagcatatttcatattcagagaaaccaggctttcattcaggaagtttactgttgactggaagtacataggacactgctttgtcaacggctcatctgaaatggtaagcgaatcatctgccggaattgcaacgtttttctttaaccttatggctatacggtttgcgggagaaacaggcgttgcggcggtgagtatagtgcttaacatattctacttcctgacgtctgttcatcttggatatattacgggcgtatccccgcttataagctattattacggcgccagggaatacgacaaggtcaatgtattcatcagatattccagatggtttacactggtgacctctgccgcaagcgcggtggtatgtctggtgtttgcaaaatatatagttatgctgtttgaaagaccgggaagcgagctgtttgatctggcgcttacaggaaccagatttcttgcaatagctgtgctgttttgcggcgtcaatatattcgcatcaggcttttttacagcctacggaaacggtatcatatccgctgcaatatcaatgtcaagaggtcttgtcatggttatagcgggcatattccttttgggctggctgcttgaaatgacaggcatatggcttgttccggcatttgctgatgctgtgactctggtgctttcgtttgttatgtttgcaagatacaaaggggtatataattacaggataatataatcagagatataatcagaggctgctttcgggcagtcttttcctgttgaacaacggagcctgctgttgtataattaatcagacctgaaaatccgcgaactgtaatatatatgaggagaagcgatatgaaagatgtaattgtaataggcatcgcaggcggtacaggctcaggtaagagcacgcttgtcaaaaagataaaagaagaatttaacgacagaaccactattctgagtcacgatttttactacaagcagcacaatgacattacatttgaacagagaaaaaaactcaactatgaccacccggattcctttgatacggatctgatgatagagcatatcagagagcttgcttctggcagggaaatacaaagacctgtatatgactttacaattcacaacagagtagatgatactgtggcagttaagcccgccaaggttattatagttgagggaatacttatctttgagaataaggagctcagagatatgtttgatatcaagctgtttatagacacagatgcagatgtgagaattatacgcagaattcttcgcgatgtaagcgagagaggcaggactcttgagtctgtggtaaaccagtatcttaccacagtcaagcctatgcacgagcagtttgtggagccgtacaagaaatatgcggatataattataccggagggcggacacaatcaggtggcaatcgaaatggtaaatcacagaatacattcattactaaagggataaatctataggaggaagagaaatgagcaggagaattttagctttatttacggcagtgacagtggcgctgggcattatggtatcaggcggaggtgcggtatacgcagccgaggcgcaggtgcctgaaagtccggatcaggagataacaacaggctgggtaaatgataacggcaaaacctattatgccgatgatacgggggcatatgttacaggctggcaggatatagacggaagcagatattatttcgggaagaaaacctctgtaatgtacacaggctttcacaaaatatcggggagtaaatactatttcggtaaaaccacaggcaaaatgtacacaggctttaccaaaatttccggcaggaaatactacttcggtaaaacaagcggcaaaatgtatacgggtatgcacaagataaaaaagaacgtatatacctttgatgaggacggagtgcttgtaaggactgtatacggcagcaaaaaggccatagctcttacatatgatgacggaccgtctccgaatacgggcacaatattgaacactcttgagaaatatgacggacttgcaactttctttgttgtgggaagcagagtgtcatcgtataaatcacagctcaaaagagcatacaatatgggctgtcagattggaaaccattcctggaatcacggctggtacggtcagatgaattcctcgcagattgcatcacagatttcaagatgcaacagcgcggtcaaaaaacagattggggaggctccggttatatgcagaactccgggcggggaccagtcatcaaatgtcagaaactctgtaggtatgccgataatcctgtggtctatagatacgagggactgggcaacccagaattcctcaaagacctacagctctgttgtaaacggcgcatatgacggtgccattgctctgatgcacgacctttacaagccgacggcagacgcttcaaagcgtataataccgcagcttgtttcacagggatatcagcttgtaacgattgaagaactcagacttctgaaaggatataagctgaagccgggcagggtatatacaagcttcagataaattaatggaatattaatggtactgtaaattatcgtgttggttagggggatagagctgtaaactattgtgagggtgcggtttctcatcactcctgagacatagtagataaagagtagttcaactgcgagctgctctttttgttttacgcagcagaatgtaaggttgaataaatgagatgcaaaagcatttcaaaactttttattatatcatattgcatgcacctaaaaacgtacatcagatatggtatagtaaatatatcaggttagtattaagagttaaggaggaagcgtatgtttaaaattttactgggtattgcaggtatattgggatttggaataggtctgtttggcgaagcaatgaaaaagctgtaagcggttgcagcagcggcgaatattgtgacaaaaggtgcggaaaaaacggttgatgactgaaattggcatatatacgattatgtagtaccggcagggtaagttgttgttgtgcaaatagtctgaataatgtataatagatgcagtaaatgtattgagtttataagagggtactattatgaataatgtgattaaatgtgtttaaatataacttcaaggcggagcagagatgcttggccttggagttttgttttagactgaggttttatatagaaagctatactatacgccgcagttttaaagatattgaggggaaagaaacgttatattggagtgaaaacgatgtatattgcacatataaacgaagacacaaagcaaattcaaactattaaggaacacagtgaaaatgtggccatgctgtgtcgaaagtttgcagttccagagctgaaagaccttatgtatattataggtatattacatgatataggtaaatatcagtcatcttttcaaaaaagaatacagggagataatattagggttgaacattctatctgtggtgcaattgttgcacataataggtatttaaattcgattgctttaataattgagcactgtattgcaggacatcatagcggccttgctgatactggttttttcaatgacactaaagatatgtcaactttacatggaagattaaagagaacatatgaaccaatagactcttacgctcgggaattagaagttccgaatatagataatagtgaacaattgttgaaatatatagttaatgattgtgataatgatagtaataagcttatagataaatttgcatttctcgttagatattgtttttcgtgtttaacagatgctgattcattagacacggcaaagttttgcaatggtgatactaatcgtaagttaactgcagatttcgttaaatgcctaaaaaaaattgatgataaactagcatctttctcatgtataacagagctgcagaaaacaagagcaaaattacagaagcaggcgtttgattgtactgctgaaaagtcagaaatttatttgcttaatatgcctacaggaagtggtaaaactctctgcagtgtcaaatttgcactagagagagccatcaaagaagataagaagcggattatctatataattccatataacagtataattgagcaaactgcaaatgaatttgaggcgatttttaaagatgatgcagagattctacggcatcagtcaaccttttcatatgacgataaagaagatttggaagaagattatagagttacggttaaattagcaatagaaaactgggatgcgcagtttataattacaactgcagtacaattttttgaatctatatatgcaaataagagggggaaacttcgcaaactacataatatggccgacagtattttagtatttgatgaggcacatcttatgcctaaagattacttgcagccttgtcttgaagctgtttcgtatataacaagatatcttaatagtgaagctgtttttctgacagctactatgcctgattttaaaaatttgatagcacaatatgcaataagcgatactaaaatatataatcttgtagatgatacatcaggatttgaaaaatttaataaatgcaaatacaaatatattggaaatgtaagtgatgattctcttatatcttatgctgaaaaatatccttcgagcctgattatagtaaacaagaggaaaaaagcaaagcagatttttgaaggactgcgaggcagaaaatttcatttatcaacatatatgacggcatatgatagagaaagagttataacccggattaaggaagaactttgcaatcttgaaaaggagtatccggattatagaaatgtgcctgaagaaagaaggattatagttgtttcaacatcacttattgaagccggtgtagacctggacttttttactgtttttagagaaatggcaggtttagataatatattgcagtctggcggaagatgtaatcgcgaaggcaaacgggaaaatgcagaggtatttatttttgaatttgacagcgaatttggaaaagcctctgcagatgagagaactaatataacaaaggggctgattaaaaaatacggagatataacaaacaatgagtgtgttgaggaatattatgacaggttgttttttataaatcacgataatatcgtaaaaaactcaatgcatcagttctgtaagagctttaagagtatcccctttagagaatattcgcaaaggtttgaactgatagactcaaagactgtatctgtggttgtgacaagagatgaaaaaagcggggctatgattgaacatctgagagaatacggatatggcaaccaaagaatattacaaaagtacgctttttcaatatatcagtacgaatttgatgatttgtacagacaaaatattatagatgattatgatagtggcatctggtgtttaacaaatacagattattatgatgaggaaacagggattttatttgaagcaaaagattattttatctaacaagattgcagaaaggagttttgaagtgagctacggttttaaaattatggttgagggtgattatgcgtgctttacaagacctgaaatgaaggttgagagagtaagctatgatgtgcctacaccgggagcattggaaggaatgctaaaaagtatttactggaaaccggcaatacagtatgtgattgataagattatagtttttaaccctatagacttcataaatgtacgtagaaatgaagttaaagaaaaagtatcgaaacgaaaagtactgtcgcagatgaagggaaaaggtgatgactcttgtatctatacttctgagacaagaagccagcgtggagctgtggttcttaaaaatgttaaatatggagtagaatttcattttgagcctacagggataaaaaatgaaaaagaagatgatagtgcaaagaagcattattcgataataaaaagaaggttggaaaaaggtcagcagtttaggacaccttgtctgggctgcagtgaatttccagtaaaacgcatagaaatggttgatgaatttgactttgacctcataagttcagacattatagctatgggcgatgttgatttgggatttatgaattataaagtggaattcaaagataatggaattcctaagaataatgactggaataatccaatcttttcagacctggcaacaacaaagtattaccgcccacatatgataaaaggcgttattgatgttgataaatacaggagggaaaccagatgttaataaaggcactctgcgattattgtgatattctggatgaaaggggaaaaactttagatgacaagtattcttttgtggatataagttatctggtttcacttactcctgaagggaatattgataatattatagattatcgtgatacggaagtaataataaatggaacgaaacaaaaagagaaaaaaattcctaaaaaactgataatgccaaagagaactgaaaagtcagggattgaagcaaatataatcgaacatagaccagtatatattttcg

SEQ ID NO: 3644 - DNA, 8477 bp, Unknown
  16S sequences of unknown bacteria
tttgcctcttgatttttctctattagtttaaaaaatagtaaggtactctttttcgggcaactgccaataccactgactgccttccttaacagaccgaacgttcagcgttttctttgcttcgtcaagcacccgtttggatattcccaaactctttgctttttgaagcaacgtctgttgcgggtacttcccatcggataggcagtcaacgataaggttttcagccatatcggattttttctcacggttgacgccgctgagaagatcgtcgatggaaatatcatagtgaccgagccaacgaaagccgttggcttccctcaactcaaaagcgataggtttcccttccggtgcgagggaggatttttgatgtgccgccactcgtatctccggtttgtccttcactctgccgacaacaagaacgcttcttgccgttgcttgaaagtccaccgagccaagacctctgtaattggctttgttaccctgcgccttgttcaaatgtcccacaaggataattgcacaactgtacttctccgcaatcctgccaagctgagagagaatggcacggacttcgtttgctcggttcatatccacccttgcgccgatataggcttgcatcggatctaagatcattacccgtgcacctgtttctgcaatcgccttttccactctctcgtcaagcatcgtcagcgccgcttccgattcgtcaatcactttgatttgcgagcagtctgcatcgccggcgaggagacggggcttgatggtatcaccaagtccatcttctgcggtttggtagattatctttatcggctcacgctcggtatcgtcgcaagggagttttgctccccttgacaatagcgccgccaatcgcagtatcagcgttgttttaccttcgccgccgtcaccgtgaataatggtcagttttccaaatgggatatagggataccacagccattccacttcttcgacggcaacttcatccatactgatgatttttaattctgccataggcgttacctccttttcaaatttcttcaaaactattgaaattggaggagctttcggttataatatttgcagtacgtttttgagaaggctgttccttatctgcgccaacagatattttcggaacagtcttttcggttttatatgccatccttttgccccttcattccgtatagtgtagtgttgatttggtcaatgcggtcaagcaagtcattgtgaacggtggcgcctgcttcgatgcgtttaagttcatcgagtacggcggcgagttcgttgcggagcgccttatacactctcggattgccgaccactgtaatttgctgttgcagagcacgggcacaaaggtagtcctgctttgtgagtcccgatattctgacattgctatccaaaatatccgcttcctgcggcgacattctgaaagcgattgttttgcttctccaacgattgtgacggtcaagatttttagctgacattttcaatatctatcctttcatattcaagcttctttgccatttccgcctgctttgacgggaataggtgagcatagcggtaagtgatttcaatgctttcgtgacctactcggtcagcgattgccaccgcagaaaagcccatatcaatgagcagggaaatatggctgtggcgcaagtcgtggatgcggatacgcttcacccctgcggctcttgagccacgatccatttcacggtgcagatagttctttgaaatcggaaaaatacggtctttctttttgtagccgtaaagcataccgatataatcctgcatttcttcgcagaggaactgtggcattttgatggtgcggttacttttctttgttttcggtgtggtaattacatcctcaccgtgtaaacgctgataagacttgctgattgtaaccgaacctttttcaaagtcgaagtcacccgcagtcagagcgagtaattcgccctcacggataccgcaccaatacagcatttcaaatgcgtaataggatacgggcttgtccatcatttcatctgaaaacttcttgtactcttctttcgtccaaaacttcatttccttgcgttcctctgtacccatatttccggcttttgcggcgggattggagcgtaggtcataatgtctgacagcgtggttaaaaatggcgctgagctgattgtggacggtcttgagataggtctgtgagtacggcttcttcttttcatcacgaaaagcaagcagttcgttctgccaagcgattacatcctttgtggtgatctcgctaacgtttttcttttcaaaatagggtaaaatcttggtttcaatgatatgcttttttgtcagccaagtgttttcctttaagcggggtttcatatccttgatataaagctccacaaaggcggcgaagttcatatccatatcagcagcactctgctgttggaatactcgttcccactcttgggcttcacgcttggtttcaaaaccacgtttacatttctgcttgcgttcgcctttccaatccaagtatcgggttaaaacataccaagtgccgttatcttcatttttataaacaggcattcttattctcctttctggcttcatacagcctttcgttaaagtattctcggttgattcttcctgagatggttataaaacctttgcgcttcaattcctcgttcagttcccgtattaccttgtaggcataagaggttgaaacgtcgaggatttcagcgacttcttctactcgcataaactgttgtcccataggttatcctcctttcttcgttagttgagttttgcgccgtttacccaagtgccgttcctacccctgctttgtcagcggcgttgtttcgctctctccgtcgccaccggaggtcttggcaaaatcgtatcccacttggacggtcattcggttgttttgaaaacgtccccatataacgtcataaattggaagatttatgcatagttgtgaggaaagtttttggactaagcggatatgcttagtgtgtatcattatactaagcatatttgcttttgtcaagtggtttgcaagaaaaatactaaacttttttgcttggattactcttgacaacactaaacatttctgctatactatgtacgaacacttgaaaagaggtgcttttatggctattagcgaaagaatacactttttccgcaatctgcgtggaatgacacaaaaatatctcggattacagctcggttttcccgataaatctgctgatgttcgtatggcacagtacgaaaccggctcccgcactccaaaagcggatattaccgctacattggcacaagttttggatgttgcacccgaagcattgaacgtgcccgatattgacagttacataggtttggctcacaccttctttgcgcttgaagatatttacggcattaccgtcagcgaagctgatggggaactctgcctaaaagttaatgccgctaaaggcaaagatgctgcagaaattatccgtatgcttgccgcttggaatgagcagaaagccaaactcgatgcaggtgagatcgacaaggaaacctacgaccaatggcgctatcactatcccaagttcgatacaacgggcggatgggtgaaagttccttcccaagagctgagcgatgcaatggtcgaagcattcaaagaccgtttgaaaccggactaagaaaaaaagacgacaaaaagcccttaactgcggtaatccacagttaagggctttttaatcgtctaatacagatttaattgttgacaacaaccacttggcaattattctgataacctacaaaccacttgtggtatagaataatggtcgccttaaagagtgttatcaaatcgttatcaaaaggggtgggcgaagtccgaaaacccttgatattactgggtttttaggctttctgtgattattcccactcgatggtggcggggggcttatcggtgacgtcgtagagcactcggttgaccgatttgacctcggttgttattcggcgtgaaatgctgcggataagtgaaatggggaggtctgcccattcggcggtcatgtagtcggtggtgtttacggcgcgcagggcaatggtatattcaaaggttctgtggccgccgcggacgcccgtggtgcgggtttcgggaattatggcaaaatactgcccgatttttttcgaatatcccgctttttcgatctcctcgcagaatattgcatcggcttctctgagcacatcgaggcgttccttggttattattccgacgcatcgaacggcaagcccggggccggggaagggctgacgattgacaatataatcgggaagaccgagctcggccgcaagccggcgaacctcgtccttgaagagcattttaagcggctcgacaagccctttgaagctaatgttttcgggcagaccgccgacgttgtggtggcttttgaccattttcccgccgaccgtgcccgactcgatgatgtcgggataaatcgttccctgggcgagatattcggcgtcaccgaatttggcggcttcggactcgaaaacccggatgaattcttctccgattattttacgctttttctcggggtcggaaacgcccacaagcttgaaaagaaacttggtttcggcattgacgcgtacaaatgtcaaatcacggtccttaaaggcggcttcgatttgatcgccctcatttttacgcatgagaccggtgtcgacaaatatacagatgagcctgtcgccgacggccttggaaagcagcgccgcaagcaccgaggagtcgactccgcccgaaagaccgagcagcaccttgccatctccgacctgctcgcggatttgctcgacgctttcgtctataaaggcctttaccgaccaatcgccggaaaattcgcaggtgtttttaagaaacgtgttaaggcagtttttgcccttgccgcccgacagcgcttccaccgaaattcccgcgccctgtccgacctcgagaacaggaactcccaattcgtcgacccacgaaagcttttcgcggtgaatgagcggaatgtcgctgaaggagccggtgatgataatgcccttgggctcggccgccttaagcttttccggcgtgatgttcgcggggagcacctcgcagaacacatcgcattctctgactctccgtgccaccgtttgagcctgagggcctcccacggtcagcacaaccattttttcgtgtttcatattttctcctccgttttggcattatcttcaagtttgtttacaagtttcttgtccggcgtgacgaaagcggtgttgtaattttcatatatcacaagcccgaaaggtgcgcccgacggctttttgacacggcggacggggcagaaatccaccgcaacgccttggctttccgacgcctttgaaaatgtggcggcaacggtcgccgcctcggtcatggttctgtcgggaacgggtgcgccgccggattttattatgacatggctgccggcattgtccttgacatggaaccaaatatcgtttttctccgagtccttaagggtcagcctgtcgttttgacggttgtttcttccggcaagaatgacaaagccgtcggaggaaacaagctttatgggcggaaggggcttttctttgacctttttgccggatttcgcctttataaatcccgattcggcaagctcgctgcggatttcggacaactcggccgagcttttcgccctggacagctcgtcaaaaacgctgtcgatatatttaaggtcctcctcgcccttttcgataaagccttcaagaagctgcgaggcggtgcaggccttgcggtattccttgaaatatttctgggcgttttgagcgggggaaagcgcggggttcaggggaatggttatctgctcgagctcgggcgaataatagtcggtgacggtgcagcagacgtctcccgtgcgtattgtgtggatgttggcctttataagctcgccgtattttcttttaaaatcgctgttccgagccttttcgagctcggccttgcggatgtttattttttttgcaatgcgcgacgacgcgtttgaaagctgtttcaaaagatcttgggaaagaagatgcatacgcgccttttgctcccgctcggcataatagaagtcgagcgcttttgaaagcgtgtcgaattttatttcttcggccttgccctcatattgacaaatgggcatataacagaaatcaaagggcttgcctcctccgtcctttaaaacaacggggctgcatttcccggagccgcagatgtcgccgatgccgcagagttttttcttcagcctgtccttttgtatgcttccgaattccgaggggggcagcggtctgccgtcggtcacatcgtgctcgatttctcggcagacgagtgggcaaaagccttgcatattttttataagcgccgaggtcagatcttgctcgtcggaatttataagcttacggcaaatgtcgtcggaatctgttttcgttatgtccaaacggtcggcggcaggggggagggaataggaggcaccgggcatgagaattctagcggtgtcggatgcgtcggtccgccgcacggcgtcgattactttgccgttttcgtcaagcagaataatgttggagcgtctgcccatgacctcgcaggcgagggtgagcttaatgcggtcgccgagctcgtttgaggcgtcgaattcaagaaagaccacccgctcaagtcccggctgggtcaccgcgcaaagctttgcgcccacaaggcgcttgcgaagcagcatacagagcatgggaggagaggccgggttttcaattgcggcgtcggtcagctgaattcgggcgccggaggggtcggccgaaatgagcagctttcccgtaaagctgcggcctctcatgttgagcacgcagacgttctttgtcggctgaaaaaccttgtccacccgcgcgccgatgagaagaggcgaaagctcctttatcatgcagtttaaaaatactccgtcaaaggccatttttcaccttctcctttcccgaattcggttacaaagggattataccacaccgaacataagaatacaacgaaaaaaagctttgcaattgaatataatttggtatataataaattaggtaatgcatactcaaaagccgaaaggaaggttttggtttggaaaaaaaatattccgtttccctttcaaagataataggggaatttgctcttgaacagctttatatgccctgcgacccggccgatctttatgtcacaacgtcggacataaaccgcccgggacttcagcttgcgggctttttcgagttttttgacaacgaccgcgttcagatcatcggacgcaacgagacgacatatttgcaggaaagcgacgaaaagctcaggtttgagcgggtcaaggagcttatttcccgcaagccgcccgccgtcataataacgagaggaatcgagcctctcggcgaaatgaccgaaatggcaaaggaatataaggttccgattttgcggacaaacgacaccacgtcgtccttcatgtcggcgcttatttcctttttgaatgttgagcttgccccgagaataacccgtcacggcgttctcgtggaggtatacggcgagggtgtgctcatgctcggggaaagcggcgtcggtaaaagcgaaaccgccattgagcttataaagcgcggccaccgtctcatcgccgacgacgctgtggaaatacgccgtgtatcgtccaagactttggtcggttcttctcccgataacatccgccattttatcgagcttcgaggtatcggaatcataaacgcccgccgtatattcggtatcggttcggtcaaaatgaccgagaagatcgaccttgtggtcaatctcgagcaatgggatcagaacaaggtttacgaccgcatgggagtcgagagcgaaaagacaaaaatactcggtcttgacataacctcggtaaccattccggtaaagcccggacgaaatcttgcggttataatcgaggttgcggccatgaacaaccgtcagaaaaaaatgggatataacgcggccaaggaactgcttcacaagttggggcttgaaagcgagcttccaaaggaagaggaaaagaccgtttggccggaaatttaggaggaataaaatgtatcatataggaatagatttaggcggcaccaacatagccgtcggagtgacagacgacgattttaacattatcggcaggggaagaaagagaactcccgtcggcgccgagtcggacgaaataataagcgaaatggccgccgccgcaaaaatggcggtggaaaatgcgggacttcaaatgtcggacattgccgacgtgggaatcgccgcgccgggaaccatcaactccgaaaccggatatatcgagtattccaacaacattaaatttaaaaactatcccgccgtgcaaaagcttaaggagctgcttggcgcggacaagtgctatatcgccaacgacgccaacgccgccgcctacgtaaacacgaaggacattgtttctacaaaaaatgaaagtttacagaatatgctg

SEQ ID NO: 3645 - DNA, 13834 bp, Unknown
  16S sequences of unknown bacteria
tatcttagcataaagcggaagaaatgtacaacctaatggtagcgttcaaataaatatgctaaaaaatatccccccaccgggcttgtgagaaaattatcaatatgctaaagttactacatgtagtgccgggagaccaagaccggcacattgtatgtgggaggaacaagacgatgatgttaccgcagatcgagcattactggaccggaagagcaaagggatattccgaggtgaaccagcatgaacttgccaccgggcaggacagagtatggttaggagagattcggaagcatcttccgaagggagagaacctgaagatcctggatgtaggtacagggccaggtttttttgcaatccttctggcaagagcaggatatgatgtgacggctgtggattatacagaggcgatgcttgcagaagcgaagaaaaatgcaggagaagtggcagagaagattcattttcagcgaatggatgcacagaagctggattttccggatggatattttgatgtggtgatctccagaaatctgacctggaatctggaatgtccggaacaggcgtatgctgagtggatgcgtgtgctcaaagaaggtggacgtctactgaactttgatgccaactggtatcatcatctgtttgatgaggagaagagacgggagtatgaagaagacaggaggcgtgtagaaaacatgtctatggaggatcattatacctgtacagatattgatgccatggaagaaatcgcaaggcagattcccatgagccgtaccatgagaccggcatgggatcttgaagtccttaaaaatgtcaatgacggacaggcttatgcggatgagcatgtatgggagcgtgtgtgggatcagacagagaaagtgaactatgcgtccacgccgatgtttctgatccatgcggaaaaacatataacggcaaaccatatgaaccgtacacttgggggacttgtatcttgattgaaacaaaacagcttgaatattttgtggtctgcgcacggcttagttccttcagccgtgccgcagaggcactttatacgacccagcctaatgtaagcaaagtgattcgtacgcttgagcaggagctgggtttttcattatttatccgtcagagccgtggaatcatgctgacgtccagaggccgcagggtttatgaatatgccagcaaagcagtggaacaggtggagcagctggtttcttttgcaagaatggacaaaggagaagaattgctggcatcctggaatccaagttcctggatggcatcctgctttgccgcattttatcaggaacacagtcaggaagatgtatgctaccatgtgatgacagcggggacagaagagatactggatcggtgtcagtctggaaaagatgacattggatttgtgtatgtatcagaagaacagatgccgtccttccaatatcgactggagtgtggaaagctggaatttcaggaactgaagcggacgaaggcatatctctattttggaaaagagcatccgctggctggaaggcatagtatcgaagagattccgagagaccaggtgcgcctggtgcagtgctatgaagatgaatatacacttggacgtaatctgatgggtaatatggaagaaagcccggtgtcagatatgaagatttctgtgatcaccaatagcgattatgtgatgaatgaactgctgcaaaagaccaatcttggaaatgtcagcggcggttatttaagcagagaaaaggaatcccgtggatatccgggatattctctctatggggaggaacagccgatcttgttcggctgtgtgaccagacagggcgaacaaccggaaggatgggcggagcattatctttcttatgtgaaagaacgcctgaaggaggaaaaggaacatgagaaaaaagaagacaataaagccggaacagttatcgaatctaagacaaccaacgaatgaagaaaaacagcagattaaaatatgtatagaaaagtatttgagtcgtgcacttagatttggcaataaagtgatttttatatttatagtacttggactaatatttttaagaagcatagtagatgggagacctgattggcctatgtcgttaatagtttgtctaatgatgcttgtattggcatggatctattggaggagtgaaaaagccctttttttgcaactacagttagtggaacagggaaactatcaggttgcagaaggaaaagtcatgaaaataggtgtgtatgaagtgcctggacaagttttggtatcttttgaaaatgcaaatggtgaaaaaataggcttctataatgtgattgatatgtatgttgaagtgggaacccctttgaaattaatattgattgatttaagcaaagaaaaaggaaaaagctgttatatgtttaccccatatatgttatccacagggaatatgcgatagaggtatttgctgaggaaattatcagatataaaagggcatctacaggagaaagaatatgaagaaaaagaagacaataaaacgggaacagttatcgaatctaagacaaccaacggaggaggaaaaacagcagattaaggtatgtttggaagagtatttcaatcatatgattaaattcagtaatagactatgttttatatttatggtacttggttttttcttgttatcagaaggtggtattatattatttgcagttgcatgggtagggtggagagatagaatgaattattttctggagcaacagctattggaatatggaagttatcagattgcagaaggaaaagtgacaaaacgatctatgtctcaaagttctggaaaaattctggtatcttttgaaaatgcaaatggtgaaaaagcaggtcctcatgacgttattaataaatatgttgaagtaggaactcctttgaaactggccgtatttgatttgggggatgataaaagaaaatattattatatgtttacttcctatatgctatcagtggggaaataccagccataatggaaatatacatgcatatgtatggtataacaaaatggaatacaaatatatccatcagagaatatatttgtattgacaataaaagcaatagatgagagaataacatacaatgttcatatagttggcaattaaaccataaaaaataagttcgaagaaagcttcgatgaaaaggaaatccggtgagagtccggaacgatcccgtcactgtgatagctagtccacaggaatataccactgagaagatcttgggaaggtgctgcggatgtctgatgcttaagtcaggagacctgcttattttaatcagagaaagttcttgcggaagacagggaaatcttacttaacagaggattagtgcgcataatatgcgcttattcagagtgggagaaagtcggatgcagatccggcttttttgtatgtttgatgatgggaggacaagtgttttttctctggtggatctcaatgcgctgacagaagaatggacgagaaaggataaaatatgaagaataagaaatgtatcagcctgactctggtggcacttttgatgctgaccggatgcggagcaaagggaagcgacagtgcggcaaacgcagatcaggcaggtaagaaagtacttacctttggatgccagatgtatacggatggtatcgttaataccgttaccgatgagaatggcggatggaatgccatgcgttatggtatcaccgaaggtctgttcaagttcaacgacagcatggaagtggagccgtggctcgcagacagctatactgtaaatgatgagcatacggagtgggttatcactctgaaagatggaatcaaattctcagatggatgtgatctgactccgaccaaggtaaaagagtgttttgaatatttgaaagaaatgggaccgagcggttctgcaaaaccacagaaatatctagagtttgaggcaactattactgcagatgatgaggcaaacaccctgacgattcagacaacacagccctatgcaaaccttccgggacagctggcacatccgaccatggcaattgtcgatgtggcagatacagagaattttgacaatggcaccatcggaaccggtccatacatggtcgagacattcaacggtgtaggtgtgggttatgatctggtagcaaatccgaactaccgcgaggaagttccgtatgacgaagtaaaactgatgtatatgggagatgcttctgccaagaccatggcgctgcagagtggacaggttgatctggtagaaaatattactaacgtatctgatattcaggatttcaaggacaaccctgatttcactgtagacattgcttccggtgtccgttgtggattcagctggatgaattttgacggtattctgggcaacaaaaccctgcgtcaggcaattcttatgggaattgattatgatacgatctgcaattccaaaaccatcggaggtctgtatactcctggattctccgtactgccgtctaccttaagctacggatatgacaagctgaccaacccatatacctatgatccggaaggtgcgaaaaagctccttgatgatgctggtatcgtagatacagacggagacggaatccgtgagcttgacggacagaacatcaatctgcattacgtttcttatgagaaccgtctgctgaacgatttctccaatgcacatattcagtatctggcagagatcggtatcggatgcaccgcagattacggcagctctgatgaccagtggagcaagctggctgccggagactatgacttcaacaataacaactggatcactgtaggtaccggcgatccgtatgcatacatggcaaactgggcaactgatactacttactgtggatattccaatccggagtatgatgagctgtttgagcagctgaagagtgagatggacgaagataaacgtgcagacctgatcttccagatgcagcagatcctggtagatgatgcagctgttctgatcgatggttattacaactcatctatgatttattccaagaatgtaggaaatgcacatatccatacggcagattactactggctgtctaccgagatcaccccggctcagtaaacagacaatgattacccccatccgcgcccttaccggcggtcagggtgggggtatttccgcgcatgagatttccagcgtatatcccattgtaatagaaaggagtaagtattttgaataagaaacagattcttcgacgaatcatgcagatcgtgatcgtgctgatcggtatcagctttgtgacatttctgctgacgtatctgtctcccggtgatccggttcgtaacatgttctccgctacaggtgtgatgccgacggaagagctggtacagcagaccagagacgagatgggtctgaacgatccgtttttcacccagtatttccgctggctgtttaactgcctgcatggcaattttggaaaatcctacagtttgaataagccggttgtagagcttctggcagctcgtgtgcttccgactttgaaactgacactcatgtcattgatcctgatgctgatcatggcagtgccgcttggcgttgcatctgcattacataaagatggcattgctgattacatttgcagggctattacctttgtaggatgtgctatgccgaacttctgggtaggcctgcttctgatgctttttttgtgtgtaaagattcagatattcccggttattgcgtcaggtggcgactttaagagcctgttcctgccggcccttacccttgccattgcaatggcttccaagtacaccaggcaggtccggactgctgtgctggaagaattaagtcaggattatgtgatcggagccgaagcaaggggtgtgaagcgttctacgattatctggaaaaatgtattccccaatgcactgctccctctgatcaccatgcttggtctctctgtcggaagccttcttggaggtaccagtgtggtagaggttattttctcttatcctggacttggaaacctggccgtgacagccattacatccagcgactataacctgatccagggttatgtgctgtggatggcattgatctatatggtcattaacctgatcgtggatgcatcctatgtatacattgatccgcgtatgcgtttgaagaggtaagaagatgaaaaagacgttaaaatttatgaaagaacataagcagtttaccttttttggaattcttgccattctgatcatccttgcagcaatctttgcaccgctgctgaccggaggtgtggatccattgaagggatcgctgacagaagcgctggaagcaccaagcaaggaacatatctttggaaccgataaaatgggccgcgatatttatgcccgcgtgatctacggagcccgtgcatctctgacctctacctttggtgtggttgtgctgatcttcctggtgggaagtgtggtaggagtcattgccggatactttggcggaaaaatcgatgcagttcttatgcgtattgcagatatgatgctggcattcccgggtcttgttctggctctggcagtggcaggtatcatgggtgccagtatccgcaatgcaatcatcgcaattgttgctgtaaactggaccaaatatgcccgtctggcccgaagcctggttatgaagatccgtgaccgcgattatgtatctgctgccatcgtgaccggatcccagaccccgtatatgctgcttcgttacatgctgcccaatgcgctgcctacactgatcatcaccgcggctacggatgtcggtggtatgatgctggagatcgcagcactgtccttcctgggatttggtgcaaagccgcctacaccggaatggggttatatgttgaatgaaggccgtgcatgtatgcagtctgcaccatggatgatgctgtatccgggtcttgctattttctttgtcgttgttgtatttaatatgctgggagattccatccgtgatatcctggatccgagagcagagtaaggaggtaggaaaatgctgaaaattgataatattacgatttcttataaaaatgttcctaccgttgtagatttcagtctcgatatggctccgggccagatcgtcagtctggtaggagagagtggaagcggtaagaccactgtgatccgggcggtcctgggactgcttgcaggaggcggtaaagttaccaggggagatattctttttgacggtacttctcttcttaaaaatacaccggagcagtggagaaatctgcgaggcagtgagatttccatgattttccaggacagtggtgccatgatgaacccgacccggaaaatcggtgcggtatttaccgaatatctgcagactcatgagaaaatctccaaaaaggatgcatgggcaaaaggcgaggagatgcttggaaagatgcgtctgccgagtccggataatattatgcgttcttatccattccagttatccggtggtatgcgtcagcgagtaggaattgctatgggtatgacctatcagccaaagcttctgctggcagatgagcccacatcggcactggatgtgacaacgcaggcacagattgtgcgtcagatgatggaactgagggatgattatggaaccggcattatcgttgttacccataaccttggcgtggcagcgtatatgtctgattatattgtagttatgaagaatgggcggattgaagaccagggagaccgcgaccatattctgcatcactcagaaaatgactacacccgcaagctgttaagtgcggtaccttctatgggagggaaattttatgtttgaaaatgatgaagttgttctggaagcaaagcatgtcacccgccgttttccggcgtcaggcggacgtactttggttgccaataatgatattaacctgaaattttacaaaggaaagacattgggactggtaggtgaatccggttgtggtaaatctacattcatgcgttttctggtgtctctggataccccttctgagggagaaatcctgtatcgtggaaaagatattaccaaactgaagggagaggaactgcgtcagaaccgtcagaacattcagatggtattccaggatccgacctcttcgttcaatccgaaaatgaagatccgggatattgtatgtgaacctcttctgaattttaaccggattcagaagaatgagaaggatgcagcctgccgccgtctgctggaaatggtggagcttccgggagagtttgcagaccgttatccgcataacatgtccggtggacaacgtcagcgtgtggcaattgcccgtgcactggctctggaaccggagattctgatcctggatgaggcaacttctgcactggatgtatctgtacagcagacgatcatagaactgatcgtaaagcttcagaaagaaaaaaatattaccattggttttatctgtcatgatatctctctgatccagtcctgctctcacgaagtagcggtgatgtatctgggaaatgtcgtggaagtgctgcctgcagaagatctggcagagcatgcggtgcatccgtatacaagagcactgattggttctatttttgatattggtatggatttctccaaaccgatcgaagagatcaaaggtgaagcaccgagtccgttggatgtgcctgctggctgcccgttccggggacgctgcccgaaggcaactgatcggtgtgcacaggagaaacctacactccatcagatcggggcagatcacgaagtggcctgtcatctgtttgacaaggaggataaataattgaaaaatgtaaaaaaactcattgcattattgctgacactgacctttgtgacagcgatgatttcctgcggaaaaaatcaggagcaggagcacattcataagattggtgtggttgtctatgatctgaaggatgagcaggtgcaggcatttcgggagtatctggaaggctatatcggggaaaatttctcagatgtggatttcctgtactctgcagaagtgaccacagaggagcaggagatgcagtttctgaacgatgcaattgcagcgggcgtagaaggcattatggcattcaacagctttgatctggaaaaggaagtggagctgtgcgcagagaacggagtgtattttatccgtccgtccagtacaacggatccggaaacctttgataaagtagcagataatccttattttctgggctattttggaccgagaagcgagatggaatatgaggctggatacgacatgggcgcctactttgcagacgaacagatgtctgacagctattttctgttaagcggaggagcaggcaccaatgtgatgcatgaacagcgtgcggaaggaatgttggatgctctgcaggaagcttatggtgtacagtttgagcagagcagtgctgaacttgcatctgcttctgaaccggtaagtgtagaagccggaagcttaaaagtaaccgtattccctggctatatcggagtgccggatgtgggtgagaaagctgttgcagagtttgaaaaagatccggctggtgttgttatgagtacgattccagtacagaccattgcagattctctgggagatgcaagccttggaactgttgactgttatacggaaaccaatggagaactctttaaaaacgggaatctgaaatatctgtgtggtaaatatgaatctatcattggaccggcctttgcagctatgtataatgcagtgaccggttacagcgaagatttccgtgaggatggaaaagcatttgccattcagcagggcttctggacatccacggattatcaggatttccagaaaaaatatgaactgtcttctggaattactctgaatgcatacagctatgaagaccttctggacgtgtgtaaagcgcataatccggaggcaaacttaaatgatctgaaggaacttgcaggcgcgtgggattttgattccgcagcccagagaaggaaataatatggaaaaacacacactgacaaaaggaaatgtaagcaaaggaatcctgttgtttgtgcttccaatcattgcaggcagtctgattcagcagctttatgtgaccatcgacgcagtagtggtgggacagtttactggtaagctgggtctggcagccattgattccgtgcatacattgttcaagttccccctgaatttcatgaatggtctggcaacgggtgcaacaattctgatttccggacattgcggatccggggacaagcgccagatgcattgttccatccgtaccgcttgtacggtggcagtgattctgggagtggtctgctccgtgggcggagtaattctgactccatggatgttgcagatcatgtctgtgccggatgaagtttatggacgggcatttgtctatactaccatttattttggcggtatctggtccatgatcctttataacatgacggctggaatcttaagagcctatggcgactctaagagaccgctgtatgtgctggtctgctgtgcagtgatcaatatttttggagatttattgctggtaggtgtgttggacatgggagttgccggtgcagcattggcaaccgtattttcacagatcattagtgtggttgttatcttttctatgttaaaaaaggttcttcatgtggaaaaaggggagaagcctctctggtggcctcatttctgcaaagaacatatgcagcagatgctgcacatggggtttccgctggcattgcagtcgatgctgttccccattgcaaataccattgtacaggcgggtgtcaatacgatgggtacggatcagatagcagcatggggtatctgtgacaagctgaatatgctgatctggctgttgtctgactccatgggtccggctctgacaacctttaccgcgcagaatctgggagcaaagaataaggaacggatcagaaaaggtgtgttcgttggtacaactatgtctgctggagctgtcattatggtgagtatcattctgttcgttggcgcagcttttatgacaccttggtttgtgtccgcacaggatgcagctactttagcacctctggttggtgcttatgcccggatgatggcgccgtttttcctgttttatgctatcgcagaggctctgtcaggagcctgctgtggcacgggagatacgatcagaccgatgatcactacactggtgtctatctgtctgctgcgtgtgattggtgtgttattcattcttcccgtatatgaaactatggaatgcattgtagtgatctacattgcttcctggattgccgccggtatggcattcctgggactgtggaaatggaacagctcaaaactgtagtattccaaaatgtaataaaggcataatataacggtatgtttaactatcccccacggtgggttgtgagagatgcgctccctctgttatagtaaagaaggtctttactatgtcagagggatttttttcgtagtatgacaaaaacataatcataagggagatagagaaacatgaaaaagtttaacaaagtagtctgtctgtcactgagtgcgatgatgctggcagcagcgatcagtggatgtggtgcgaaggagacaacagatgcagtacagagcgagaccacaggggaggctgttccggctggtgaaatgtccagagacaacaccatgatctatggtgcagaattcatggtggagaagttcaatccaatcttaggatccgagtactgtgatgccatgattttcagaggcctgatgaaaacagatgtagattgtcagccacagtgtgatattgcaaccgattatgaaatcagtgatgatctgctgacatatatcttcaatattcgtgatgacgtaaaattccatgatggaacaacattgacagcggacgatgttgtatttacgatcagcagtattctggatgagaatgtgaactcttccatccgttcggattttctccttgtagataaagtagaaaaactgagcgatacttcactgagtattacattaaaagagccgttcccggctttgcttgataagctgacagtgggaattgttccggagcactgctttgaaggacaggatatcaacacagctgattttaatgtgaatccggttggctgcggaccgtacaagctggtatctttagaggcaggtacaaagtgtaccatgaccagatttgatgattattatggagataaggcacagattgagaatattatctatctgtatctgccggattacaatacaagagcactgcagcttaaaaacaatgagatcgactttacttttgtagagccgagccagattaaagagctggaagctgatgagaacttagatgtttatgtgatcggttccgcagattaccgttgtgttatgtataatttccaggtatgtgatctgtttgaggatgtaagagtccgtcaggcactgaattatgcaacagatggtcaggcagttgtagatgccattgctcatggctatggtcagattgcttattctccactgcagaagaataaattcaactgtgaggatgtagtgaaatatgattatgatccggaaaaggcagcagcacttctgaaagaggcaggttgggctgataccgatggagatggaatccttgataaagatggagagaagctttcctttacccttaccgctccggttgatgatgaagttcgtgtgaatattggaacctatctgtcatctgaatggaaaaagctgggtgtagactgtaccatgtcagctcttggatgggatgccatcgacattgcgaaatgtgagtccttcctgcttggatggggaagcccgtttgatgcagacaatgacacctatcgtctcttcacaaccggaagcgcagataactatggattctacagtaacgaaacagttgacaaggctctggctgaggctcgtacaaagacagaggatgctgacagagcagcatgttatgcagaattccagaaagaatttgccaaagatccggcatatgatcttatctgttatctggatgccttgtatgcaggcaacaaacggatcagtggaccgacagataaggtgcttggacatcatggagcaggtatcttctggaacattgaagactggacaatttctgaataaacgtgggcttgatgtagaatgaaacgatatgttttgaaaagactgattcaaagcattgtggttatgtttatcatgagcatctgctcatttgcacttataaatgcggcaccgggtgaaccggctgccgcaatttatggtggtcagatggataaactgacacaggctgagaaagacagaatcaatgagaatctgggactgaatcagccagtcataataaggtatggcaactggctggcagaagtgtctcacggtaattttggatattcgtatgcaaacggacaaaatgtcggaaagatgatcaaagagcgtatgccgaacacgatgaccttatttttgtcttcttttgtattgacagtaatcctggctattgcagtcgggctttttgcaggtttacatccggattctatgatagacagagtgatcacgatcatcagcattacgcttaatggaatccccagtgtgctggtgggcatcattttgatccttctgttttcggtagtgctcggctggctgccatcttctggtgtaacatctatgttttcggatacactgaaggatcggatcattcatctgattctgccgacagtgacggttatgttcagtcatattggctctttttcccgttttatacaggaaggaatgaaagaagagctggacagctactatgtgtatgtggcaagagccaatcatatgtcgaaatgggatatttatcgaggtgccatgaaaaatgcactggttccatttgtaaactatgtgggaactcatgtaccgtcatttttttccggattcgttgtaattgagacagtgtttgcatatccggggctcggaaatatgatcgtaaatgcaat

SEQ ID NO: 3646 - DNA, 2068 bp, Unknown
  16S sequences of unknown bacteria
cgttgtatttcgacatggaacgacggccattcgacaaaatgtgtattctttggtgggagaaaaacgggggttttccttttgataaagaagaggtaggataaagatagaaagacaaaatggaggtgctagctatggatcaacagcaggctgttctacaaaacattttgacaaggcgcagtgtgagaaaataccagcaaaaacctattccgcatgatgtactggaaaagatcttggaagcaggattttgggcgcccagcgccagcaaccgccagacttggcattttaccgtgatgacaaacaaagacaccatcgacaaatggaacgaggccgggaaacaatggatggcccattgcggcagggaatcacagcaaagaattggccgagacccggaacggcatgtgtttttccatgcgccatgcgtccttttggtatcctataaaaaggacccaagctggcacagcaactggggagaggtggatacggccctggccgcagaaaacatcatgctagccgctcatgccatggggctgggcagctgttatattggatggtttacgccttggctaaaaagcggggccgccggcgagctgctgcgggatatgccgttgccagagcattaccagccgtttcatttcattacgctggggtatccagagcaggtagggcctgcgcccaaacgcattgggggctatatcgattatttggatgattgatcatcaaaaggagtggcttatccgctccttttttgatacagggattggcgggaacgatatggcaatggtacaataaatcaaaaaacaaggaggcgaaactccatggtagaggaattgctggcctttaatacaaaatttgtagaagaaaaacaatatgaacaatatgcaacaagcaaatatccggataaaaagatcgccattttatcctgtatggacacaaggctgacagaactgctgcctgcagcgctgggattgaaaaacggggatgtaaaaatcattaagaacgcgggcgctacgattacccagccgttcggcagcgcggtacgaagccttttgattgccatctatgagctgggcgttgaggagatattgatcatagggcatacggactgcggcgtacagcatatggatagccaagcattgatcgagaaaatgaagcaaaagggcattgcgcagcaaacactggatatgatggactattgtggaatcgattttgcaagctggctcagcggatttgaggatgtggatacctcggtacgggaggcggtagagcttttgagaaatcatccgcttgtgccaaaggatgtggcgatttatgggtttgtcatggatacctataccggcgcaatgcgacgcatagaggcgtaatcgaatggatcggaaatgcacaatgatgcggcattcattttctcagagagtgtatgaggctgtgaagcaaatcccgtccggacaggtggcaacctatggagagatcgcttggcgtatcggcgctctcccagggcagctaggcaggtggggcaggcgctggcgcattgtaaagatcctacaacgccgtgccatcgcgtggtcaacgccaaaggcgacaccgcgccgggatatgcagagcaagctgccctactggaagcagagggcgtaccttttttatcggatggcagggtggatttgaaaaatggccaaaagagtggagaaagacatgagagaaaaagataagacagcgctggagatcggccccaggtttgtccaagaaacatcctactatgatttttcgcaaacaggacgtagacagggagaaccgcaacccataccgttttagacagcggagaaaggcatggaaaccgtgctgctgccgccctggcagcaagcattgccatccagctgcctttggacggtcatggaaaagcgccgcagcaggcgcacatacgcagaagaggcgttggagatacaggcgctttcctgtttatgcggtgtcacgcagggcattgaaaaggagattgtgttcaatgggaatgctacactgcgtccggtaccctccgcgggggccaagcacgctatagaaacaatcgtgctggtgcggc

SEQ ID NO: 3647 - DNA, 28004 bp, Unknown
  16S sequences of unknown bacteria
ttatttacctaaattttacttgaactctggactacaatcacaacttttttggtacaagataatgtatctggttataatgaaaaagttacaatttgtaatcttttaaagcccatgcaaccccttatatgagtcaaatataaggcaaaaaaatataaattttttaaagtggggagacaggataaggtttaaagttaaaaataacagtaaagatatatccaatcccagtttacataaaattttttatcaaaatgaaaaatattagttttacttttcaaggtaaatacatgttttatatgtaaaaaattgtaaaaatattatttataaaaacgcttatcaaactagcagagaagcggttttaaacaattatttccaatataaggaaattttaagtttcataactatttgtataaatgacgaaaataaaacactcatgtaatatatgtaacaagtttgtaacttatgttttcttgcaatctgcacataaaacaaagaggatttattaacataaatgtaaattaatggtagaaagttaagttaaaaagtcgtaatttcaattttatggaaattgtgtttgtgcatattatataaaatcaagttcattttttatttgacatatggaaaaacagtgaatataatagcaaacatcgaagtaatccgaaaacaagcggcagtatatgcatcttaacaaaatgtaatttcttttccatactgtcgtaagcatgaaggagagcaagtatgaaaaacacagagaaaaaagagcataagtttttaaaattggtaaatacaccggtaaaacgtgtcagtgcctttgcattggctacagtgattggtgttggttctgttgtaacagtaatggctacaacaggaaaagccaccattttagataacggtgtatcttatcgtgtaaatctaaccacaacaaatacagaagaattattagagaaagccaatattcaagttggttcaaatgatattgttgaaagagatgacaccaatggtgttgtaattaaaatcagacgtgaaatggatgcaactgttgaggctgatggtgcagagaaaactgtaagtgcacactacggcgacaaagtgtctgacgtgattgctgaagcaggtgttgttttagatgataacgatgctgtaaacgtagatatcaacggtgagttaacaaataacacggacctagttgttacaagatatcataaagtaacagtgcatgataatggggcaacccaaattgttgatgttccggaaggaacagtagccaatgtattatcggcagcgaatatcacattgggtgaagaggatactttgagcgtagcagaagcagagccggttacagatggtatggaaattaccgtaaatcgtgttacttacgcaacacaaactgtaacagaggatgttccttttgaaacagaagtaatcgaaacagcagacctttataaaggtgaaacacaggttcaaacagctggtgtaaacggaacaaaaactgctgtgaaggaatgtaagtttgtaaatggtcaattggtagagtcaacagatgtagcagttctctcagaaactgcgcctgtagcggaagtacaattggtaggcacaaaaacaaaacctgcagcagtaacttctgtgtctactgcaagtgcgtctgcccaaacaggtgcaactatttcaggtaatacaattgttgacgcaaatggtaacgtgttaaacgttgcacgtgtgattaccggtgaatgtaccgcatacaccggcggtggaattaccgctacaggcgcacctgctgctgtaggtcgcgtggcagttaaccctaacgtaattccatatggtacaaaattatatattgcctctccggacggtagcgttgtatatggttatgcaattgcttctgataccggtggtgcgttgatgtcaggtcgtgttttggttgacttgtattataatacactaggagaatgtgtcaactttggccgtcgtcaaatgaacgtttatattttggcataatatagctgttaaaagcatttccgtaggacgggaatgcttttttatttcttttatgccggagaatgttctagaataatgttacgttattgctattgttcatagcaaacggaatttcgtttccttatatccaaatcagaatggaatgaagcaactgtaatgttagcgtttcttgatttgctgtccattatgattggaatatagataaaacagccatttgcattgatatctgcaaatggctgttttatctatatttacttgcattgatttttatcaaattattttagcaaagaggtaatatgcataggaattccctttttgtctatcttaaattcacagttttcataaaatcctacattattgccattggcaatcaaagagatacgcagataggattgatatgttttcagtacacgttctatcaattcttttccaataccgttatattgataatcggggtctaccaataaatagtgaatgtaagcggtcataattccatcgtccataacgctaatcaaacctaccagtttctcaccgtcccaagcactgtaaacggtactgtaattttgcatggcaatcaccagtttttcagggtgatatccggatgaccaatgaacagacaaaaacagatcttgcaattcttgcgcgttaaattcttttgtatctttataggtgattgtcataatatattccccttttttagtatacttttattttatcataagtgctgatatagtacaagattcattcttatcataccagaaatatttgaatttgtattgttaaaaagctgtcccataaataggacaacttttatgtaatatgaaatgttttacttgtaattttgcaatcactgtgataaaataaaactaaatcaaacgtatgttcgatttcggaaggttgaaagagaagaggagattatatatgtttcaagaaattgtaggaagtattctgctggtatttacagtgggattgttagtaaaatatcgtccaaagacatttttatcatggtatttatgtttgctttgtgcagccatgtctattatgtccattacagcgggcggtggttcatggatattacaattgctgcaaacagcgtcacagatgattatggcagtgtgcagtttgttttatttacatcgtgaaaaagtatttgcgatacgcaaagtaaaatcattgcaagaacagaaacagcacacacaggcaattgtaaaggaagaagcgagaataaaaaaacaagtcagcgttttgagacaacaggaaacagtagaaatgaaacgttgtgcataataaaaagaacccgtttgtttggtaatgcataaactggactacggggctgagaaaaacccctttaaatagataaggcctgctgcaatttgtttttgcggcaggcctattgattttcttgaaaaaatcaataatttagagtaaaataataatacaataactttggagggatgaaacatgttaattgcaccgtcaatactggcatcagatttttccagattgggcgagcaaattcaaatgattacacaagccggcgcagactggattcacctagatgtaatggacggtttatttgtacccaatatcacctttggagctccggtgataaaagctgtaaaaccatattcagatttaccgtttgatgttcatttgatgatacagaatcccaaacgatatattgaggacttttgtaaggccggtgcagacattatttcattccatgtagaagcggaagaagatgtaacaggaaccatagaaaaaattgtagcttgtggtgccaagccggcactggcagtcaaaccgaatacatctgtagaaacggtatttccgtatttggacaagctgtatatggtgttggtaatgacagtagagcctgggtttggcggtcaaaagtatatggctgacatgatgccgaaggtaggacaattaaaacaaaaagcgcctcatctattggttcaggtggacggaggaattggagttgataccattgcttccagcgccaaagcaggcgtagacatttgtgtggcagggaccagtgtattccgagcatcttgcccgaaacaaatgattgcagatctaaaaaaggcagctaaagatgtttaatgttttgtacaagggtaggtgctgcaaacagtgctgaataaatcttctgtaagcaaaattccgtgttccattgcagcagcagcggcaacgcgtccttttccttttaaaatgccatattcttggagaatcgcctttgctaacttactggttttccaccttaaatgaaagataatacggtacttatctccaaaacgtaataatttcgcttttggacaggtaatgcctgccatacaaagtcgttccgccgcgtccatcatgtctgtacaattttgaaattgatacacatatgggccggtggtttcttttattcgaaatttttttctttgaaaagatgattttatacgagacatattcggaatatgcacactaaacagcaatacaaaggtgccgtctcgaatagaaagcgcacgaattgtaatattttcagcttctgaataagaaaagccggtatatttacagccttctaaaaatacttttgctaatgttatttttgaaagagttgtgggaatatcaacggagatgctgtttaatcccaagcggagtgcttcttgctcacttaaaataatcagcagatgtgacgcatccatgatttttgctttcaaaattacaccccctgcataaaaagtacggttactctatactattacagttgtagcaatattgtctttgccaaatgatgaatattttggcggacagtcagaatattataaactattttttgtgtgttatatgttatattatgtgatagttatttatatgaaaatcattttttatttcatgttatattcattaaaagtaaaagggctgcaattgcagcccttttacttttaatattattgaatgagaatagttttatattctatacttttacaaattaaccatatattgtaattatagttagaattatatcgtaaattgttgtatttttcaagaataaattatcttttttcctttttgtaaaagtataatatttcataattttacaaaaggggaaattaaaatgtatagtaagaaaatcaaagcaatatgctgtggcattcttatgataggtgccatgtttactttcattggatgcagcgattctgcgcttgactcatcgcaggtgtctgaatcctctcagctatctcaaccagaggaaagtatggtttcatcggaattgaccaatacttcgtctgattctgcggcgaatagcgatactgtaattgaaaatacagaggacgctcaaaaactggcatttgggaaaatattgtgggatgcttatttgtatggtatccttcccaatggaaaaagtttagaacaaacaaatagtcagtcgggcgagaacagttttgctatttttgacgtagataacgatggacaggatgaactgttgttatactggaccgatgccagtatggcaggaacagtaggatatatttttggctacagagatcatatggtttataacgaattttcagggtatccttctatgcaattttatgataatggaattattgaaatgaagtggtcacataaccaagggcttggaatcaactttgatttctggccgtataatgtttattcctatgatgcagagaaagacagttacagtgaatttgcaaaagtggacgcatggaataaaagtgtcagcaacacaaaaaatggtataccgtttcctgataacattgacgtagatggggatggtattgtttattatattcttgcccctgactcatgggattatgacaatgctcaaatactggatggaagtgaataccaaaactggagacagtcttatcttgcagatagtaaacctgttgatattacttttaaaacattaacggctgataatatagtttcttcggtatatcctgaatttacatatctccattcacaggccagataactaatgaaataaacaatggctggtggcattgttataatatttgtataggaatagaaagatattttatatgaaatataaggagaatcaaagatatgaacatagctattattattttgctaattattttactcattattggtctgatgaatcttgctgtattattgtcagcagcaagaaagagaaagaatgttggtgaaccgttccgtatgaacgacgataataactcagaatggtttataaagtttaatgagtccaaaggcgatattcttgaaaaaatcaatctgcttaccaccggaaacagggacagcttagataaaataaacgatactctgaataataagattagcggctttcagaaagatgtatttgataaatttgattctatttcatcctctgttagaaaatctcttacggataatcgctttgaatccaatgctgaccttgagaaattaaagaaagaaattacagataatttaggttcaattaataaaacattggaagaaaaaattacgtcactacagatgaacaatgaagaaaagttagagaagatgcgtggtgtggtagaagaaaagctggataaaacgttgaacgaaaggttaaaattatcctttgagtctgttagtaaaaatctggaaagcgttcaaaagggacttggggaaatgcaaacactggctacagatgttggaggattgaaaaaagccattactaatgttaaaacgagaggtgttctgggagaaatccaattagagcgtattctggaacaaatgttaacggcagcccaatatgataaaaatgtacaaattaaaagaggtatacaagaacgcgtagaatttgcagtaaaacttccaaacaaaaatggggaggggtttctttatttaccaattgattctaaatttccgtcagatacatatgaaaatttattgagtgcttatgatagtggagacaaaacaattattgattctgccaaaaaagagttttcccgtaagataaaagcatttgcaaaagatattcgagataaatatattgaccctcctgctacaacggattttgcaattttatttttaccgtttgagggattatatgcagaggtagtacaaatgcctgagctctttcaaacattgcaaacagactataagataaccgttactggtcctacaacactttctgcatttctaaactcgctgcaaatgggctttaatacattagcaattgagaaacgctcttcagaggtacgagaagtattacgtgcagtaaaaacagaatttggtaaattcagtgaagtccttgcaaaggttcaagataaattacatgcagctgatagtgaattatccaaattggtgggaacaagaaccaatcagattaatcgtaaactgagagagatagaagaactccctgaagcagaggtatgtcgtatattaccaggcaaaccggatgatgaggaattggaataagtgatgaattatgttttggtattgaccatatagatatgtttattttacaaacttttgttatgtttgtaataaaaacagagaagtactacgggagagagaaaagattgtgaatacattaaattcatctacaatatgtgcaatcataatcgtagcagcaagtgtaatcgtaatagcacttgtgattacggctatcgttttaattttaaaatctccgtttaggtatccgtactttcgcagctattttaatgtttccggtaaaagaaaccccaaaattgacgttttcattgatgaatatttaaatttagggcacttttccacaattaaagcacatcataaagatattttgctttggaaacaaaagtgtcaggaaagaattcaaaaaagcaaaatgaaaaactatcgggaaaaacagtttcattcttgtttggatgatgaaaatgcattccgattttatcttattcgtgagcaaacaagatatagacagcgaaattatgtaaaaacatcgtataaggtttcacaaacagtgggtcaatttttatgcgattatacatatctggaaaaccgaaatagacaattggaacatattaatcatgaatgtacgcttagggactatcactgtcaaaatcagagaaaacgtatgacaagagaacttagaaaggaaattatgatccgggataactacacttgccaacagtgcggaaagtatatgccggacgaagtggggcttcatatagaccatattacccctgtttctaagggcggaaaaacaatacgctccaatcttcaggttctttgttccaaatgtaatggaagaaaatcaaacaaaatttgagaaaaatccaagcttatatttaagatagaataatattttttactaacataaagtatatatcaaaacgattccttgcaaaccaaaagacatgaatcgcttggaaaaagatttgatatggctttttaaagcaacaaattcttacaatacaacaggcggtggctctaaaataagataatatttttatactgtattaggtaatcttgaaaaatgctccttcttaaaatattaatatgaacattcttcttgctagttcataaggaacaaaaaatagcttttataaaatttatcatttctgttactaatgtttttgtatatgtaaatgatatgacaaggaaatattatgttttaaatttaatctgaatttttattaccatgttaccgtcaaaactccaattttaaaaaatcataaaaatatattaaaagatcggttaaaacaccggtctttttttaaggcatttttaaggttgggttaaatgtttgtgagataaattaaatcatggttaatcttattgaatggagtaaaaacacatgataacataaggcaagcgaacagaaacaggaatgtatgaggaggcagaatatgaagatgaagtcaaaaaatatatggttaaaagcaggagcggtaacaatggcttttgcagtgggaacgggtgttttattgcccagcgtactcaatagcggaaatatgagtgctgtttatgcccaggaagcaaatgtatattctcaggtaccatctgatgtaaatgttattgatgcaactaccgtctggaaatatttagacgataatacagatccggcaaaggggttgggctctctaaccgcatggacaacttctgattttaacgatggtgcgtggaaatccgcagcaggcagctttggtgcaaaacggggtcagttaacagagtttgatggctttacacctactgtgttattaaatcaatataaatcagatgtaccaaacgaagatgtaccaaccttctttttccgttctacatttgaagtagagaatctcagcgaaattacatctattacaggcaccttatatcatgatgacgcagtggccgtttatattaacggaaataaagtgctggctgtagatatgcctgctgaggagcaggaaaataacttatattatgcaggtgtttcggccggtgcgccgaaagaggctaagctggaactcactaaggaacaaatccaacaatatgtaaaagaaggaacaaacgtaattgcggtagaattgcataatgaccgtaaagacagttcggatatttattttgaatttaaaaatctaacattaaattatggtgaacctgagattgaacaaaagtctgttaatctaactgtaggcagtgatgaaacctcaagaaatcttacttggtatgcaaattctgaaacagcaggtcaagtacagtatgccaaaaagtctgatatgaaagatggtcaatttccgtctgaatatcaaacagctgacgccatatctgcacagtcaaatgaaagcggtttttattccaatcaagcgaccatgagaaatcttgatgagaatacagagtatgtatatagagttgtaaatggtgagacggttagcgaagagtatacattccaaaccggagactttgacggagcattttcttttgcttttgtaggtgacccacaaattggtgcaggaagtttgccatctgatattcagggatggaacgatactctggatgtgattaaaaatcagctaaatcctgactttttattctcagcaggtgaccaagtaaatacagcaaataatgaatcccaatatactggttatcttaacgatacattttcctctcttacaagtgctacaaccataggaaaccacgatagcagttctgctgcttataatgagcattttaatcttcccaatgaaagtgctcagtacggtgctactaccgcaggcagcgactactggtttgtttacaacaatacgctgtttatggatataaactcaaatgaccgttccgctgcagagcataaacagtttatgcaggatgcaattgctgcgaatccggatgtaagatggaaaacagttgtattccaccattctatttactcaacagccagccatgccagtgatggtgatattattgatagaagaaacgaactgccgcagattttcgatgaacttgatatagatgtcgttctaatgggacatgaccacgtatatacaagaacttacatgatggatggatttaccccggacagaagccagggcgtacagtccagtgtgacaaatcccacaggtattctatatttaacagcaaactcagcaagtggtagtaaatattacggtattacagcaccagaggcagaatatgctgctgttcaagaccagtccaaaagaagaactgttaccaatgtggaggtaacaaatacttcttatacgatgacgacctattttgcagatgatatgagcgtactagatacatttacaatttataaaacgcttaatacggcagatatggaaagcttaatttcccaagcacagggattgaatcaggcagactataccgaagaaagctggaataaacttcaaatagctctgaaagcggcagtagagttaaaagataatgtaaatgcgacgcagtcagatatagatgctgcaaccacggcattacaagaagcaatagatggtcttgtaaaagttggtgtgaatacgaacacagaagctatggacagtttgatttcccaagcacagggattgaatcaggcagattataccgaagaaagctggaataaacttcaagcagccttaaaagcagcaacggagctaaaaaataatgcaaatgcgacacagtcagatatagatgctgcaaccacggcattacaagaagcgatagatggtcttgtaaaggtagataaccaagatggagaagtggtcaatacaggagatacatccgatgagcagataaacgggccacagacaggcgatactgcaaatgcagtagaaattgtttctgcagtttctgcctttatagcagcaggtaccattgtggtagtgctaacgaaaaagaaaatgaaatcataaaaggatatttaaatttatgtggaataagataaaagaaaatgggattgtactggcagtcattgttctttcagtagcggcagtcattctatttcaactttttggggtgaaatcttattccagatatagtacagacagcctccactacgaacaaggaaaagtagtggaggtttcttctgagaatctggaatatgatgaagagttagggttatatttaggtaatcaaatattaaaggtggaaattaccggcggagagcaaaagggagaaatcatagaagtttccaattatcttactaagatgcacaatgtttatgctcaaaacgctatgaagcttattattaatgcagatacacctaaaaatgcggagccgtattatacggtatataattacgacaggaatattcctatattaagttgttgtatcatacttgcggcagctatcatttgtatcggacggggaaaaggggttaaggcaatacttggccttggatattctatgtttatcattatctatcttgtaattcctgctgttttttccggttattctccaatatggatgagtattttatgtgcggttttatcaactgctgttaccttactgcttctgaatggacaaagtaaaaagacgtatgctgctattatcgcgactacgattggtgtgctttttgcacttctcttattcatgctaatgtcatggatgctgcacctgaatggttttagttcatcagaagcggagtcgttaattttgattcacgaatctacaggactaaagattaaagatttattgtttgccggagtattaatttcatctcttggagcgattatggatgtgggtatgtctattgtgtcatccttatacgaggtacaacatcacaacccatccattacagcaagacagttattccgttccggtatagaaattggaaaagatatgataggaacaatgaccaatacgctgattcttgcgtttacaggcagtgcttttattactttgcttgtatttatctcttaccaagttcagtttaatcagttatttagttccaattatatggcaatcgaaattgcacagggagtgtgcggtacatttggcattgtacttaccgttcctgtagcctcggctgtggctgcattcatactaacaggcaaacgctttttatggaaaaagaaaaaacaggaaaagtgccctgataaaaatcatgaaatccctaaaacaagttcatgattgcataaattaattaggaaaataaattttttcaaacgactgcctcttttcataatttaaaactacgaagattttttattattttgattttagattgtacatatttgttcttttacaataatatgtcttttagacctattattttctcacaaaatgtatactgttacattaacaatcaatacaaaaaagtgttaaaaaaaagactatccttgcacatagaaatataaattgctaatataaaattaatatagcgaatatcgtttaaagtggaacgaatcaatatctgttaatggaaaggataagtcaatatgaaactggaaaataaagttgctattgttacaggtgcgggctcaggaatgggaaaagcaattgcagggttatttgcaaaggaaggcgcaaaggtaattgcctcagatattaatgaaaccggtgtaaaagatttaatcgcttcttcaggggatatagcgggagaaattgttttttctcagacggatgtctcaaaccgaaatcaggtggaaactatgattgaccttgcagtaaacaaatacgggaaactggatgttcttgtaaataatgcaggtgttttggataaaatgtattctgttactgaggtagaagatgaattttgggataaagtgatgagtattaacataaattccgttatgtatgcttgtcgaaaggccattccgattatgatgaaaaatggtggtggttctattattaatactgcatccgtaggcggtttatttggatgccgtgcaggtgctgcatatactgcatctaaatttgctgttgtgggtcttaccaagaatattggttttatgtatgcaaaagaaggtatccgttgtaatgcaatttgccccggaagcattattaccaatattgcagcaggactttcaaatgccagtgaatttggtattgctcgttcaggtgcgggagttcctcttagcccaagaatgggtcaaccggaggaaattgcaaatacagcacttttcttagcaagtgatgaatcaagttttataaacggtaccaccgttaccgtagatggtggttggactgcttattaacttgttgttaaaattttctgcattttttggtttaggaaacagcttgttttattcatgttttttagcaactgctttcatgatacaacagttatggtaaatttcattttttgaatcacaaaaattggtaggaagaaatggaataatttctttttgctgacaaatactatttccagtaaattggacaatacaagcaattcaccaaatttgtgattcggaggaatgaatataaatgaaagcaacaggaattgtaagaagaattgatgatttgggccgtgttgtaattccaaaagagattcgtcgaactctgcgtatcagagaaggagatcctcttgaaatttttacaaatacagatggcggcgttatttttagaaaatattctccggtgggagaactatcttcttttgcagaacaatatgccgaggtacttagcaaaacagccaatgtgcctgttttaatttgtgacagcgatcatgttgtagctgcagcaggtgtttctaaaaaagaatttttggaacgccgtgttacacaggcaatggaagactatatgcagtccagacaaaagtttgtgggcagtgaagcggatcatgccttacgtccgattgaaggaattgaacgaaatgccagtgtggtttatcctatcattgcatccagtgatgtgaccggtgctattattattctctttgatgaaaaaaatactcctccaactcaggtagaagtaaagctggcgcaagctgctgcagcttttttaggaaagcaaatggaagattaatattgtatttataaagaagcaggtgatagacctgctcttttttatacagtaaatacctgacgatgattcgtatatatagtagatacatgaatcgtaaaggacagtatatagaaaaaatgggttaacccttgcatttatgcgtattttatgataaaataaagcatatgaatagtaagaaggacaaaagagtgggttagcccgctcttttattattatgaggtgaaacaatttggcacaaaagagaaaatcgggaaatacggttgcagcggtagcaaaattatgtgaaccgtttgcacagcagcttggtttaaccatatgggacattcgttatgtaaaagaaggttcttactggtatttgcgtatttttattgataagccggaaggggtaacattggacgattgcgaagccatgagccgtgcaattaacgacccgttggatcaattggaccctattgacggggagtattgcctggaagtatgttctcccggtattgaccgtgaattggtaagaccggaacattttgaggcttttctgggtgccgttgtaaatgcaaaattcattcgtcctttggaagacggcagaagagaagtgctgggcattctgcaagcgtatgaaaattctgttcttactttggaaacggaagacggcgaatttttagacattgataaaaaagatacttcgtctgtcagagtttgtgacgattatgtagatattgatgatgaagattttgaggaggaattttagaaaaatgagtagtgaattgtttgaagcattgaatcttctggaaaaagaacgtggtattcaagtggattttatggtagataaaattacgaaagccattcttactgcatgtaaaaacagctatgataatgaagacgcccgtgtagaggtaaatcccgataaaggcgcgtttgatgtatatttgcgtaaagaagttgtagatgaagtatttgaaccaaacaaggaaatttctttggaagatgcacaaaagatagatccaaatgcaacttatgaggataaagtggaagttcagctcaataccaaagaattcggacgcattgctgctcaaaccgcccgaaatatgattcgtcaagggattcgtgacggtgagcgcggacaaatgatgcaggagttccaaagcaaacatcaggaattggtcagcgctttggtagaaagaattgacccacgctcaggcgctgcttcgttacgcattggaaaagcggaagctgttttgccaaaaagcgaacaagttggaaatgaggtattaaaagagggagaccacatcaaagtttatgtggtagatgtgaaggaaaccgaaagaggaccgcgcgcaatgatttcccgtacacacccggatttggtaaaacgtttgtttgaaacagaagttccggaaatttacgacggtactgttgaaattaaagctgtttcccgtgaagcaggttccagaacaaagctggccgtactaagccataatgcagatgttgatgcggtaggtgcttgcatcggttctcgcggtgctcgtgtttccaatattgtaaatgaactaaacggtgaaaagattgatattatagaatacagtgaagatcctgcaaaatttatcgcagcctctctttctccggcagacgtgctgtctgttgtggtaacagatgaagatgcccgtgcatgccgtgttacagtacctgacagtcagttatctttggcaattggaaataaaggtcaaaatgcacgtttggctgctaaattaacaggttggaagattgacattaaaccggaaagcggcttttatggagaagagccggaagaggtttatactgttcaggaagaagctgttgagacaacagaagaagcataattggtcatataacagccaatctttttataaaagtgcgaaaggcggtgaagtttatcatgcataaaaaacgtattcccatgcgtatgtgtaccggatgtggagaaatgaaaccaaaaccggaattggtgcgtgttgtaaaagctcctgaccaaaaagatgagcagggcaatatattggcggcaggagaaatctccctggatgcaaccggcaaaaagccggggcgcggtgcttatgtatgtaaaaaagcagactgcctgaaagcggcgcgaaaatcaaggagatttgaaagagccttctcttgtcaaattcccgcagaggtatatgacaaaatggaggaggagatttcaaaatatgagtcagaataaattactttctttgctgggcattgcaagaagagcaggtcgtctttccctgggaaatgaccctgctttggaagcaatgcgaaacggacagacatgtgtaattttggtagcaaatgatttatcaaaacgaacattgaagggtgtttgctttgcagcagaagaagcgcatatagatgtacttaccatgaatgagacgatggatgaaatcggtgctgcattggggaaacgtaccggcgtaattgcggtaaacgatgccggctttgcaaataaaatgcgtactatgtgcagtgaaacggacaatcaacagaaaaatgaggaggagtaggattatatgatgaagaaatacagagtgaacgaggttgcaaaagacctcaatgttgaaaataaagatgtcatcgaagcattaaaaccttttagcgatgaaccaaaaaaatatatgactgcgttgacagaagaagatcttgatgttgtatttgatacttttacaaaagaaaacagtgtagaatcttttgacgcatattttgctgaaagggaggatgctcagccaacttcctcttctaaagaagcaccggaatcaaaagaaaacacaactgctaaagtgcaagaaaaagctgttgttgaaaaagagaaaactgcagtgaaacctgctgtaaaagaatcaaaaagcaatgcagcaaataaaaataacaaacaaacaaaacctgctgcacaaaaacaggaaaaaacaatgcaagataaaaaggacaccgctgcaaacacagttgttacaacttcagatgcagtacaaaaacctgccggaagaattgtggatacacgtacttcccaagtgaatatggaccgttacaacgaaaagtatgaccgtttggcaagtgaaaaagtaaaaacagaccaaaccgtaaataaacaaaaactaacacagagaagcagccaatacagaggaaagccaaagaattcgcgtaaagaaacagaagcggaacgtttaaaacgtatccagctggagagacaaaagaaacaaatgaccattaccattcctgatgaaatagtggtaaatgaattggcgttgcgtctaaaagcaaccgctgcagaagtcattaaaaaattgatgatgatgggcgttatggctaccgtaaatgatgtcatcgactttgatacagcttctttgattgcaatggaattccatgcgaaagtagaaaaagaagtggtggttaccattgaagagcaaatcattgatgacagtgaagacgaagacgataacctagttccaagagctccggttgtagttgttatgggtcacgttgaccacggtaaaacttcattgctggacgccattcgtaaagcaaacgttacaaaatccgaagcaggcggcattacacaacatattggtgcctaccgtgttcctgtaggagatggcgaaatcacctttttggatactccgggccacgaagcatttacaaccatgcgcgcacgcggtgcccaagtaacagatattgctatcttggttgttgctgctgatgacggtatcaaaccgcaaacggtagaggcaatcagtcacgcgaaagctgccggcgtttctattattgttgcaattaataaaatggataaaccaacagcaaatcctgaccgcgtaaaagaacaattaacacagcacgagattttaccggaagaatggggcggcgatgtaccatgtatgccaatttcagcattgactggagaaggtattcaggagcttctggaaatggtaatgttggttgctgatatgaaagaattgaaagccaatcctgacagagctgcgaaaggtactgtcattgaagcaagattggataaaggtcgtggaccgattgcaactatcttggtacaaaacggtactttgaatattggtgacagcatcgttgccggtactacagtaggtcgtgtacgtgcaatgaccaatgacagaggagaacttgtaaaatctgcaggaccatctgttccggtagaaatcacaggtttggacgacgtacctacaggcggcgatattttcaacgctgtttctgatgaacgtttgggtcgtcagttggtagaacaacgccgttctcaacaaaaagaagaacgcttcaatgcacaaacaaaagtaactttggataacctgtttgaccaaatgcaggaaggccaaatgaaagaattgcaaatcattgtaaaagccgatgttcaaggctcttttgaagcggtaaaacaatctttggaaaaattgagtaacgatgaagtgcgcgtaagagtcattcatggcggtgttggtgctatcagcgaatctgacgtaatgcttgcaagtgcttctaatgcaattatcatcggctttaatgtccgtccggacccggttgcggaagaaaatgcaaaacgtgacggcattgaccttcacttgtatcgcattatttatgaagcaattgaagatgttcaggctgcgatgaaaggtatgttggctccaaaataccgcgagctgttctacggccgtgcggaatgccgccaggtttataaaatcagcaatgttggtattgttatgggctcttacgtaacagacggaaaaattgtacgtaactctttggtccgtattgtacgcgacggcattattattgcagatgataaaattgcttccctgcgccgctttaaagacgatgtaaaagaagtggcagaaggatatgaatgcggcgtaactctggaacattttaatgatgtaaaagagggcgatgtattcgaatcctatattatggaagaatatagagaggactaagtcctaataataaaaatggcgggcgccttggttcgcctgccattttgttttttaacagcaattgttatatgtactgctgtaaggaggttgaatactatggcaagtcatagattaggacgtatcacagaagatattcatagagaattgaccgcaattttcagagaagtaaaggacccaagagtgcaagaggggttaatcagtattgtacgtgtagacgttaccaatgatttatcctattgtacggtatatatcagtgccatgcaggggttggaacaagcgaaagtggctgaaaaaggtttgaaatctgcagccggatttatccgcagagaattggggcatcgtttaaaattgcgccatgttccccagctgatttttaccgccacggattcgattgaatatggtgcgggtatttccaagctgattaacgatttaaaagaggagaagcatcatgaagattaagctccaacaggctgcggacgtattacagaaagcagatgaagttttggtgctcagccataaatctccggacggagatacgcttggttctgcttccgcgctgtgtaccgctttgcaaagaatgggaaaacatgtccgttttgcatgttcggatccggtggttcccaaatatgaaaatttatttgcggaattaaaaaccgaagaatttggaccaaactttattgttgccgtagatattgccgacacacagcttcttggaaaagagaccgaacagtataaagatagcattgaccttgcaattgaccaccatatgtcacataaggaatatgccaaaatgtcttacgtggatagtactgctgcttccactacacaagtgatttacgaactgttttgtatgatgggagttaccattgataagcagattgccaactgtttgtatacaggtctgtgtacggatacaggatgtttccgttactccaatacatccgcaacaacattgcgtattgcagcaagtttaatggatgcaggagcagatgtagcggaaattaaccgtattatgtttgatacgaaaagcagagccagattaaacgtggaacgtttggcaatggaaagcattacgttttatgaaaacggacgttttgatattatggaaattacagaagaaatgatgaaacagtcaggagccacagaaggtgatattgaaggtttagcagctttgccacgtcaagtggaaggtgtattaattgccgcaactttgcgtgagaaaaaagaaggcggctataaaatttctgttcgggcaacgccaccatatgatgcttctgccatttgtgctcaatttggcggtggaggtcataaaggtgctgccggctgtgtgattgaagatgaaaaggaaactgtaaaaaaacgattggcggaagcagtcagcaactatttccgttctcaggggattttatagtaatatcaatcaaagggggagaactatggatggcatgattttaatcgataaaccacaatcgttcacttcttttgatgtggttgcggttatgcgtggattgtttcatcaaaaaaaagtaggtcatacaggaacgttagaccctatggctaccggggtacttcccattcttttgggaaaggctacgcgctgcgctccgtttttggaggataccaacaaagaatatcaggcacagtttcagttaggtactgcaacagatacacaagatagtacaggaaatgtagttgctgtcagtgaacataaagttacaagacaagaactggagcaagtgcttccgcagtttcgaggagaaattttacagctgccgcctatgtactcagcagtacagaaggacgggcaaagactttacgtgttggcaagacaagggatagaagtagagcgggaaaagcgtcctgttactattttcaaatgtgaattggtatctttcgatgagaacacacaaacaggaactttgtgtgttgcctgctctaaaggaacttatatccgtaccctgtgccatgatattggtacagcgctgggtacatatggaatgatgactgcgttaagacgtactatagcatgcggttttaccttggaacaaaccattcctttacagaaagcaaaacagattatcgaacaagggggaacgttgcaggatagagtacttcccattgactctatttttcaagataagcctgttttgaccgtttcgcaagcccaaaccacacgtttctccaatgggggaggattgagtttagaacgtctgcgattatcagaggttcagaaaaaagaagacggtaaggtatatcgcgtatatggttacgatggcatctttttaggtttgggagtagtgtcagtggcaaagggagagcttcgcatattaaggcttttttgtggagaggacaaagtatgaaactgattacagatttaaaacagaattgcttagagcctgcatctgttgcgctgggatgctttgacggcatccatttagggcatcaggcagtgattggctgtgctgttgctgacaagcccaatgggcttacgccttctgtgtttacttttcaggaaaatcccctgcaggtgttaacgggaaatacagtgcctactttattggctcctgatacaaggaaccaaatatttgaagaaattggtgtggaacaagtgtttatgccttctttccgagaagttatgaatttggaagcggaagcatttgtctatactgtactaaagcaatattgcaaagctgaaaaagtatattgtgggtttaattttcattttggaaaaggtggaaaggcaggctcggaagaactcaaacagtttggagaaaagtacggaatagaagtaactgtagtacaagctgtgtctttgcaggaaggtgttccaatcagttcaacccagatacgccattacttacagaacggtcagacagagatggctgccaaaatgctgggacgtcatttttgttatcaatttccggtgattgaaggaaataaaatgggaagaacaatgggtttcccgaccataaatcaggcgatgccacctaattttgtaaaaccaaaacgcggcgtttatgcttctctggttacattggagaatggaactgtttattatggtgtaaccaatataggtgtaaaaccaacggtaggtgatgattatgtggtagcttctgaaacatggattccaaattttagtgggaatttatatggaaccagtcctaaaatagagcttatccattatattagggaagaacaaaaattttccaatcttcaggttttaggagaacaaattcatagagataaagaacaagcatttcaattacttgaaaaagagtttccccatgccaaataaaaaaagtcagctattttatggctgactttttttatttagagtaaatctccgtattttttaacaaatatttttttaaccacagtaatcaataccatatatgcaaatataatacctgccagccatgcaaaataaattgcaggtaaagctaccatacccaaaccggcgccaagaggtgtatatggaatgacagttccgacgataatagcaatggtagtaatgactaatacaggcagagatgctctgctttggataaatggaaccttaggggtccgaatcatatgaatgaccaaagtttgtgaccatagagattccacaaaccaacctgcgtggaacagtgccatgaataaaactgagtttacccccggtgcaccaaaagaaccaccgcaaactgcgggacaaatgacaaaatataaaataacatatgtgataatatcaaagatggaactaaccggccccatccaaatcataaattttccgatagatgaggaatcccatttacgaggacatttcaaaaattcagggtccatgttatcccaaggaattgaaatgcaagaaatgtcataaatcaaatttaaaactaaaatttgaatcggaagcatcgggagaaatggaagaaatatgctggcggccaatacagagagcatatttccaaaattggaacttgcggtcattttgatatattttataatgttaccaaaaatctttctgccttcaatgactccttgttctaataccataaggtccttttccaataagataatatcggcagattcttttgcgatatcgactgcggtgtctacagaaataccgacatccgcttctttcatggcagatgcatcgttaataccatcccccataaatcccacagtatgaccgttttcacgcaatgcatgaacaattcgtgttttttgttcgggagaaagttttgcaaatacatttgtagtttccaccacttgtgccagttgtgagtctgttagtaattcaatatccgagccaagcagtaaattatctacttttaatcctacctgacggcaaatacagcgtgtaacagcatcattatccccggttaatatttttgtagaaacaccataagttttcaaagcctcaatggctgcttttgtagtttctttcggtgggtctaaaaatgccagataacccattaataccatatcgctttcatcttgtactgaacatgtacctgcagcggaagggttatttttttgtgcaatggccagtacgcgcattccattttcattgagaccctttacagtttctaatatttcttgctttacttcttccgtcaggggttccaccacgtttttgtattcggcaaaggcacatacttgcagcatttcctctactgcgcctttcgtaaccatttgtgtttttccttctgtatcacgaacaaccacactcatacgacgtctggaaaaatcgaaaggaatttcgtctactttttggtagcgagcttttaatgattcaccctcgtggtatttttgtgcatattctaaaatagctacatccattaaattgcgcagtcctgtttgaaaatagctgtttaaaaaggcatggcgaaatactctgtcatcctcatttccatgaatatccaaatgatattccagtacgaccttatcttgagtcagtgtgccggttttatctgtacaaagtacgttcatagagccaaagttttgtacagagtttaaatttttaataatggtttttttctttgacatctgggcagcaccctttgccaaattggttgtaacaatcattggcagcatttcaggagttaaaccaaccgcaacagaaagtgcgaatagcgtggcctccagccagtctcctttggtaaagccattaataaataatacaattggtaccataaccaacataaagcggatgagtagtttcgatacagattgtacgcctttttcaaaacctgtttttattttagggcgcatgattgattttgccatggtaccaaacatcgtgtcatttccaatagccactgcaacacaggttgcagaaccgctgataacgttggtacccataaatgctaaattgggacactccaaaggtgtttgataaaaatggtctgcatctaagttggggaatttttccacaggctcactttctcctgttaaagcagattggctgataaataaatctttggaagaaagaatccgcacatcggcaggaatcatatcgcccgctgccaaatggataatatcgccttggacaatatcgctgacaggcagctcttgttttcccgtttcttcacgctctaccagaaccgtggtttttactagagctttcaatttttccgcagcattgccagaccgtatttcttgaatgaattttaagcttccgcttaaaaagaccataatcaatacaataattacagctgtaaaatctctgtcctccgcaccgacaaatagcacatcagtacaaaaagaaattagagccagtgaaagcaataccaaagtgaaaggatctataaaagaccgtagtaattttttaaatatggtatctttcttttcctgagaaataatattacgtccgtactcttgacgcatggtttgtacgtattcttcattcaaaccactgtaggaggaacccagttgcaataataatttttcagaagtctgctgtgcagtatttagcagatatttgttttgcatgtctgttttttgagacatagcagattttttaaatggatatgttcttttcataacctttacctcctttgcggcgtgtttgccgtagtttgaggaagtaaggcattaccaaaacagcaaacgtaagaacaaatcgtttgctttacttatttatggtataagcaagccatgtaacgcagtgtttgcatgcgttaccgctctatgtcgcccttttggttttatgccgttgctacttcctgcgtccatgttactcactccttttacgtttgaaatatctatataaaatccaatttggaattggatggcaacaaaaaagccttgcggccaataacggcagcaaggcttactttacaatacaaatataaatgcacgacaaaatgccgtacagttgtattcgttcaagcttcaacttcgcagggcatgcaattgcgttaggttatgccttgtttttcgacatagcctgttaacctgctcatagtgtctccactaatccgcggcagcaacccgtatcctctgcggtagcctcacctaccgatatattatcctcgtacatcatacgcttattcaatttatttgtcaacactttttattcaaattttaaaattagtctagtttgtccctcatttaaagaaactaatttactggcaatacgcggatgttttaagcgtgttcttaccatgtttttaagtacttgtcctttatgataaccatgtatcacgatgacttcctgtacctttggactgactgtggataagtaccgttcaatttcgcgcttggcatcatctgcatacataccatgaatgtccagctcaatgacagtacctttttttgttatggtcatgacggtacttcctttctatcgtttatttatattatacaacagtaaaatataaattgtaatgaaactcgacaaattttgtgttataatgactttacaacacaaaataaaaattcttgcgcggaggattgtaagttatgacagtgattgatatgagaaactttttccatgattgcgatgtagaactcattgagattaacgatgaagtcatttactatgcagaagaaaaggtagaagaaggacataacagcttatttctgctggaatataaccgcgcagagcagcaagagcgcattgtggcaaactatattttaaacgatgaagcatacaaccaacattattttgcgtttgaaaatgacattatcgtgttgatggaaaacggcaagagtttggcttggattttacgtattgataaaaaaacgggtaaagaaaaaaactttgagcaaatcaattttattggtaactttttacaatgtaaagcactaagtcaagaccatattctggtattaacagaagagaatatggaacatagaaaattatttacggaatatcgcagcttaaccggattaaaacatattgcttatctatacgatatggaggaaaaagaataccattatattaaagatgagcgtatttgtgaatctgactgcaattgttttattccttataaaataaagggagaaactcaattattaatattacaaccatacggtacggaacgcgaaaaagagcattgctttaaaaataagtgttggttgggtgaagatgtttgcgataaagtatggacgtgtgatttggaaagcttaatttatgctgcccgctgtgaaaaagaaattttaatggaggttctgtttacagcagattctaacggaatgattcgttatattggcatggatggcgaaaacatgtactttaaagcaaagcattttccttggaatgatttacgcttgtgtgccgtagaaaaagaaaccggaaaacgttttgtggtatctccgctcacattaaaagaaggcgaaagagaagccgagttctggattgatacggtaaatatgagaggttttcatattacaaaaaaggaagaggaattagaaattaaaggatttttaaattcttatttaaaggcagtttacccaaaagatagcggccgctttattacctgtgtagatgaccgttttattttagaaaaatatgaagcacagagtgatcagggagaattttgctttactaatatttatgacactcgaacaaatcaaaagcaaagctatgaaagccgatgcaaagtaaaaggaaatattgtagtactgtattaatgcaattttaagttatagtaaaaaaggaaatgatataaaggaattataccatgaaggagattttatggatcaaatagaaataaacggattgcgagtaatggcgcgccatggttataccaaagaagaaaagatgatggagcaggaattcgagattgataccatattgtattgtagcttagaaaaagccattgaaacagataaggtagaacatacggttgaatgtggtgaactaattaaattgattacacagacattaaaagaggagccttatcaattgatagaaaaagccgcacaaaggttaatagaagtaatttttgattattcccctattatttgtggtgtggaattagcattaaaaaagacacaaagcggtatcctggcagattttgattctataggagtacgattagtcagggcacgctcggatttttccgactaaatagaatatatttcaatattgccatataaaaacaaaaaaagatattgacaagaggaggaaagatgtgataagatagacaagccgtcgag

SEQ ID NO: 3648 - DNA, 32759 bp, Unknown
  16S sequences of unknown bacteria
ttattttactgtcaccttacacttcacggtcacctttccggatttcaccgtgatcgttgcagttcccttctttacgcccttgatcttgccgttcttgcttacagttgcgatctttttgttcgaagagctgtaggtcagcttctcctcgcttcccttcggggaacgttttgcctttaaggtataggttttccccttcttcaggctgatcgtctccggtacgccagtgatcttttccgtttttgtcttcggtaccgttacggtcacgacaaatttcttcttacccgacttcaccgtaatcttcgcggttccggacttcttcgctgtgatcacgcccttcttgctgacggtcgccaccttcttgtttgaagaggtgtacgtaaacttctgctgggaagtaatcggggtcagcgccggctttaatgtcagcttcttgcctttttctaacgtcaccttcttcttcagtccggtgatctttgtcgtcgttaccgtgcctttctgcaccgtaaccgggattttcttttcaagtccgctcgcaagcgtgatcgtaagcgttgccttgcccggcttcttgcctgccgtcagcgcaccgttcttcgatacggtaaataccttcgtattgcttgatgtatacgatacaacggaatctccggctgcgagtccgcttaccttgaaggccgtcgtcttctgctttaccttcaacagaagcttctgcgcatttacctgaattgtcggtgtcaggaggccttctcctgtgcgggtctccttcgtaccgcatactgcacagctgcgctcctgctgctccggtgcgaataccgttgccggtgaactggttgtccatgcaccaaagctgtgtccaatcgccggaatcacctcggtctttgtctccttgcagccactgcaggtatatgtctttacaccgtttgttgtgcaggttgccggtgtcgtaattacgccggaccatgtatgggtatgctccggagttggagtcggaaccggctctgcgccctgttcgatctgcagctcctccatcggtgcgataaagtacgcatacggcgtcttatcaacgtacagctgatacgtgcctgctgacggcgcccgcagcacagcggtacccgtctcatccgtcactgcctctgtccgctctccggttgtcgtatttttgagcacaaccgtacttccattttctgcctgatccacagtgttccagctttcatcatagccatagctgcgtacctttactgtgaaatcagcaccggactgtgctttggacggaagctcggaaaaatagaaataacgatctgtgtaggatggatcattgtaaaggaagatactgaaggtatcgccatctgcaagcacggtctcatttgccccggttgccacccacttattattgaccgcatatccgagattcgaggtcttctttccgtacaaggtactgatcatgcccttgctgttaatcaccagataatgtgacggatcctttgcaaatgcgtcaccgtaccgttttgcatgcgccgcatacagcgcatctgctgccgttacctcgttcttcagtgcttccggctttttatagccataggctgttgcatcatccgcttttacggtaatccggtatgccgtggacggtgtgccattttcctcgttcatgcgaaccgtcacgtttgccgtctttgcattctgtgccgcctttgcatgctccagtgcatccttcagctcccggatcgcagtgcgtacctcctgctcggtcgcatccggatttttcagcacatcttgagcctttgcgattgcttcctgcagtgccgccctggttccttccggataagcacccggtgcgctgccctctgtcatgccgtctgccagcttctgcgcctcatcagtcacttcctgcagagcttcctgcggcacctgtgttccgagcaccgtaacggtaaccgaaatttcctgatgatacagcttctgaagcttttcattctccggatatttctctgcaaatcttccataatgctcactgcttaaccaggacgtgatcgtcacctgcgtatcggtcttctggcgtgtcacaagcagattctcatgcgcgatcacattcggattggatgacttgaacttattatagccaaggccttccataatccacggatccttctgacagtcatccgcaatgataccgttccccttcttctggtttactgcataaatccataccggctttttgttctcatccagcaccatttctgaaaatgcatgcagattaccggtaacggaatccttatcggcatactgtccatcattgattccgtcaaaatagtgcagcttcgcctgctccatcatcgcaagctctgcatccagatccttctccagctccgcttccgtcagctctgctacggtcaccggaatcctctttaccgctgtcacgccgtcacgggtgaacgtcacgatcagatcaccggtaagctccttgctgaagcggtcgaccgctgcgcggtatccggaaatcgtaatcgccggattatctgtggtgacggtaatttccttgttattaaatacaaattcatccttctcatctttaatcctggtatatctcggaagctgaagatcgcccttgcagttcgcaagatctgccacttccttcgtaacactgtctgtaatgcggtctgccgtataatatgtatccagaagcgccagcagctccttctctgtcaaaactgtctttggctctcccttcaccagtacttcaaaggtcttcgtgacggtttcaaaatcttcgaccttttccagccggttgttcaatatgatcccgtttgctttaaaggtcgctgtcagcgttaccttcgtatcctttgccggtcgtgtcaccacaccggtcatcggataaatcatcgaatcaatggacggcttctcaaaccggatgatcgattcatctgagctggtccactcaatctccgaccatacctgctgcgcgctgcttcccatacaccgcaccagattcaggctttccgtaacctcatctgcagagacattgctgcctttgatcttatcccagtcaagcgcttttgcctcttcctgcatctttgtctcgaaatgcttctgatcccagccgaccatgacggaccggcttttcgtcactgcctttgcgccgtttaattcgaactgcagctccaccgacacattcaccgaatttattccgtactggggaattgtatcagaagcaacgtaatgaatcacaccgtcggtaccgatggtctccggcttatcggttgccttcaccgtgacctttacctgatcgatcttatcaagcttcgtatatcctccggagggatcctcgaattttttcttcattagatccgcaattgtggcattgccatactgcgcaaacagtgcaccaagctcgccgtcaaacagcttgactgcctcgtccacggttgcctgatccttcggatcaatggctcctgcagccttgctcatcgctaccggaaccgcaatcgtctcctcgcttccggacggcgtataattcgcaacgacatcctcatacccttcggcctttattgtataccgataggtttcaaacttcgacagctcgtaagcgccgtctgcatttgccttcacctctacccattctgtatctccggtccagtcatcctcttcttctcgttcgaccttgcaggtcgcgtttgcgaccgcctgctcgccgtccatcgcctgaaagcgaacgaaatacgtacggatatccttctccagttcaaccgtaatcacttcatccttacttggggtaaggctgccgtttacggtcttatagttcgtaccctccacggtataattataggctgtaccgtcgtttagccgatagcttccatcttcttccggtttaacagtggtataatacccctgctttacctggattgtcggatttgcgatcggtgcctttgttgccttatcctttacttcaaaccggatggtgcgcaggacgatcggcgtaagcgtgatcttcttttcggtcctggtctgtttcggatttccggtaaaagtgaacgcagattcggtataatcgttgtatccgtccttttttaccttcagcgtgtagctctcgccgctttccatcttatacgagccgtcggactctgcctttaccgcgctccggcccttttctagcgtcacagtagcatctgtaattggcgtaccatcttcgctctgtaccacgatgctcatataatagtccggctcttctgccacgattcggatcgtaaactcctgctctgccagcgccgtcgctgtaccggcattgatctcttccttattcgtcgctttgtcaaacagcttcagggtcgccgtaaaggagtaatctccctcttctgcggatggtcttgtaatgctgcggcttctgaccgtgggatctttcttcgcaacatacggattctccgaaatataccaggcggtctgatatacatcatttctaaaccggaacgcgatcgtcgtaatcttgcttccgcttcccggaatcttccgtcctacctcgtaagaaagtccatcctcgctttttactatgccggctccgccgtttgtaataatcttattctctccatcaataaaatttttcctcagatactcctgcgcagcctgctccggagtctgcgtttcgtccgctgccagattccaggtgctatctgctatctcagtctcctccgactccgggtaatctgtctcggaagcgacctcttcaattccttcaacagacagcgtttcggtggcggctgcttccaccggcgccgtttcttctgcgcccgcttcttcctctaaaatcagctctgcctcatctacgatttcctgcggcatctccgctgccagtgccatagccggtgtctgtgccagcatcagacccgccatgagcatgctcatgatccggttccagttttgtttccttctcatatacttcctcctttaaaatagtcctgtccgccgccccactgccataatgtgtcatgtcgcctcctttgctccgactgatccgaaaaaaaataaaaaaaggcaacagaagaaatcccttaagcgggatcttctgttacctaatagacgttcctggtgcaatacctgttctatcttgtatggaaagccgctacgcgccgactattacggcagtgcacgaacctgttccggactttcacctgattgcagaatggctttccatggcggagatatctccgtacttctttattttatgcagtcggcaacgggctgctgccggacattctgtataaagtattatagggtattttgccggtttcgtcaaacatctttcttctttttttgtgccactttttacgcacttattttactgtcaccttacacttcacggtcacctttccggatttcaccgtgatcgttgcagttcccttctttacgcccttgatcttgccgttcttgcttacagttgcgatctttttgttcgaagagctgtaggtcagcttctcctcgcttcccttcggggaacgttttgcctttaaggtataggttttccccttcttcaggctgatcgtctccggtacgccagtgatcttttccgtttttgtcttcggtaccgttacggtcacgacaaatttcttcttacccgacttcaccgtaatcttcgcggttccggacttcttcgctgtgatcacgcccttcttgctgacggtcgccaccttcttgtttgaagaggtgtacgtaaacttctgctgggaagtaatcggggtcagcgccggctttaatgtcagcttcttgcctttttctaacgtcaccttcttcttcagtccggtgatctttgtcgtcgttaccgtgcctttctgcaccgtaaccgggattttcttttcaagtccgctcgcaagcgtgatcgtaagcgttgccttgcccggcttcttgcctgccgtcagcgcaccgttcttcgatacggtaaataccttcgtattgcttgatgtatacgatacaacggaatctccggctgcgagtccgcttaccttgaaggccgtcgtcttctgctttaccttcaacagaagcttctgcgcatttacctgaattgtcggtgtcaggaggccttctcctgtgcgggtctccttcgtaccgcatactgcacagctgcgctcctgctgctccggtgcgaataccgttgccggtgaactggttgtccatgcaccaaagctgtgtccaatcgccggaatcacctcggtctttgtctccttgcagccactgcaggtatatgtctttacaccgtttgttgtgcaggttgccggtgtcgtaattacgccggaccatgtatgggtatgctccggagtcggattgtcaccattctctttttcccagttatctgtatagtggagcacgaccacatcgccgtcctgcaactcatagtcgcaggctcccactcccgggtctgttccatttacacgatacagccagccggagttctttccgtttgtaaattctccgagtgtgatgccgtctctggtcgtaactgaagccagataagtgccaccgtatttctttttaccggtcataccgtttgctgccagaagcgcgtcgatcgcatccatggcagttgcgcctgtcttcatgcgatattctgccgctgcggcccacatcgtcaggttgttcttgtccagcttgtggatcattccatccttgtcactgtcatgtacggaatctccgaacatggaaaccgtgatggtctgcttctgtccgtttatattccagtaggagcctgcatttttcgtacgatatgcgtccagtgcctgcaatgtctgtaccgtagacatctcctgcgattttccacccagcagatgagaaaatccaccgtcttcctgctggtagctcttcagatttgtaatcagattgaaattcggtgtaccaaagccattctcagccgcagatgggtcgatgccaaggcaggtcagtgccaataatacctgtgccgtcgactccgcggtgccatatccgaaatcatccttctgttcgttcttcagataagcaagtgcgcggttgatcgccgcctttacctgcggacgattctgataatttgcaagtgcctgcaatgccattgctgtcatatcgacgcttgcacctttattgcttgtcagaccaaagcctccgtttgcattctgatagcgcagaacctctgcaatgattgcctcacggttccactttgcatcggccgggattgcgatatcagccgcatccagcgcaagcagcgcataaattgcctcattggatccatctttcagccgatcggaattgtagatcattgccgcaaggttgacccctcctacattcgtaatgtcttttcccatccgcgtcagtgcaagcgcagtacgctcaagatcggtcggcttttcgttgtcccagctctttacggctgcctccaccgatgcataatacgcatccagtttttctgcgccaggatctgcatttctctgcagcagtgcataaatcagccattcatctccgtattcgtatccctctgtacgctttccgataatatagtctgtggcagcggatgcactgtcctgtgcgatctgctccagcttcggcatctctgtggagccctttgtaacagtgatcgtaatcgtaaccggcttcacatcgttctttgcatcaatcggagttccggtagcgactactgtaccttctgaaagacccatgacctgatacttcgccgtcggaagataagctccatagtccggatccttctcattgtagccactctctgatccgacattctttttccagtgaccgcttccggtgcgaagcacctgtgcaatgccgcgctcactgtaagtccatttcagtgccggttccgtcacatcataaccctcttcatccagctcacccgtgacattgacagtaaattcatttcctgttgttcctgcctctaccgtaacctctttatccgcatcgttcagggaaatctcttttacattgtttttgtattcaaatgtcactgtactgcttccggaaacagtcgttgtctttccggtcgccggatctgtatcttcgattgtcgcggtaaatgtgaccgttccggcctgcttcggtacatatcccttttcaccacttgtatagtaagcaatcgttccgtccggatcgtcgcttgtgatctccaccttatctgcattcgtcgcatttgccggagtcacaatagccgagccaagaatcggattaaatgcgactctgccgtcggtctcctgaccgtcgctgtttgcgtttctgctgtgaattgtctttgtaccggaaatggccggtacgacagactctaccggtacatacgcggatgtcacctccaccgtcttatacaccacatccggctgatttctgtatgcgaccgtgaagactgcggttcctgcttctttaaagaaaaatccgctggaagacgtcactcgattgcctaagagtttctgtccattctcatccgccgtataagtaaatgcagaatttgatacgtcctgatactcgtcgcttccgctgtacttcgccttgacccgaatctccttatactccgagccctgtaccgtgtagctgccatccgtcacatcggcatcatcaatgtaaagtctgatatccgtcatctgccgccgtgtggaatgaattgctacagatgccagcacctcacttgttccatctgcattatgctgcgttgccatcagcactgcggttcctgtgccataaacactgaataccccttcatcataaatgccaaaagcactctccggttttttcttggaaaagctccagctcaggctgctaccctccggaacctcatagccctgcagagaaaatgtacccgcaatctttccgcttgcatttaccgcatccggcgacaattccagatgaccatccacgactgcgaatgcctgctgcgcattatatgcctgaaaggctaccgggaatttgctttcgccaatttccggccactcataactgcccggcgtataagactggttcacaccgaaatatggataaccgtcactgccctgtccccaggaaatgccatttgcacccttcgtcgcattcagcgtattgacgagttccatcgtcttcatatcttcttcggattttgcgcctgaaccactgcccagcgtatcaatccagtagcagttctggatcagcgctgctccgttgttattgctgctgctgttgcagagtgctccctttccggtatctccgattgcgatacagttggcaattacgcctgtccggtcatccgcagcggttgcacccatggacacaccggttttaccgacaaaaccggccacattgctgccgctgatatcgctacggcaattcaggatcgatgcgccatatgcagacgttccgaacggtcctgtcacactgctggcacttccggtcatcgtgccttttacattgatgttctgtactacagctcctgctgaaagactgccaaaaattgccccggcattgtcaaaggtaatcgtatgtccctgaccgtccagcacaccagcaaatggagaaaagttcatataagaactctcttcctgataatgactgtcaatggtgatgtcctgtgtcaacacaaaatattttcccttggcataatccattttggaaaaatctgcctgcgaggatatctgaatcgcattctctggaatcgctaccggtgctaccgtcggctgacgcttcagccctgtgatcgcatcggtgatcgctttcgccgctgcattgatcgcatcctgcgcgacttcctctgcctcttttttctcaagaagctccttaccggctgctacggcatcactcagcgtcttccacgtatcctctgtgtactcctgctgcatctcctcaagcgcagctgctttctccaatgccgactccagcccttcccaggtgatctgtacggttcccccggcgcttccttttaccagtaccggaaagcctccgtctgcagccactgcaaagacgtaaccggttgattgtatcgatgtgtttaaaagcacaactgttgcttctgtctttaactcatctgcggattttgctgcacagtttgaaacgtctacgttgccagaattcagcgcaatggtttctatcatcgtacccgattggaaatagcagttcgatacctgcggttttgcagtcgtacttactgcatttgctgcaattcccccattcatcatttccagttcgcccgcataatagcagttgcgcaccagtccgccgccaagcgttccgaccagtccgcctactgtattccagttatccacaatatgagcggtcgaataagaattctgaatagttccggtcagcgtctctgcgatgcttcccttatatccactagttactgtcaccgttcctgccacacccatattctggatcgttccggacacctctttcgcaagagcatctcccaccagcgtaatcgtatgcccctgtccgtccagcgtaccggcaagtgtttcgatctgctgatttgccgccagcgtaatatccgcagccagtacataggtctcacctgactcaatgttcgtcgggagctcctctgccttcgtgatcgtatgggaagcggctgccatcggcgcctcctcgaccagctccgggtcctcgacctcttccatctgcaggatcagaccgtctgcttcctccaatccgctctctgtctcttccgtatctgcgatgccgttctccggtacgtcctcatccatgattgcatcgtctgccccacttgatgtgtcgtcctctgctgcatcgatgagcattccgctctcttctgccacatccggagacaccagctcttctgccgctgccggcagtacgctgctgcacacaacagatgccgcaagtaacactgcaagcacccgcctgccaagatactttctgtttctgatcattctcttctttccttcctttcttttatcaatctccgtaaatcccccgcatactttccacagcctgtacccttgccgcaaagacgttctctttcctgcatctttgccgcaaaggcgttctctttcctgtatttcccacaaaaggacaaaaaaaagcaacagaaaaacctcctctcatctcctgaggatttctgtcacctgatagctgttcttcatgcggaacacgttattcttctatccttattctcccggcaggtccgtccgccgactatacggcagcgcatcttcctgtacgggaatctcacccgtttacaaagcatgccagtctgtgcaattatacaggtgtcctttgctttgccgcaacaaaacagtggacatcgttggcattatatgccatccgattttatttgtcaaccgtccagggaaaatatttaggcttgcattttcctagaaaagtgtgtatgataaaatcaattaaataagctagaacaattaccggctttaagttccgctgactacggtattcattaccgggtcttcggccaagagggaatcaggtgaaaatcctgaacagtcgtgctgctgtatacgtgtagttgccgttcacatccattgcagagaatcattctgtgagaaggagagccgcaacgctactgcgtgagtcagaatacctgcttaaggctactgccattacctacacgcaatgggaaaatggagaggtggtcttatttgtattccactctctcttattttttcttctgcgacaggtagtttcaggcatggtttttttggactgctttttcttttactggaacacttcatctgcggaagactttattttcatctgcaaaggagtgttttttatgtattaccattcttactcatcaaaggagcacattgtcacacgcaacaatgcgcatctctatctcgcatcggaaacgcggattccggcgcatgtccgaaaaatcgcaaccgaagcctttgagcgccgctccatcattgaaaaggtacagcttccgaaccggctttgcagcatcggatcgcgcgccttccacggctgcgtctctttacaggatatctttatccctgcacaggtatccgagcttggctgcgatgccttttctggctgcgatgccctcaccaaagcacagattgcaagctcggctttgtccatcccgcagggaatgtttcaggaggatcgtcagctccgatcagtccgttttcatccgcaaagtcaggtacagaaaatccagaagcgcgcattttctgaatgcaaatcgcttaccacgctgatcctccccccgggattgaccgaaattaacgaccacgcattttaccggtgcaaatccctggataccatccagttcccggagcatctcagacggatcggcggacaggcattttacttctgcggctttccgtcgatcgaactcccagattctctggagatactcgaggaaagtgccttcttcaaatgcactcagctcacctatgtccgcatcccgaaaaatgtgcgcttcatcggaaaatgggcttttcacggctgcaaccgcctgcagtatctggaaatccgccacgatcctgatttcatcggcgagtggatcatcaaccgttctgccacgattcgatgctaccaagggtcaaaggtcgatcagtattgtcaggcctccggatttaagaccgagtatttataaaacaatataattaccatcgtcgtacctgttgcctattataagtgaaaggatttcattatgaaaatcaccatgaatttttctcttgaagcagatgatctcggacgttacacgaattctacagacctgcgccgtttttaccagtcctttgggctttccggactggagctgatgccgcttggcgaggatccggcgcatctggttgaaaaggatatgattgtcggcgtccatctgcgctgcatcacagactggatggatctggataaggacatgctgatcgaacattaccgaaaagatctggaatatgcccgcctcataaacgcggaatacgttgtcttccacgtgacacaggtcggctttgcagagtctcttgtttatgaaatgaagcatacggacgcagaggtcgtggatgccgcagctgcctttatcaatgaactgctcgacgggcaggactatccgttcttgtttctgatggaaaatctctggtggcccggtttgaatatgctcgatgccagaatcaccgaacagctgcttgcgcaggttcattatacaaaaaaagggctcatgctcgataccggtcattttatgaacagtaattacgagcttgagacccctgcagatgccctcgcatatctgcatcagatgcttgatgaacatgaagcgctgcttccgatgatccgcggtatccatttaaatcagtccttaagcggccactatatgaaggattaccggaagcatccgctcatcccgaaaacagatccgaccgagctggccacccagaccttccttcatatttttcaggtagaccagcaccgtccttttgccgctcccggtgtccgtgagctggtcagtcgcattgatccggactatgtgacgctggaatacatcacgcgcaatcgcaaggagcacgcacagtttctgaaggccgggacagatgccctaaagccagtcactacagtccgggagcttgccgcgagaagttcgatctgaatgcgtttcttctcttatttattccacctttgaaaacagaatccggtcgttgtccagctcttttccgacaccgacgctgaacttctccagcagtccgtccaccgtcaggccatcccgctcctcgcccttgatatccagcacgatccggccagaatccatcattaaggtgcggttgccgagctccagtgcagaatgcatattgtgagtaatcatcaggcaggcaaggttgttttcctgcacgattttctttgtcagctcaagaaccttatccgctgttgccgggtcaagtgcagctgtgtgctcatcgagcagcaggatctttggcgggacaagtgtcgccatcagaagcgtcagtgcctgccgctgtcctccggacaggagtcctaccggctgcttcatgcgatcctccagccccatatgcaaaagggagagccgttcgcggaacatttcccggtcggcattgcttggccttgaaaatatggactttttctgtccggcacgcagataagcaagtgacagattttcctcaatcgtcatatgcggcgcagtccccttcatcggatcctgaaagagccgcccgatctcaactgcgcgcttgtgctccggcacataggtaatgttgcggtcatccagataaatgcttccctcatctgcaaaaaagcttccgccgatacagttaaataacgtagattttccggctccgttgcttccaacgatcgttgcgaactccccgtccgctactgtgagggtgacaccgtccagcgcgaccttttcattcaccgttccttcattaaataccttccggatattcttcagtctcagcatcagactctgcctcccttctctgctgcgatcgctgcacgcttctttttctggaacgcaatctgtctctttatgtaaggagacgcgatggcaatcgctacgataatcgcggagaccagcttcaggcactctgccggaatgtgcagccgcagtgcgatcgcaatcgcaaaccggtacaggcagcttccgaatacggctcctcccatacgatgatataccgtcctttttccgatcagcgtctcgccgatgacaaggctggccagcgcaatcgtcaccataccggtgccgagattgatgtcacatgacttctgatactgtccgatcagacaaccggagagtgccgtcattgcaccggaaatacaaaggccgaccgtaattgtaaagcccggattgatactcgatgcacggatcatgtcctcattatctccggttgcccgaatggaaaggccaagccgtgtgccaaggaaccatttcagcaggatgcaaacgactactacaatcaacgccgacacgatcagcttgtaccaggtcgtgccaagcactcctttggtcaggctgtaaatcgtatcacatttaaacagagacagattcgaagaaaagcccatcgccgccaggttcacagtatacagccctgtattaacaatgattcccgcaaggattgattcgacaccaagcttcgtctgtaaaaacgccataatgtaaccagagcacacgcctgctgccatcgctgcaaacagcgccaagatcggatgtcccatgatcgccacctgagcaccgactgcacaccctaacgtaaagcagccgtccgttgacaggtcggcaatattcaaaatggaatagctcaaaaacagagccagtgccaccagcgcatagatgaagccaagctccagggcgctcacgatgacagaaaacgataataatgaacccatagcaaactccttttaaagacagatagggccgcagaagcaagtgcgcttctgcggctgggattttataagatgggcgttccgcccatccccgcatggcaacccagtcttccgcaagcatgcttgctacagactgctttcccttgcggctgctgctcgaaactgtttacttaaattcttcggccgttaccgtctctacgactccggtgcacagttctgcgaatccgctgtagtcaatgccaagtgcttctgctgtctcagtgttgactgttgcaattccgttgtcaaaggtcttgatcggtgtggtcgccggatctgcaccctgcagtacttcgatgaccatatccgctgtctctacaccaagctttgcgtagtctacgccatagccgcagaatgcaccgttcagcgcgaaggaatccgcgccacagtagtgcggaatgcctgcgtcaatgaatttctcataaatcgcgagctctgccgtcatgacggtattgtcggtcggtgtaaatactgcatccacacctgcagcaatcagtgcgtccgcagcctgtgtaacttccgtattattcgtgccggtcttttctacatattcaatacccttctcatccagatacgcctttgcatcctcgatcggcttcttggaggaatcctcagactgactgtaaagaagtcccaccttcttgatatccggatttgctacaaacatcagatccagaatcgcatttgtatttaatgcatcgctcgtaccggtaatatttgcccccggcgcatccatggattctgcaagtcctgcgcctaccgggtcagatactgcagaaaatacaaccggaatctgattatcctccgtcgccgcctgtacgatctgcgccgccggtgtcgcgatcggaacgatgacatccacaccgtcatcaagcagctgtgtcgtgatctggttcagtgtcgtggaatctgcctgtccattgtaaacatatccatcgaatacataggtatctccaccttcctcagactttgcggtcagctccttttcgatattctgctcgatctgattcagagatgcatcatccacaaactgaatgatacctaccttgtactcagccgccattgcggtgcctgaaatcattgctgctgctgccagtgatacggttacgcttgtcagtacattctttttcatagttttgttctccttttcctgtcttgattgatcccttctgggatctccatctgttcttcaaaggatcttcaccggtaaaggacttctatactatgttcacgcttcatagtataaaaaaaccgccacagataatctcttatctgagacggtaataaaatcttattatcgcggtaccactcatcttgactcgtcgtccactttcgcatgtactatcatacactcctgattgataacgggttcggttcccggtgtatcctactttggaaagctcctttcagaccaccctcaaaagtccattcagcaacctgctccatactgcaatcccaccacctgcagctctctgtgatttcacaactgatgcttactactctttctcatcggtttgttcctttgttgtgttaaagtgtagcaccgggcgtgagatttgtcaagagggatttttcccgtgcaaaacgaactacatgaatatgctgcccgcacgcaacgccacctgtaaaaacagattcgaatcatacatccagcttaagaaagtgctctgctcgacaagtccgataagctgagtcccgattgaggtcgcggagcacagggaaaggatcaggaaaaatacccacaaaagcagcagggcctgcacaagtccgagcagcatcccggcaaaacggttgatgacgcggatcaccggaatatgcgccatgagattcaacagggtaataattccccaaagcagaagctgcacaacgacaattgataccagataagccacgacattcagaatgctcgtcgccacaaagttgatcagataatccggaaagctggaaacgcccagccctttgtagccctcatcattattgtagtccagcagaatatccttcagctgctccggcagcggaaggttctcgatgatctccgtctgctcgatccgggtcaggctcttcgtacctccctgtgagtcctgactgccatctgacgatccggacaggtactgattcaaatactgctgtatgtattgatttttatagacttccagccgttcatcgctgagctggtcgagcatcgtgctgtcaaagccgttctgctccagaagcgctctgatctcatcccgccccatattggcataggcatctgcggcagatccggaattcgttccggctccgcttcccgaaccggtaaggctgttcaacacctgtttttccataattccggtacactgctctacgagaaaggtataaaccggcgtattttccttcagatactgtgtaatatacggaagtagcgcggataccagtacgatcgacagcgcaagtgataccatcgcagcaaatttttttacaaagcccttacgaaagcctgcgatcgcaaacagcaccatcactgccaccaccacggcctctaacagattaatcatgtccctctcctctctgaccggtgcttacccgatccggatcttatcaaagctgtcttttgagataaccagatactttcggtattctccaaagtagaaaaagccttccacttccttttcgtaggcagatgaaaaacgctgatgcccggattttgaaaatacatcaaagctcttgtcattatacatcaggatctggccgttctcgatcttgatctcatcaaacttcgcatcgatcttcgcagacgactttttccggccactgtaattatacagctccatacggtactgctcatcaccatcgtcattcaagaacaaaaatccgatgcgctctgcatcatggaagctgctgatgatctctttttcaaactgtacgcttgtgctctcttccggcgcattgctcccggaaaacacatgatatccgctgtccgagaccgccaccgcatgtgcgtcatccgtaaaataaatctgcggaatcacttcatcggtgtactccgtgcggctgacaatattgtccgtcttgtcctttccggccgcaccaaaatggtaaaatacgacctcgtcggtcataacgccctccgccagcttcagataggacaccgccatcttttgcccgttcggagaaagcgcgacatcgagtggatagccactctcaccgaccgtcgtcttgtccgtcgccacagacgtcccatccgcctggtacagattcacccaggtcaccgtatcgtcctgcagcacaagcgctaccacaccctgcctggaaacgcgtgccttcaggatcggaatctgcgtctcaaaattaccgagcagcccctcccggttgacgatatagacctgtgtcccctgctgctccgcgattaccattgtaccgtcgcagagatccgcaatcggcgcctgcatgctgtaggtcacactccactccgtatctccggtacgggaaatacaggaaactccgtctgaattgtagcgatacagctttttcccgacggacaggtacttcgttccggagactgcctcaacagacttcgaagctgtaatcacataatcccggaatacatgcagctgattgtacagaaaaaagctgcctgctatgatcacaatgagcgatgccaaaaagatacgccagtgtctggtctgacggcggctgcgctccagccgctgcttcggatcaccttccggcagctcccgtcccggcgcaaacgcacgctcctcaatttccagctcttcctcctcgtcctcatccacatctaattttaaaaagctcagcttctcgccgagccatgcgagggtatccttccaattttttttcttcatgtcctacctcgattttctttcgggtttcctttcggaactggatattactatagcagaatccggcaggaaacgcaaccgctacaaaagctcccctgcggcatcctgccacagaggagctccgggaatccgcctgtgtatcgtcgtccgttttacggcaggacgattctctgacccggcataatcagatttgcgtctgaaatatgatttacctggcaaagcagttccagtttatccaaacttccataatattgattacagatatccgcaagggtatctcccatccgaattgtgtaggaagcgtggattccctgtgcggctgccgacgcagccatcgttaaccgggcatcttccccggtggtggccgagtcggaagcgccagtatttgaagcagcagctgtagctggatttgctgtgcctccgtctgcgacggcctgacctggttcagatgctacggcagcccctgcgagtaaatttgtatccgctgcagcaccgtctatctgcgcgttccccgtcccggacgatgcaggctgtgccaaggctcctgtaccctcatccatcccggctgatacaggctgcgccgaggctcctgtaccctcatccatcccggctgatacaggcggtgtgccagcttcgtttccatctacagccgcacttcctccggcatcttccggaactgctgatccatcttctgattccgttccaacagctgcctccttcgccgcaaatccatccgatgcggtccggttaccgccctggacgaccgccgtgctgtccgcatttgtatagatccggtcagcctcattttcttccgtgttcatctggtaactgccagcctgatctttccggatatcatccatgcgtgtcactgcaattgctccgatcacaagcgcagcaacaacaaaaaaagaacttgccagcttcagcatgctgcccgttcttttctcccctttgatccgtactttttcgcgaaagcttttgatcgctttatccggaatgctctctttttcaaccctgtcttccttaaattcgtctgccagatactgctgcatcctgcgattctgctcataaaacacaaaataaccgcgcagctttttatagcagccctccaccgtccagtaaagattttcctcctgttcctgcagatgatagatcagctgcatagacatgggattcagcttctccgccagcttcatgcgttcggtcggatactggccgatcacacagcagccctgaacgtcccagtccggaaaatatttttccttctgctcctccagctcctttttaaccgcttcctcctcaccgtccggaatttccagaatcccgcggaggaacagatatatcccgtcttcctccttccgctgttctccatagaaaattccgagatagccatccttttcctgcggttccttcttatgaatgcaggtcatcacgtaatcctcgatgcagattttttccgctccccgtatttctccgatctgacgtatgtttttcggcagggccgtttccttctcctttcccatactccactcactccttttttaggcttgcctatactctaccatacactctatgcggaatttagcaattcatggacaaaatccagaaaaatttttctgcaggctgccactgcataggcgagaaaaaatctggatagaatagatcagcacgacttgtaccctttgctttttgtgtacgtagttttcctatatgcaatatcagctatacaatggaggaactattatgccccaacattttcatctttccgacactgataccgctcttcccctgcaggaggcctgtctctcccagctgcttgacagcttccgcccccaatcctccggctccatactctgtaagctgacctcccgcgcatttggcgagccgtctgataccactgtacttccgccggtcattctctgcatcggcacggaccgcctgatcggcgacagcctcggcccgctcaccggttccctgctgcagcgcgcccattgcccgctgcctgtttacggcaccttagcgcagcctgtccacgctctgaaccttgcagacttcctcgcagaaatccgtcgcacgcattcaaacagcccggtcatcgccatcgacgcctcacttggccccgacagccgcatcggctgtctcaccctgcgcccgcatggtcttcagcccggcgccggtgtccataaacgccttgccccagccggtgacatctccatcaccggcattaccggccccaacagccatcagccctacctttccctgcagaccgcaaggctggcgacggtaatggagatggcagaggaaatctgtgcgtgtattttgcaggtggggaaaacagataccaccacgtcttaaatacggcaaagcgggccagtcatatactcgatatgcctgacccgttttgtcactactgctttatttttataattttatccgattactttaactgtgcactttgtagaaacagagccagaagttatcgtaatcactgctgttcccttcttaagccctttgatctttccttttttggtcacagtcgcaacctttttattcgaagacttaaaggtaagcttttcatcgcttttagccggagcagtctttgctttcagggtatatgtctttcccttcttcagcgtaatctctgatttcacaccattgattgccgtcgtcttcgtcttcggaacggtaaccgtaacggtgtatttcttctttccggcctttaccgtgatcttagcctttccagccttcttcgcggtaatgacacccttcgatgtgacggtcgctaccttcttattggaggaactgaaggtcagcttatcctgagaagtaatcggagtcagcttcggcatcagcgttgccttctgtcccttcttgagcgtcatcgtcttggtgagaccactgatcttggaagtcgttaccttcttcttctgaaccgtaatttgtaccttcttctgaaggccgctcttcagtgtaatcgtcacggtcgccttgccggccttcttgcctgcggtcagctttccgtttgcgtttactttcacaatgctcgtattgctggacttccaggatgctaccgaatcgcccttggcaagatccgttactttcagcttcgaggtagactgttttaccttcatcggaagcttcgtcgcattgaccttcatcgtcggtgtcagtgctgctccaacgcttctctgctccttctccccgcatgcacaactatattctcttacctccgctgcaaatacggttgcctccgatacgacgcggaactctgtgaaagcatgcttatggtttgccttctcatagtatgcattgatcttttcctgtactttcaacgcctgctcataatccttcagatatttctgatcttcctcggtaacgccttccttcagtgcctgaatctccttcaaagctgcctgcagctcgcttgcattcctatcgtctacattcacgcctgcattcagtccatatttctgaatgattgcattgatcagctctgcctttgccgggctgacataatactgatagctctcaagagaaaatacatcttcctttgcaagtccttctgctgccttatcaactgcatcaatcaggctcttatttttcagtgtaatcgtcacgccgtccaatgtcgatttgatcaggtcattgagtgcttcgcgctgtgcaatcactgcatccactttggtcttcgctgcctggagctttgcaaggttcgtgatcgctgaggtatcctccccaagtgcctccactcttgagagcaaactgtcgatctgcgcctgagagctgctcgtaatctgtgactcttccgggagcttattgatgtctgctacgatcgcatctgcaatcaccttctgctccagatccgcaatcttttcataagccatctccagtttttccggatttatgatcagcagtctcttctcatcatccagtcccagatagccctggtacaggttctcaatcatatcacgggagtccagtgtcatctcatccaacgccggcagtgccatgataccactgttgatccgctcgatctcgtcctgcttggaaacttccaaaatatcaagcagcttctggatatttgtgacctttgcctgctcttcttcactcagactgtcataacgcgctttgatccgctttacttctgtacgattgtaccatttgtaagaatttacttctggcagattccggatctgacgttctacatctgtcgctgtaatcatacgttttgtgaggtcgtccaaaccatatgcatagagatagttagaatcattgtagtaataaatcaatccattatcgccaactgtcatgctctgtgaacaaaactgtcccacgccaatattatctaccttttcataaattggctcggtctgtccgatactatcctgaataatatacatagcagatgtacgattcggatattgtccatctggtctataaggaacaacatacagatatactttgtaattgttctcagccgtcgcatatgcggtcgacaatactggcgttcctttagagcccagatcaggaatctggtaaatttctgtcatcgtattcgcatcaatgacgcggaacggctcgttacttccaccgtgtccgccaccaccgcacacataaatcctgccattgtagatcaccggactggacttgatgccgccgccattcttgtccgacttgaaccacttcatcgaatcgcgattaaaagttccatccttgttcactttcactgaaaggatcgcgcctcccttgccgcttccggatgcaagcgtgagatacagtctacggttcttttcgtaatagttcggtgtcgactgaacctgataatctgttaagttaagcttgtctaccacctcaccggtcgtcttgtttaccgcaaagaatgtaccggccgtatctccaaagtatgcataatttcctacgaattctgctccaccccagagaaagccctgctgagagcctttcgtcgcctccacatcccactctggactgatatcatagctcttcttctcatccgtagcaataaatgcatagtaggaacctgcggatccataggaggccaagtagaaatatccgtcatgatacataatcggtgtttcaatttgcgtattggcatttaaagcgattgtctgatacagaaattccaggtcagaagagcggtataccttaacgactaccttaccgtcgtcattctttgccattgcaaagaccttgccatctgcgcaggttacctgtggaagcagcatcatgcagcccttcgcctcattttgtgcaaggatttctccatcctccggatccagcttgtatatcttatcatccatagtcacgtatacagccttattgtaataagccggtgcacttacatgtgcaaacatggtactaccagtctctgccttcagcttccacttctccaccagatcctcgccggtctgcggggtcttggaatcggacacgcccttctgttcttcatttccaagaaactgactccagtttaatgcactgtctgtattctgtaggccagccttttcgagcagctgattataataatgctctgcctctgttagcacatcgtagttgtaaaccagaagcttgtcctcttccggaagctcgttgtatgctgctcttgccgcatcgatcttttctttgctccggttggatacattcagactgacaccaccgatgttctcaatgcggttgatgacattgtcgacatccgtatagccggcagcccgcacaagcgttaccgggatctcagagagctggtttgcaaatacggagatattctctgtcacactctcgtatccggatgcctctgcgatataggtataacggattcctgctgtcaggacataggagccatccttctgcggattcacggtctttccgtccggatcggtgacggtgatcgccgcataatccggtgtcagggcaaatttcagggtataggtctttgccatatgcaccgtatacactgcagcggcattcttttcttcggttccatccgtcagcgtcataacgatatcgtactgatcgctcttcttcggaatcgctaccgttgccgtcgccagagaatccacaacggtgcacgtcgtctcctcctgaagcacggcctgcgtctttgtatctactaccttcaggcggatctgctgatgctctgtatccaggtcagccgcagacatcacaatgttcagggattcctcgctggatgacaggattgcctgatattcctttgtgtttttattaaacctaggtgacagagtcatcatatttccactgccatcgtacaactgcaggttcttcaaatatggtgccttttccagattaagtacaattggcccatctgcgttcatgtctaccttgccggatatacggatatatccgtctgcctctgccgtataggtatattccgttccttccgtcagttcatattttccttctaccgggctgactgtatttccttctgcatcctgtacagtcagctttgcattctgtggcgttacctgaaagccgatctgttttactgccgcaagtgtactgtattctgccacctgttccgtctcagtttccgcaaaatcggcctctgtttccgtttctgtaccattcagatacagctctgtttccgttttgatctctgtagacgtttctgtccataactccgtctccgattctatctctgtggatacttctgtccacagctctgtctccgcgctctgtcctacctcctcgcagccgacaatctgcagtccgtttcccgactcatcttcgccgacccccgccagcaaggactcggagacaactgcactttcctctccctcatccagaatcaactcctctgccagcacgctggtcggaagtccgccgacagtcatagtcagcgcaagaaatccggaaagcatctgtttcatcctttttttcatatcctgttctccttttctttctgaagacccacggagtgccccgccttcagagtttcctctgaagcttccagagccggatccattcagattttggcaggtctcctggcttgagttcttcctactttcccatccttcccagtttcccagtggttcatgaggagttcgtcccttttacagtagcgggggctgctgcggattttcaccgtattcccttttaatgcctgtgcagccgtatctgatatgtccctagttcttcatcatattcatataatcacaggtatcccctgtgctggaagcatttttactcttacgcctcttttactgcgatataaatatccatgcagcaggcctctttatcggtacatcgtatatcataatactcaaagtcatatcctttctcatccggcacatatctgcttctggaaaaccagactcggtaaatatatttccacgtatcacggatccgaagtgcaaatgcctgatgctgagaagtgagtgtcatattgagtggttctgtcgtaaatacagcatacttacccgccggaatttccaccacctgcattccttctgccagctccggcttctctgcggtcttacttccaaagaaatacttcagattcccgtcttcatccgtctctttgagccagagtccgatcttcacatcatccttttgcatatgcccgtgatgatgtccatgcccgtgaccgtgtccatgtcctacccggtcctccttttcctgataccagtaggctgcggtatcctccccctgctttttcacctcggagccccgctcatgtccaagtacaaaaaatggctggagctctacgatttttggttctgtcataaaatggccctccccgtctttgtaggatcgaaaatattccgtaggcgtacatccgtatttctttttaaatgccttcgaaaatcctgccggtgtctcaaatcccacatccagagcagcctccagcatcccggcccctccatagatgcggtcgatcgccgcttccatcctcctgcagcgaatatactccgccacagaaatatccttgatcacctgaaaaattctgcagaaatgataataggaataatggtatttctccgccagctctatcgctgagagctccttctgaaaattccggtcaatataccgacagcattcttcgattgtctctgcgtatcccatgtcgccttctcctttttactatacatgacagcttctgttttttcttatcctgtttagctctttatgctcactcccagaagttgccgccgatgtcccgtcccagatcgcaggtgtaaatccactggatcacatccttatcctgcagcacatatttgctgcagccgtaattcgggaaccagccatttaccgtatacatccagccactcccggatccgcagtcgaactcgtccagatgattgatgcccacgatatagcctgccccgtgcacgctgtcattgcggaactccagcttcagtcctgccatacgggtcacacgcttcagtacctcaaatacggtctctccgtcatagagctctaccgtcgtctttttcaggatcactccattcgacggcacgtagcctgccagtccttccctcagatcccccatattccgaaggattgtttcacagcgaatcgtaatcgtacaggtctttttcggtgcttccgtctcttttttcgacggttcggtcgccggcgtgctctctgactgctccggcttcttctcggtctcctgctttttctctgtctcctgttttttttcggtctcggaggtcgtcccgctgccttttccggtcagatccagctccccgtccgccttgatctttttcttttccgtctctttctggcttttctttgtcccgcctccggtgccataggacacgccgccgctgatacttccggaatctgtggacatatccggaacagtcgctttgtccccatcgtccagtgtctctgcttttccggccccggcatctgcctgcactcctccggcaaccgtattcttttcttccgatccggtgctcttttgcgccttaccggtcgtcttttccgactgctttttttctgtctcttcctcagtaagcgctgtctcgccagccgtttccgcttccatgccatcggatcccggctccggctctgtctccaccacagcctctgtcgtcccctccgcggccttcagcgccttacgcgcttcttttagctcctgcagggcttcttccgcctgttcgtccgtcgcattcaagtcgctttggacctccgccgcggcctctaccaccgccgcaaacgtctctaccgccgagtccgaccagctgccatctgcctcgccactgcgaatctccgcgatcagctctctggcgctgtacacctcatttgcaagttggctctttacatccactccactgatccgtatatgcgtcagcacaccgcctgcaatcagcaaaaataaaatcgccagaacgatcttacgcccttttctttcccgcatgctccatcatcctttctccttttaccggtatatcccatacttgatctttacccgttctactttgcgaatcactttttctccaaacacatacaggaaaaatgcactgccacaggcatgtgtcgcatcatacggtacccctgaaatatacagaattttcagagaatcccagctgatcgtcaggccggacgcggatacatagctgttaaacaccagcgctgcgacgttcataatccctccgtagatgataaaggttgtcagaaagccgtataccgccagcgtgatatcatccaccggaagccgctttcgctggatcagaaagccgcccagcatcccggccgccccaaacaggtacagccgccagccaaagaacccgccgccacgtatcctggcatcgatccaggccgcggctgcagccagcagcacgccggtgaccggtcctgccatcacccggaaatggtctgattttttccggtccagatcatttttattgaagacaagccccgcaaagaatccaagaatcccccagcagaacatctgccacggcgtccagggcccctgtcccagaaagaaattgcacagaaagcgggccagcgcgccgacaaggaaccctgcctccggtcccagtgcaattcctgacacgatcgccatcgccgtccctgcctgaaagggaatcgtgatatagcagacgatattcccaagtgcggtaagtgccgtcatcaccgccaccagcaccagctcgcgcgcccgcggtttcttccgctcaaacatcatgaaaaacggcgccatgacatagagcaggatcaaaacactgaccagcataaaattatagtcgttccagtagtggatccccacatagaccgtcagcggaatcagcacaaaaatgaccagcgtcgatatcgcaactctccgttttctttttttcagatagatcttttcactgtatttctgccacatagctccaccacatccttgcaggtcacggcattgtcaaacaggtgacgggacatccggtttgccgctgtcgtataaaagctgttgccacaaaagaaacgctccggtgtatccgccgcccgcacctccccgtcaaagagcatggcacactggtcggcgtattccccgcaaaattcaatatcatggctgatcataaagatcgtccttccctgttccttctgctccagcaaaattcgcgcaagttttcgtttaaaatgcgggtcaagccccttggtcggctcatccagcagcagaagcttcggatctcgaagcagtacctttccaagcgccagccgctgcttctcaccgccggacaggtcatacggatgcatacgctccagcccgtccagctgcatttcccagatcatatcgcgcaccgcagccagcttctcttctcttgaaaccggctcatagctaagcgcctcatacagctcttcctccagcgtgatttccgtaaagacagacgccggattctgcggcagcacgccaaggcagtggtcaaaaaggccggtctttccatagctctcgatccgttttccgaaaatcgcaagcttccctctccagggcttccatcttccgctcaatacgccgagcgtcgtactctttccggctccatttccgcccatcagcgcatagatctggcctttttttacattcagggtcaatcctcttaagacgtcctccccctgccgtgtatagcggaaccagacctcttccatacagatcgcggtgtcttgcaccggtgtctctgcttttggccgttccagatgccggatctgaggttcttttactgtctctgtcagccagagccttccctcccgcaccgtcagcgggatcgctgcgcagtccggctgtacctgcatacagatccgcaccgacgcgggcagcagttcccgcagctcttccttttgtgctctcgcgacaaaccggaccgtctcctgcggcgttccctgaaagagcaggcggccatcctccatcaaaagcacctggtctgccatcggaaatacttcctcaaggcggtgctctgtgatcacaatcgtcgtcccgagctcctgattgattctccgcagggtgttcaaaaactctgaggcagccaccggatccagctgcgaggtcggctcatctaaaatgatcgcctttgggtgcatcgccatgaccgccgccagattcaaaagctgcttctgtcctccggaaagctcacaggtgtctttccgaaaccaggtctgaatcccgaagtagctggccatctcggaaacccggcgattgatttctcccaccgaacatccgaggttctccagaccaaaggccagctcatgccataccttgtccgtcacgatctggctctccgggtcctgcccgacgtatccgatctcggaagcgtcccggcggttgtccagcagcatcagatcttcgccgtagtaccagatcgccccgtctccgatcccatacggcaccagactttttttcagatggcgcattagcgtcgtcttgccacacccggattttccacagaccagtacaaactcggattcccggatctgaaagctcagatccgttaatgcgcttttctcacaatccggataagaaaaagtcacatgttcgaatacaaacgtctccatttccattcccccagaagctctatcacgaccggcagcaggcaaagtcctgcaaatgctccgtataccggtatcttcagccagcccgctttccgaaatacgattctcggataaaacagcaggccattcattttttccacacagccgattagcaccacgccgccaagcagcaagatcagcaataaaacgcacaggtctctccggtcaaaccggtaaatggtatagctgctccggcccttcagcccatagccccgtgcctccatcgagtccgacgtctcgatcccggcttccagcgaccatgcaatcagaatggagagctctttgctgaaaatgcggagcttttttatcgggtgccggctgccgtcgtcccttcccatacagcgctgcccatccttcacctgatcaaatctgcgctgcagcagcggaaacatccgaaaggtaatggacaacaacagccccagcaccggaagtacccgcccgaacaggcagataaactggtcgatccccatgaccattccccagcactggatccagaccagcacagaagaaaaaagcatcgccgctgccagtccgtacagtaccgcttccagcgtgaccgctgcatcattcaggtaaaagaggatcgtactgccgcgctgcgtaaagagcgggttgatcacaatgccaagcatcaccagcggcaccgtcatgcgcaggttccgctttatcgcttttccctgcccccataaaaaggagcagaggaacccgcaaagcaggctgcagcaaaggaaatatggatgcatggaaaacatggtaaacacaagtatcagtacaaaatacagaaatatgaccgccggatgatacccggaaaagcttcccatctgccctgcctcctcttttctatgactccatatcctccagtccgccttccatctccaggtagacccgtcggatctcgtctaaatcctgctcttctgcctcccacatgccacggtcagcaacctccagcagccgttcgcagatatggtgcagcgcccacggattttcttttccaagaaattccttcatccgcggagtctgcagatacagctgctcaagcccccggaaatccgcagcggtaatgttgtccgccgctgcactccagccaaataccgtatcaaacatcatagaaatctcctgtgctccacggtacccgtgcggcatcattccctccgcaaacgcaggattcagaagtttcgcccgaaacagccgttccgtttcttcctttaacgtgcgcagctttctgcccgtcccgtcgctgtctgagaatacataggcctcggtcttttctccttttgcctgttctgccgcagccaccgctccgccgaaatagttgtaaaaatcatcgctctccatcagatcttcttcggacgaggacatattttttaccaccgcttctccggctttcagccggtcacggaacgcttcttccatcgcttcccctgaccggttccgcccgtaggaaaatccaccccatttgatgtaactctctccgagctctccccggtccttccaggctccgctctcgatcagcggcgctacccccgcgccatactgtccaggcggacagcc

SEQ ID NO: 3649 - DNA, 5831 bp, Unknown
  16S sequences of unknown bacteria
tatacaaaatggaaaacggcgggcttatacagcgggccgacgaaacctataacgcatacacggtttgcgacatcgacaacgacggccgcgacgacgtgggaatagcccttatagacagcgaaaagaagcagtcgagcctgacattcaacgactttgaaaacaacgattttaaaaccgtttcccacataatgcttgacggcggcgtgaccgagtatcccaatgttcaggtctcaaaggtggacggcaaaaacgccgtctatctcgacggactgaaatcatccgacacgctcataaccgaggtcgtttacaccgaaaacggtgttctatacaatcccttttccgcggatgagtcggccgaaaacaccgtgacggccaggaaaaacggccgcaaatgcaaagaccttaacggcgacggaaaaatcgaaatcccgctgaccgttccgcttcccggttacgattctacccttttgagaaccgattggtcgacctatgaaaacggggaatttaagtcggtcatgtcggcgtggtactgcgtcggcgagggctattaccttgttttcgaggattcctggaaggacagcgtgacggttattttcgaccccgaaaagggaacggcggttttctgcgaatgggataaggacggcaaggcggtcggaaacgagcttttccgtatcgagacctttgaaaccgaaaaatttgaccgtcatgcgggatatatttcccttgcctcctccgaccaaactacctttgcggtgaaattttccgattatgagggacccttttcggtgtccttcgaaaggcttaaaaacaacttcagatttattgtggactgaatttaaggagcataaagaacatgaaaaaaattcttgtatgtgaagatgaagcggcaatcagggagtttgtggtgctcaatctgcaaaaggcgggctttgaggtctgtgaggccgaaaccggcgaggacgccgttgagctttttgaaaagcagggggactttgacgttgctctgctcgaccttatgcttcccggaatagacggcatagaggtgtgcaagcggcttcgccttaaaagcgacagaataggcatcataatgctgaccgcaaggacccaggaggccgacaagataaacggcctttcaagcggtgccgacgattatatgaccaagcccttcagcccgtccgagcttgtggcgcgggtaaattccctctgccgaagaatgggggtgggcagcgccaaaaaggttgaggaggacggcctttcccacgggggctacaccctcaacatacgcaaaagatgccttgaaactcccgagggcagagacattgagctgactcaggtggagtttcatataatggaatatcttttttcaaactacggtcagcccatcgaccgctccaaaatcctcaacaaggtgtggggcgacgaatattacggtgaggaaaaaatcgtcgacgtgaatatcagacggctgcgcatgaagatagaggaagaaccctccgagcccaaacacataataaccgtttggggcagaggatataagtggataagctgacagccggcaaataagaaaaaagggaaaggaggccgtccggtggcaaagaaaatcaaaaaaatgagatcgcagggtcttgcaaggcgctgggcgaccaacattctgagcgttacggccgcaattctcgtggtggtggaaagcgtttttatatttgttgttcacgaatattatttttccaccgtcagacagtatctgaacaacaaaatgtcggctatatccacctccttttcggcctatgcctccggctcgtataccgattttgaaaacggtgcgagacagtatgtcgaaagcttcggcgagcgtgacaaaatggaggtgcaggtgcttaattcctcgggaaacgtggtcatgtccacaaacggttttatgccggagaaaagcgaggattatacggaggcttccgcacagagcgacggcgtttccctttggcaggggcgcctttccagcggcgaaaaggtcatggcggccaccacgcttataaagtcaaagcaaagcaacgacatcaccctcggcggggtgcgaatagtcgtttcgctgaccgatacctcctttcagttcaacataatcatgtggatcggaattgtggtcgggctggcgcttttccttgtgaccgtgctgtcgggaacctacttcattcgctccatagtaaaccccattgcgggcataaacaaaaccgcccgtcagatagcggcggggggttttgacgccagaatcgagccgtcggaaaagcagcgggacgacgaaatcagccgtctcggcgaaaccataaactacatggcgagcgagctcggttccaccgaaaaaatgaaaaacgagtttatttcctcggtctcccacgagctgagaacgccgctgaccgccataaagggctggggcgaaaccgtgctttcctcaattgacgaccccactataaccaaaaagggaatcgatgtcattataagcgagtcggagcgcctttcggttattgtggaggatcttttggacttttcccgtatgcagagcggaaaccttaaatacaacatggttccctgcgacattgtggccgaggtgtcggaagcggtcatgacgctgaccgacacggcaaagaaacagggcgtttttctcgaatatgttattccggaggtcatgcccaccgtggtggccgatcccggacgtatgcagcaggtttttgtcaatataataagcaattctcttaaatacacctccaagggcggtcacattttggtggacgtcaaggaggaaatcggatatgtgctgattatggtcagcgacaacggcagaggtatccccgaggcagacctcgacaaggtcaagcagaagttttacaaggccgagggctcggtgaggggttcgggaataggacttgctcttgccgacgaaatagttaaaaatcacggaggcagacttgaaatttcaagtaccgaaaacatcggcaccaccgtttccattatgcttcccattaaacccaaaaacgatcaaaactgaaaggaaacatcaaatgagcgataaaaaggtctgtaaaatgacttccatcggcggtcaggcgctgctcgagggcattatgatgaaaggcccccacaaaaccgtcatggccacccgccttcccgacaaaaccattgacattgaggagcttcccgaaaaacacgcgagggataaatttaagcccttcggatggccgataataaggggttcggtgaacatgatcgaatcgctgattaccggctataaggcgctgatgaaatcggccgaaaagctcggaatagacgaggacgacgaagaggtaaaggaaagctggctttacagggtgttcggcgaaaagctcatggccgttatcggcggaattgcgggcgtgctcggagtcgcccttgcgctgctgctgtttatgtggcttcccaccgtcgttttcaatttggtgaacggtatagtcacccccggcgtttcgctttccttccccgtaaaggctgtagagggcggaattcttgattcatggaagggcgtttttgagggagtgctcaagataataatcttcctcggatatattgcgctcaccgctcttatgaaggacattaaacgtacatatatgtatcacggagccgagcataagtcgattttttgctatgaaaagggtctgccgctgacggtggaaaacgtcagaaaacagataagatttcatccccgctgcggaacctctttccttgtgctggtgcttgtggtcagcattttggtgtcaagtcttgtgctgaaaatcttcccgacgctcaaaaccgtgacatggctttggatgattgtgaaaatactgcttatccccgttattatgggtttcggatatgagcttatccgtttttgcggaaagcacgacaatctgctttcgaaaatcgtgtcggcgcccgggctttgggttcagcgccttaccaccaaggagccggaggacgatatgatagaggtggccattgccgcgctgaccgaggtcattcccgaaaatcccgaggacgacgtatggggcaaatgacccttctgcagcttgaaaggctgggtgaaagagagctttctaaggtgaccaacagcccgaggcttgaggcttatgagctcgtgtgcaaggctgcggggattgaaaaggaacgactgattttcgaaaaatcacgcactgtaacaaaggggcaggaaaaagcctttgacgagcttttaaaaagaaggctcggcggcgaaccgctgcagtatatcctcggcttttgggagttttattctcttgaattttttgtgggcgagggcgtgctcattccaagggccgacaccgaaaccttggtggacaagggacttgaatttgcaaggaacatagaaaatccgaaaattctcgacctttgctgcggaagcggctgcgtgggcatagcgatttgcaaaaatctcaaaaacgcgagcctcacttcggccgacctttttgaaaagccgctttattataccgaaaaaaacgcaaagaaaaacggcgttgagaatataaaaatcgtaaaaacaaatgtttttgaaaaaccgaaaatcaccgaaaaattcgaccttatcgtctcaaacccgccttatataaaaagcggcgtaatcccgaccctctcaagggaggtggcaagggaaccgcggcaggcccttgacggcggagccgacggccttgatttttacagggcgatatgcgagaactatgttcctctgctcagcggcggaggaatgcttgccgtcgaaatcggatttgatcaaaaggaagaggtaaccgaaattttcggcagatattttaaaaatgtaaattgtgcggccgaccttgcgggaaacgaccgggcggtcacaggaacaaataaacaagaagagaggtaaaaaacaatggcagaaaaaaagcttgacaaaaaggccgaggatcgcgccaaggcgcttgaaacggcgcttacccaaatcgaaaaggatttcggaaagggtgcggtaatgcgcctcgggcaaaacaccgccatgaacgtggaagccatttccacgggttctctttcccttgacatggctctcggtataggcggccttcccaaaggaagaatagttgaaatatacggaccggaatcctcaggtaagaccaccattgcccttcacgttgtggccgagtcgcagaaaaagggcggaaccgccgcatttatcgacgttgagcacgctctcgacccggtttacgccgcggctctcggaatagacattgattcgctgcttgtttcccagcccgatgcgggcgaggacgcccttgaaatcgccgaggctctcgtgcgttcgggtgccgtcgacgttgtggtggtcgactcggttgcggcgcttgtgcccaaggccgaaatagagggaagtatgggcgacagccacatgggacttcaggcccgccttatgtctcaggctctgcgaaagctcaacggcgccatttcccgcaccaactgtatcgttattttcataaatcagctgcgcgataaaatcggcgttatgttcggcagccccgaaactacaaccggcggtaaggctcttaaatattacgcctcggtccgcatcgacatacgcagggtcgagacccttaaaaacggttccgaaatgataggctcgcacacccgcgcaaaggttgttaaaaataaggttgctcccccctttaaggagggcgaatttgacattatgtacggcgaaggtatttccaaggagggagaaattctcgacctcggcgtcaaggccggtcttgtccaaaaaagcggcgcatggttttcctataacggcgagcgcataggacagg

SEQ ID NO: 3650 - DNA, 8058 bp, Unknown
  16S sequences of unknown bacteria
tggcggcgtagcccagatggacctccagcacctgaccgatgttcatacgggagggaacgcccagggggttcagcacgatatccagcggcgtgccgtcgggcaggaagggcatatcctcctggggcagcacgcgggaaacgacgcccttgttgccgtggcggccggccattttgtcgcccacctggatttttcttctctgtgccagatagatccgcaccaccatgttgacgccaggagacagctcgtcgccgttttcacgggtgtacacccgcgcatccactacaatgccgctttcgccgtggggcactttcagggaagtatcgcggacctctcttgccttttcgccgaaaatggcgcgcagcaggcgttcctcagcggtcagatcagtttcgcccttaggcgtcaccttgcccaccagaatatcgccggcgtgaacttcagcgccgatgcggatgataccgcgctcgtccagatccttcagcgcatcctcgcccacgttgggaatgtcgcgggtaatctcttccggccccagcttggtgtcgcgggagtccagttcgtattcttcaatatggatggaggtatatacgtcctcgcgcaccaggcgctcgttgagcaggacggcatcctcgtagttgtagccttcccaggtcataaagccgaccaggatgttgtgtcccagcgcaatctcgccctgatcggtggcgggtccatcggccagggtatcgcccttgaccacgcgctcacccacatccacaatggggcgctggttgatgcaggtagtatggttggagcgcaaaaacttggtcagggtataagttttgatctcaccgctgtcatattttacggtgatgttgcgggcgtccactttgagcacctcgccgtcaccttcagccagaatggcaatttcggaatcctggcagatcttgtgctccatgccggtggccacaatgggggcttcgggccgcagcagcggcacagcctggcgctgcatgttcgcgcccatcagagcgcggttggcgtcgtcgttgggcaggaaggggatcatagccgttgcgatggaaaccatcatgcggggcgatacgtccatataatccacgcgctcacggtccacctcgatgatttcatcgcggtgacggcaggtgatacgggtgttgagcaggcggccgtcctcgccgatgggttcagctgcctgggccacgatgtactgatcctctacatcggccgtcatatactccacttcgtcggtaacaatgccggtctccttgtcaatacggcggtaaggcgcttcggcgaaaccgtattcattgatccgggcataggtggcaaggtaggagatcaaaccgatgttgggaccttccggcgtctcgatggggcacatgcggccatagtggctgtaatgcacatcgcgcacgtccatgctggcgcgctcgcggctcaatccgccggggccgagagccgacagacggcgcttgtgggtcagctcggccagcgggttggtctgatccatgaactggctcagagggctggagccgaaaaattctttgattgccgcggtcaccgggcggatattgatcaggctctggggcgtgaccacatccatgtcctggatagtcatgcgctcacgggttacgcgctccatacgggagaagccgatacggaactggttctgcagcagctcgcccacacagcgcaggcggcggttgcccagatgatcaatgtcgtccttgccggacaggcccagggccaggccgttcatatagttaacggatgcaaaaatatcgtcaatgatgatgtgcttgggcaccaactcgtccctgcgggcgatgcaggcgtcgatcaaatcctcgccgccgtccggatactgctccagcagttccttaagcacggcaaagcggacgcgctccttgatgccgcacttctccaggggatcaaaatccacataagcgctcatatccgccatgtggttggaaaacactttgacggcagcgccatccacatcgatggtgacttcattgacgccgatgctgtcaagcttcttggcctcatccacactgagcacatgaccggcctcaaacaggatttctccggtcatgggatcggccacggggtagatcagtctgcggtcgtggatacggggccacagagccagtttcttgttgaatttatagcggccgacgatggacagatcataacggcgctgatcgaagaacataccgtccaccagcgtgcggcaggaatccaccgtgggcggctcgccgggacggagcttgcggtaaatctcgcacatggcttcctcgtagctcttgcaggcatccttctcaatggtggtgacgatgcggggatcgtcgccgaacatggccaaaatttctgcgtcggtcttcagccccatagcgcgcagcaggcaggtaatgggcagcttgcggttcttatcgatgcgcacccagaactcgccggcagtgtcggtttcatactcaagccaagcgccccggtagggaatcacagtagaggtgagcagcggctcatcggttttaggatcaatctctttgccgtagtacacgccgggggagcggacgatctgggaaacgacaacacgctcggcgccgttgatgacaaaggtaccggcctgagtcatcagggggaagtcacccatgaagatctcctgctccttgatctcctcggtctccttgttgcgcaggcggacgctgactttcagcggcgcggcataggtggcgtcgcgcattttgcactcctccacactgtacttgggcggttcgttcatgctgtagtcaatgaacgtcagctccaggttgccggcaaagtcagtgatggcgcccacatcgtcgaacacttcgcgcagtcccgtgtccaaaaaccactggtaagattttttttggatctccagcaggttcggcatcgggatgatctcttcatgtttcgcgaagcaccggcggacggttctgccgtaattcttttcgtgccccagattgcactgcaatttcatcacactccgtttctttttcacaaaagcctttcagcttgatggcatttgaatcgcagaatagacacacgcggtcttgttgttagaaatacaaccgatacatcttgattcttttccgcttccgtgctatactaattccagtatcagcagaagggtattttcgtcttttctgcatacaagcgattgattataccatgcaccctggatttttgtcaagtattttcaggaaataaatgtctatattgatccttttcggcggcctgcagcattgcaggccgcttttttcgttttcttcaacggttgcagcctttgtttccttttcttcttccataaccagagcgctgctttttcatccttttccccgtcattcaggccgcagaaaactttttccttcctcccccttctctttccggcaattttcacagtttccctccttttttgttttgcgcacacctgcctcagcgcatgcgtaaaatagagcgaacgcaatagtgcgtttccgaacggaattccatgaaaaggagtttttccatgaatcatcatcattgcggctgcggaggcagcgattcgttctgcttcggcagcaacggctgcgatcccgttgcctatatccccggtcctccgggacctcccggccccccgggctgccccggaccgcgcggccccatgggccccagaggcgccacaggccccaccggacccacaggccccgtaggccctgccggtgcaggcatcgacacagcctctcagtttgtccccggctatccctatgccgaaggcaacatggtctactataacggcagcctgtaccaagtgctgcgcaacaatcccagcggcgttcccggcacctcccctgatttcgctctggttaccgtggccggtccgaccggtgcaaccggtcccaccgggcccatggggatccccggcgcgacgggtgcaaccggcgccgtcggtgcaaccggccctaccgggcctgctggtgccgctggcgccgccggtataaccggtcccaccggccccgccggtcctgccggcgccaccggcgcaacaggcgcagaaggccccactggtcctaccgggcctgccggcgctgcgggtgccgctggcgcagagggccccaccggccccaccggacctgccggcgctgcgggcgcagagggtcccactggtcctaccggacccactggacctgctggcgctgccggcacagcgggcgcagaaggccccaccggacctaccggacctgccggtgccgccggcacagcgggtgcagaaggtcccaccggacctaccggacctgccggtgctgccggcgccgcgggcgcagaaggccccaccggacctaccgggcctgccgggcctgccggtaccgttactcccgctgctgctgttacagacgccaccaataccactgatgtggtcacccagtttaaccaactgctggccaacatgcgtgccgcaggcctcctgagcagctgacattcaaccccgcactcaagcaaaaaagggcggcacatgccgccctttctttgccatttcatagtatggagaaccccattatgaagattattgtttacgccatctgtaaaaatgaaagcaaatttgtcgaccgctggatggattctatgacggaagccgacgccgtggttgtactggataccggctcttcagacgatactgtagaaaaactgcgccggcgtggcgcgaccgttgagcaggcagagatccttccctggcgcttcgacaccgctcgtaaccgttcactggccctggtgccggacgatgcagatatctgcgtctgcaccgatctggacgaggtctttcatcccggctggcgcgccgctctggaggccgcctggactccaggcacccaacaggcccgttatcgctacacctggagcttccgtcccgacggcagcgaaggcgtcgttttctggtatgaaaaaatccacagccgccacggctggcaatggacccaccctgtgcatgaagtgctccagcgcaccgacggcctccggcagatccgcacggttaccgccgcaggcgtgcagctcgaccatcatcccgacgacaccaaatcgcgaggccagtacctccctttgctggaactgtccgtgaaagaggcgccggaggatgaccgcaacgtccattatcttggcagggaatacttcttctacggccgctgggacgactgcatcgcaacgctccagcgccacctggccatgcccacagccacctgggccgacgagcgctctgcctccatgcgctatatcgccaaatcctatgtccgcaaaggcgacgttctctctgcccgccgctattttctgcgagccatcgccgaagcgccccatctgcgggaggggtacatggatttggctaccgttctctacgagcaggaggactggcccggcgtactttatttcaccgcctgcgctctggaaatcaccgcacggcccgatacctatatctgcgaggctgccgcctgggggccgctgccccacgacctgcgggccatcgcgttccaccggctgggacaaattcccctagcactgcaagaagcagaagccgctctggctcttgcgccttccgacccacggctgcaggggaacgctgctctgctgcgcagggctgctgaagccgccccgcagcagtaaatcagaaagcggcccgctgcatgccggccgccctgttcacgctggctgcgcaattgctgcagccagcgcgcatttaatcgattaccgtaacggcggtgatcaccggctggttctccggctccacataaccggtctgcatatccgccaccggcgtttttacacagatttcatccacaagttccatgccctctgtcacatacccgaagcacgcatactgtccatcgagaaaggtactgtcctgcagaacaatgaaaaattgagacgaagcgctgtcatagtcctgtgagcgggccatggaaatggcgccccgggtgtgggtcagcggattatcaaaaccgttttccgaaaactcaccggcaacggtttcagcgctgccgccggtgccgttgcctttcgggtcgccgccctgcagcacaaaccctgccgccacacggtgaaacgtcagtccgtcgtaaaagccttcttttgccagcttgacaaaattggtcaccgtggcaggcgcagcatcggcatccagttccaccgcaatcgtgccataatcctgcacctcaatttccacatgatgcttaccgctgagccactccgcgctgtccgttttcccccccgaaactgatgcttcatcggggcctgaaccgtctcccgccgcattttgcccgcagccagccagcaacaggcccacagtcagtgccagagccggcagccatgccaaacgcttccattgtttcattttgatgtactcctttttcccgttttcgttcccttcccaggaacagaagaagtgcgccgctgcttgttcccggcggcgcactctatttatgttttctgacaatgtccagcagcaatacgccggacagaagaaaggcaataaaaaagcctgccgcaccaatcgccggaatccccagaatctggggatgcatattcgtagtgcacagcatgctcgaaccgatgagcagcgccccgtcgatgataccgaacaccagccggtccaccatgcggtccgccttggcgattggctcttccgacccagtcagttccagattgattttcgtctgcccccgcacggtcattttaatgatgtccgccagattcagcgggatatcgcttaccttttcggcacttccggcaaatttgcgcagaaggtgccgcagctcctgttcagcgctgtccatggacagcacgcccgctgaaaaatgattggcgagaattcccatcaaactggtttccgggctgcagtcctccagtacaccctcaatggtcagcacgccgcggatcagcatggtaacgctgttgggcattccaatttgatgcttggatgcaatgtccatcatctcgcccagcaccttacccagatgcagatcctgcagatcgctgctgccgtagcggtccacaaaaattcggatatcctcgtacagctcattgtgattgatcttggttttcagaacccccagcgacatgatggcgttttccagctcataaatatcctggcgggtaatggccagcatggccgttcggaaaatctggcggtctcggctggacagcacacccaccatgccaagatcgagccagacaatttttccgccgcggatcacaatgttcccctgatgcggatcggcatggaaaaagccgtcgtccagaatctgtttgatgtagttctccgccagcttttcaccaatctctcccagcgcgtagccagccgcacgcagctcatccaaatgatcgatcggaataccggaaatattctccatgaccagaaccgaggctgtgcttagctcccgataaaccctgggacaggaggcataggccacatcttcattcaaagcgccgaaacgttccagatgctccgcttccaccagaaaattcatttcctgctgggatacggtccacagctcatccagcagtccgttaaaatcgatcacatccccggcccggggcacgattttcagcagccgcgccgcccggcgcaaaatggcgatatcctcttccatgatccggtggatcccccggcgctgcaccttgatcaccaccggctggccgttgggaagccgcgctgcgtgaacctgcgccaccgacgccgaccccagcggcgtgcgatcgatccaagcgaacacgtcctccgccgggcggccatactgcgcggcaaggatctcctccaccgtttcaaagggcatgggcaccacaccagagcgcagtttcttcagctcgtcgcaatacgcctgcgggagcatgtctgagcgcatggacatgatctgccccagtttcacaaaagtggggccaagttcctcgagcataatgcgcagcttctgcggcgtaacgccatggatcatgtcgctgcgccgcagaatatctacaatctcatgcagccggctgctcttttttccgctgcgggcgattcctttctcggcagcg

SEQ ID NO: 3651 - DNA, 32759 bp, Unknown
  16S sequences of unknown bacteria
cgcacgggaacgggcggtcgccgctgaaccgcttgggcggcgccgttatctccccgtgcggcaggctttgcgtttaacgccgttttgtatgcggcctttacttgtaattggccgcggtttcttgccacttcgaaaataaaacggtgatacaaggtaaagaaaaaaacctaaaactactttcactggatagtggttcgttttaggttttgactggtggagctaaggggattcgaacccctgaccttttgaatgccattcaaacgcgctaccaactgcgccataaccccggaaaatctgatttgtgcataaattatacagtaagcgcgggattttgtcaagaaaatataccgatgatttgtactgttccggaaattaaggttacggcggttataaatcaaagtttctgacttcgttgtttgttttttggtttctgtcggcttatcagggcttgaatgacgggatttaattaattaaagcagtgcgcgattaaggttgcaagacgggaataagagtcgggtaggacttataatagttttattcggagcttttttataaaaagatgtgttgtaaaagcggcaggggggaaactgttaaaaaacgtttgccgcaaagaaagcaagcgtaaaaatttacgggttataagtataagatagatttattaattgtgcgtaaagctcaatcaatgacaacgtcggcgattttgggacaatggtcggagcttgttaacgccgccagatcggtaacggtaaaataattttgtaccgttatgccttgaccgcgattagggttctgaacccaaatatagtcaataacgccgctatccgccacgggtgtaccccatttgacgtaatcgcccgatttatagtcgtaagtggcatagcccgggcatcccaggttatcttttgtaacggtggctatgtcgtagcaccacgacatgtgttttttgagaatttcgaaagtcggtgaaaacggtttgcagttaaggtcgccgcccatgatgacgggagccgacgaataagcgggattaatcgcgcggatttgttcgattctttgcaacactttttgtgcgttaagagtgcgcacgtattccgcctgagcgggcgtaagctgcggcgcgctccacataaagtgagtgctgattgaaataaagatttttgaagaacttaaatcttcgaaaacagcccaagtcaaagatttcgtcttttcgttgtttccagtaacgtaaactccgtctgtaaaaaccgtatcggggaaaagttctccgccgctgcaaatcagttttaacctttgcggaagataaaacaacggctcgcaattttttccctcgggatatatgcagctgccctgttcggtaacgggcacttcggcatagcccatttcactcatgcgcggagccattcctttgcgaaaatccttgtcatattcctgaaaaccgataagctgcggcgcatacttttctattatcttgcattgattctgttgtcttaaatccatggggccgggaaaaaccttgttattagggttgtcaccgtatccgtaaatgttgtagaacatgcaacgcaaaactttttcctgcgcttccgttttgtcgattgattgttttttgtcgttaatcatgcccatagtaataaaaaatctctgttttcggatttaataaaaatttttgtacgatttgattgacttagactaaagcaactgtatataaattgcgattataccgtgttttaactgttgcaaaagggatttttttacctataaccgcaatttatatttggttactcgttcctttcggatattatattataaaaaaataaataaagcaagaaacaaacgtcaaaaaaatttttctatgattgcggctgaaaaaagcggcaatttttttttgccgctttttcctttacaaccgaatgttcctgaataacatattaaaggttaacttttcgcgcgaagcttacggtaagcttcgtgttttatgcgattgcaaatacaaactggtttttttgctgataactttaacgccttttattgcagttaaagtggcagcaattggacaaaatcctgcctaagcacataaagcatgaccgacaacaacagttacagcacttgcagcaattacaacagggtttaaccgctaatatcgtgttgacgggattgcttgtaaagcgcacgggttgacttcccgaattgtcggtaacgaccgaaacgttggtgacggtattcatgtcagtccaccgtcacgtcgaattccacggttacggactgaccgggttcaaggtcaggcagcgggaatcccgactgcggatcgtaggggaaggacgcgtcgtctatttttacgcttccgtccacaaaggaagttcctgcgggaatagcgtcggtaaaaaacaggtctatcaggggaatgttgccttcggaggaaaaaaccgtcttataggtcagcacgtcattgactacggcgaacgctttatctacgctttttacggttttgacctttttgtctgcgataaagacgttgacggggtcggaaaccgaaaagctttgcgcgggatagcccgcaaacgggagaaattcgtaattaacctttgcaatgttggttgcggggttatttgcggggacaaatcctgccgttgccgaaaaagtaacggttacgctttgccccgcgggaatttccgcaatgactacgggaaagctgtcgggataaggcgtcccgttgacttttatcgaacccggcgtcagcgttaatccttgcgggagcgcgtctgtcaccgtgacgttaagcgccggaacagtgcctgtgttgataattttgatattatacggtatttcttcgccgatttcggcaaaggttttagcggcttattttaatactttaaggtcggcgcctttactgtttatctgaagcgcaagagcgtttgcaacgtaaagatcgccgctgcttgtaaacctgactaccgcgttgaactggttagcctctaagctctgcgatacgtccacggcggtaatatcccagccttgacggcaagcctgagtgttcgcgcttgtcaatgcgtttgcgttcctgctgccgaaagtgccgcttgtgtcgacgtttccgtcgctcccgtttatttgcgacgcgaaaaagttgttttgcgggttgttgggtccgcttaaaaagttaagcgaagtttgtccgcttcctctatttcgaagtccactataacgctgagccgcataagtaaaatcccagctttcgtcaaaacatgcggggtaagcgcaaactgattaaaacaatcgtatacttaagattaaataaaaaacacgccgttcgttacaatgcgctcggcgtgttttatgttgttttttctttttatcagactacaggcagcgtaaggtcgggtttagtgtagtctatttcggcctcgattaaaaatttcatgtcgttattaatcatatacatgctgaaaccgataattttaccgtccgaaaatttcagctgcgctttatcgaaagtgaaaacttctcctcctaaagttatgtctatgttttcacaaacgtattcgtcggcaaaagagtcataatcgaatttgtcgtaaaggttaccgaaaacaagaatttgcgccagaatgtattcgtaataatcctcgccgtcgtaatcggagctttcccatgctccgcttgcgtttttggtgtaatacacgggcggggaaagggtgtaatcgtaatatgtttcgttgcccacgctgtcgtcgaggtcagtaaggacgtgaattatctttccgtcacccgaagtcattactgcgttttgtgtctcctgagtggttacgctgctgtcggaattggtcgtgctgttggtgaaagtaaaagtaaaatccgtgaaattttttctgtcgaaagcgctttcccattgttgcaaactcattgcggttttgtccgttatctcgtctttcgagggcaaggttacggttgtcagctcgtaatcgctcatcgtttcggtaatgacgtatcctcccgaagaaaagcttacggaacttactcgtttttggttgtcgaaaacaacttttatttctttaaacggctgaggatcggcttctccgaaagcgatttcgacgttttgggcaatataagcgtcttgtgttttgtcgtagacaaaatagtcgtatttatcggcgatgtggacatagtaacagaaatcgtagttgaatccggcggtaaagttttctttaatccaggcgttttctccggttttagtgtaaataaacgctttatcgtctttgatttcgtaaatgttttcgggtctcgttgcgggtattgattttataagccatgcccctgtgttttcgtcaaaagcaatgtttttgactgcggtgtcttccgttgcaccattggacgaaacggttgtaatcgtgtgattacgcataaaggagaaaagcgcactgttccattcgtccgcggtaataacttccgtttggtcccatatttcttcgtcggagggaagagtgattaccgcgttgccgtaactgattgcgtattcagcttgcgtaatggattcgcccgaggtcgtgacggtgacggacacggcgcgcttgttattgaattttacgctgactgcggggtatgttatctgttgattgttaagcgttaatgttaaattttgggcggtataagtgtcggtttcggaattgtaagtaaatgaagaatatttatccgaaaaattcaggaaaagaaaattgttttccgccgagaactgcatttcggtggtgtttttaatccagccttgttcgtattttctgtaataaacactgccgttttcgtcgcaaatccaaatttcctcgttctcgctggtgctgcccgcgtaagacatggtgtttttaaggtgataaaccattttgccgtcttcttcttttgcggcaaggcgaataacgacagtactgtcgtttgcaccctgtcccgttacttcgcatacgatgtcggacaaaatcgacttattaaaagccgaatcccattcctcggcggtaacggtgttgcctgtgaccgcagcggggggatcgggttgctgtgttccgtcttccgtttcgtccgttttttccagacagcccgtaaacaaacacaacgcggcaacaaataaaacaagcgtgactaaaagttttttcatgacaattctccttatttgattaaacaaagaagcaaaacgcccatttttatactgaaaacattttactatgatttgtttaattatatcacggcttttgttttgtttcaacaaaaaaaacaggtaatttctgtttatttgattaattcggcccaccaaaaatcggtaaattaattttttcaccgcttttaaacggattgattaacagcggcaatcgcggtatttattaaaaatgcagttgatgcgggaaaatcgcattcataaaataataagcgcatgaaaaccttgatgcttacttttaaaaaacttcgatagaagtatatttttgaaacaaatacagttatttttgagttgaattcaatattttttaatggtataatcaaaaaaaacgaaatattaattgtttcggcggttttttgtgctttaaatgtctgaaacggtttgaagccgattttttgcatccattgcgtgcgtgtttgtgtaaatttatgtatgttttatttgaaacaatatgtaaatttataattttcatcgtaaagtataaaaatgtttttttaatatgatataattcaaatgcggttaaattttatttgactgtaggagtataataagcaggaggaaaatttaaaacaatgaagaaagcattagtaacggttctttcgttgttttttgcattttcggttttgacgggttgcgccaatgtcggtaagtattatctgccgcattacgaccaatccgcagacgacgtgcttaacagcgatttgttttaccgtaacgacatggtgacgtcaggcgccgaccccacggttatttacatagacgacgaaacggacgaggaaaattactgttggtttttcctgtactccacgtccgacgatttcggctgtctcggtttttccacttatcgcagtaaggatatggtaaactgggaatacatggggcctatttttgcgcctgaagagggaagctggtcgcgtatcagtctgtgggcgcccgaatgtatttacgacgaaagtacggataaatattatcttttttacagcgcgcaggatttgcacggcgacagtaaatatttcgatacccatgaagagcgcgcgctttatcacgaaatcgaggcggaagtaaacacttacggttacgccgcggtagaagaaaagatgaatgaggcaaagctaacgtattccgaagcggaaacttacgaaggccttaccgaagaacagcttaaaaaagtaaagaactcaattgccaactattacagcaacaaagaagcgttggacgaaaacgacaacctgaccgaggaggaaaaacagcagtcgctttgcgagtacggcagggaaagacttctggaaatttatacggtcaaaattcactatacccatgccaacaacggttattcgttgggggttgcggtatccgacagtcccgcaggacctttcgtgcagtacacgaatattgaagggcaggcaggttacgacgccgccaaccgcacgctgggtttaggcagtccttttataactcacgaagatttgtacacgtccgctgcggcaaaagaaggttatcacgacgtgtttattcccattgacattcacccttacgtcgaccccgtatcgggcaaaaaatatttttatttcgccaatacttacggcggtaacagcatttacggaatggaagcgggcgaaaattggacggacgaccccaagtgggaaacgcttacttatctcataaggcccggttataaaaacgttacgggcaacgaaaagaccgattacggcgacagcggcgtcaacgaaggacctttcatgcattacgacgaggcaagcaaaacctattttcttaccttttcgataaacggttatcccgacaagctttatgcggttgcccaggccacgggaacatcgcctctcggcacgtttaccaaagtagaccgtcaggacggcggaataattctttcgtcggagccggcatgggaccacgtatcgggtaccggacaccattcgttagttgagtacgacggcaaactttacataatgtatcacgcgcactacgaccgtgtttacggcgattcgctgcgcggtatgtgcgtggacgaaataaaatttttcacgcgtcccgacggacaaaagctgatgattgcaaacggtcccacttatgcgcccatgcctaaaatcggtcccgatgccgaatataagaacattgcggaaagcgcgaccgtaaaagccaccaacgccgccgacgggtcggacgcgtccgcactcaacgacggattgctgtccattactacctatcatgattttatccccgaataccttaccgaaaaaggtacaaccaagattacgcttacgtttgacgattacagggcgatacgtgcaataatggtgtttaattccaagtatctcgaaaccgcgttcgggtcgattgacaggatagagcttgattacaagcttaccgacgaaaacggcgcagagcaaactggaaccgcttacatggaagacgttttgttcgatatggaaaaatacaccacgcaatgggaggacgaggaaaacttcgcgcgcccgggcgggtccgtaaccgtggagtttgacgagcttatggttaaggaaataaggataacgattaaagccaaaaaccccgttgctgtctccgaaatcttcgtcctgggaaaataaggaggagtaaaacatgaaaaagaaaataagtttcattgttcttgttgccgtattcgcaatctgttcggtttttatgattgcgtgcgataacagaaacaacacgatattcaaggattacgtcagacaagaagtgcccggcgaggttacagacgttgacgaagaagccggcgttactttcgacggcattatcgacgaggacttctgggaaggattgaattggatggaaatgcaatccacggaaagtcacaggacgggcgtcaacaagggcagggacgatatagaggactgctccgtgcgcgccgtgcttaagcttaccgataaaggcatatatgtcgcaatggaaaccgatgaaaaagtagcttacgtcggcgacaacaatttaagcaatccggacgtgtttctcaaaaccggtttgtccgtgtatattgctgccgacgatttgacaagcataacccagggcgcgtttgaaacgggcgtatcgattgacggcaacgtgggttttaaaaagcacattttcggcaattattttaattatcctcaattgggtgtgctttcgggcgttaacataaaaacttcttcggaaaatctaaacggagatatcgatggatacggtatcgaatatttcatgccctggtccactctgggattcgatgaaaagcccgaaaaagtacgcgccactttcgcgataatccgctatgccaaagaagacaaaaccaaccgtatgtgggagtttttggtggacggagccgcctgggataatcctcagacctggccgagattcgctgaaacaggctgctacattccgcccgagggcgaaactttcggcaatcacggcgacagattttataccgacggatttgacctttcaaccgatacgggcgaaaatccttacgtcgtgtcgactgcgggtccggacgccaaactttacataaaagactttgaagataccgtaatgtatgccgaaaccactgtcagcatatccgaaatttacaacgaggacccattccccaaagtcggattcatgtttgcgggcgcgcccacggagcttaacggggaaactcactcaaggtccgttatggcaacgttcgacgtgactgccgacggcaagacgataaggttgctttataccaccgaatccaaactcgatatgttcagttcgtgggactggagttcgcctaagattatgacggttaacaattctttcggcgtgcaggcaggcgaggccaaacttgccgtttaccgaaacggaagcaaattccattatttcatgaacgatatttacgtcggtgaaatgacttacgactacatcgacgacaatactctgacttacgccgctattctttccttcaacgtgggcgcgacttacagcgattacacctttttaacgggggaagaggctgccgcgaaaggcgaagagatggttgcgtccgctcagcctgcgcattatacgattgacggcatagaggacgattgggaggattacgacggaagagtcataggaacatgggcttacgacggcagcggaaaggagtttaccgtcaaggcgatacttaaagacgacggattgtatttccttaccaaagcaaaacacggactttatctcagcggccaggaaacgataacccataattcctctatcgaagtgcagataacgactcagaacggcacttcgtcgcagaatatgttcgtcgcccccgacagcgcaactcttcttaccgcagtcatgaagaccaccgattcgggcgtggaaggctcgcccacacgctacacttcggttgtggaggcattcctgcccataagcattttgcgctccatgaacgcgattgaggacggaaaagtcaggatgggctttgcttggcgcacgggtcttggcgacgaaaccgtgggcagcgcggattatccgactgaagatgattttgaccccgccgaatacgaaatcataaaatctatcggccgcaacgctcaaaagccctatatctggcacatggttaacagtgcgccctgggacaaagacaaccgcagctatatcggcgaggaggggattacgttctcgggtaaaggaacggaacgctctatcgacggcgatatttccgattggttaggctttaaaggccagacagtgcgctcaataggtacgggagattataaggggtcaggctttgaaaccatgttctataaaggcgatgcgggcttgtatttcttcaccaccgctaatcataacaaatatcttttcaacgatttcaaaacgggttatatgactaattttgttttggaaacgggcatcaccagtatggacaatacggcttacgtcagcggcggtgcaaaacagttcttctttacgcccataggttgtatcggacagggcgacggcgtggattacgtcatggaaacccacggtaacgaaaccgacggctataccacttacgtcgagggctttattcccaacgataaaatcgtcaattcttccgaggcggaacgtttcgacccggccacgggtcttgcctcagacggctattcggtccgcatcggcgccgcatggagaacaagagacgataaaatcaccacgcaccaaagaagctcaaacgattactggcagcccgccgacatcgacggctatgacattaaaaatatgtactggctggacgaagacggtatccgtaccgcgcccgacaaaggctcttacttcaatatcgacggcgacgcgtccgactgggatgaagtaagcgaattctacacccagacgggcaacgactccacgctttcccccgacctgcaaagaagcgttgtaaacaaggtttcttaccgcgacgacggtctttatatcctcagcgtaggcaaaacttacaaatacaccgaagacaatttcgtaagcggcaaatccaacaacgcaaatgcattccgcaacacctcggtcgaagtgcagattgccgcacttgacaacagcagcgctcaggcatggatttctccttacgcaaacgtctataccaaggaaatcaattccgcctgtatcgtagtgcccgaaaccgtcaccgttaacgggcagcaacgcgtaagatacaccgtgacgttcgaggcgtttatccccaattctgcactcaacaaactattaaaagcctccgatacctcagcggaaacgcccgcgtccgtaaaactttgcgtaatattcaccaacgtcagcgcgcagggcgacagcggactttcttccgaccccatcgacggaggagtggtcgatatcaatacaagtgctttctatggcagctgggcaaagacaactgtcagcaaacagtaattaatatagataaattaagcttcatacccatactccatattaaaagaagcctttgtcggaaaatccgctaaggcttcttttttcatttgaaaataaataattctttttgtttgaatatttttaaataattcttttttatagactgaatcgaacttaaaaaaccgatcggaagatgcaataatctttttacgattgtacttaatctaattcatcataaattttttgaattattttaccattccaatccatagctaactgttcttttgttataaactgataatataacttgttagattttacaatattccaaaggtattgaagcattttaatatacatcggataatcgttttctattacgttcatagcgatagctaaatattcagcggtgggaatttgacctccgtaaaagccatttatttgtcttgcaataaaattaactgcgcctccgatgccttgcaattcatttttatttgcattagcatttttagattcttccgcgattttaatatgtagaagaaaatgctctaataaattacagtaaaccaatctgtttgctttttgatattcaaaaggattatttgcggcgtatttgtcatttgataataaaattatatactagcaaaaactggaaattattgcaattattcaacacgttgaaaagcagctttttctcaaattaaaaccgccataaccaaacaaaaacataaaaaagaaactaaaaagcgtatgaggatgggaggtcgctgttaaacagtaagtcaatcgaccttgtgcatagtgccttaatataattttttttacatttggatttcgccaggattggcagactatataaaacctttttaagacatatactcatttttcttcttttacgtccaaaaagaaaaaaacctaaaacttttctcacaaaaggagttcgtttcaggtttttactggtggagataatagggctcgaacctatggcctcttgcatgtcaagcaaacgctctaaccaactgagctatacctccgtgcgggataaaatgaccgcgttcaaacggcagtggtggaggtaatagggctcgaacctatgacctcatgcatgtgaagcatgcgcactaaccagctgtgcaatacctccgtaaattcgcctgacaagggcgaaaaagccgtttgcgaaagctattataacacatcggggggcaaatatcaagtctaattcggtaaaaaagcgaaaaaattttgcggtaagttattgtttaattttaatttcatacagcgacgttatatcggtttttgtcgcggcaatgtgtcgttcaggttattcttaacaaaacacaaaccgaagtaaatcgtttgatataacctacatataattttatactataaatattgataaaattgtctgataaaagggagaatgtaaaggagaaaaggaaattatacatatttgcgcttgtgctgacgttgattttgtcttcttttgcgtttgcggcatgttcgcaggaggattatacatacggtttaagttacagcccggtagagggaaaagactaatactgcgttacgggagcgggcaacgcaaaattcgagaaagacatagtcattccctctaagtatcagggtttgccggtgacggaggtttcggacaacgcgtttgcaaacagtgaaatcgagtccgttaccttttccgagaatatggaaagaataggattgttttctttacgttttcaccaattaacagcgatgcttactcttaccggcagtgtcatatattcgcagtcgaggtgcataaaaaaagagaggtatgtttcctctctttttttatggagcggaagacgggattcgaacccgcaacgtccagcttgggaagctgacgctctaccgttgagccacttccgcgaagataatggcattatatcacccgcggcctgaaaagtcaacggtgttaatgtaaattaatgtcaaatcaggttgattttatgtattttttattgtcaaaacgtcaccgaaaagtgttcaatcggtaaaattttacttattcggcgcaaataattgtaataatcggtaaaatatggtataataaaaccaacaaataaaaggagcggaaaaaaatatgagaatgattcttaacgaaaccagttatttcggagcgggctgccgcaaagagcttaagaccgagatggcaaaccgcggctacaaaaaggcgtttgtcgtgtcggataaagaccttgtaaaattcaacgtggcaaagcttgtcaccgacgagctggacgaaatgggcgccgagtacgtgcttttcgacgacgtaaaggcaaatcccaccattaacaacgttcagacgggttacaaactgttcaaggagttcaatcccgacgttattatcgcaatcggcggcggctccgtcatcgatacggcaaaagcgataggcatcatcgccaccaaccccgatttttacgacgtcaagtcgcttgagggcgttgcggacaccaaaaacaaagctttccccatcatagctttcgccaccacttcgggtactgcggcggaggttaccataaactacgtcataaccgacgaagaggcgggcagaaagcttgtctgcgtggatccccacgacattcccgtcatcgctttcaacgacgcggacatgatgaaaaccatgcccaagggacttaccgcggcaacgggtatggacgcgcttacccacgccatcgaaggttacatcaccaaaggcgcgcacgcattaagcgaccttttgtgctggaacagtattaagttcattgcagacaaccttgaaaaagcggtcaaaaacggagccgacgacgccgcgcgcgaaggcatggcttacggcagttacgtcgcgggcatggctttttccaacgtgggccttggcatagtccactccatggcgcatccgttgggcgcaagatacgatatcgctcacggcgttgcaaacgctttgcttctgcctttcgtcatggaatacaatatgtccgcctgcaagaagaaatacggcgacatcgcgcgtgcgatgggcgtggatatcaagggtaaaaccgaaggagaggcggctcaggctgcggtggacgcggttaaaaaactctctaaagccatcggcattccccagactctttcggaaatcggcatcaaagaagagcagcttcctcagcttgcccaggacgcgcttatcgacccgtgcacgggcggcaatcccaaggacgtaaccgtagaggatattcttgccatttacaaaaaagcgctttaaaacccgataaagcaattttacggtcaatcgccgtctgccgtcagtgcaggcggcggttttgtttttgacgaggaaaccgaataaaccgcaaggatttttgattggtatttttgacggattgtcctttagtgcttaaaatacattttaatttaagcgcgcgtcggataaaagcgtccttttgtctgtgttatatgaaaaaatagaggcccgttgcaccaatacgattttttaaagtgcgggaaaaattacatatattcgggcgggggcaaagttttgacattttaagcggcttttgttataattgcattaaaaaaataacaagacgaaataaaaaaatggattatttgtttttcgacatagagtgttgcgacggcagaaacatctgcgaattcggttacgtcgtcgcggacgagaatctcaaaccgataaataaggatattattctcattaatcccgacgctcggtttaatctggggtggagcaaggggcccaagcttttttatccgttcaagcgttactacggcagcggaacgttcgacaaacattacttagagataaagcggcttttcgataaaaaggacaggacggttgtcgggcacgccgcttttaacgacgcgaagtttctttcgtcggcgtgcaagcgttacggattgccgggcattgcgttttcgtatttggatacgcaaaagattttccgccgtatgtttcccgataaaggcaccgtttcgctggacaaggcgtgcgccgcgcttgaaggaaacatggataaaactttgcataaaagcgacgacgacgcggcaatgaccatggacgttttttcaaaaatgctatgtaaagaaagtcttacttttggcgatttcagcttaaagtatgccgattgcggcggtaaggtaagcgaaaacggagagattaccgacgcggacgtcgtgacttttgcggacagacttaaaagggccagacaggacgacaccaacagactaaacaccaacaaccgtaaggttatggaggcgtttattaccctcgtgcgcgcgacggataaaagagaaaacgccttacttcgcggcaaaaagatagcgttcagccgccattacgaaaaaaaccatttccgcgagatgctggcgtttatccaattactaaaaaacaacggcgcgcgctactgtgcgtcgcccgaaaaatgcgattttttcgtacgctacgacgttttggacgaggacggaaaaatcaaagaatgttcaagacttaattccgcgcttgcagtgtcggcgggcggaagaaaacccgtaataataaccgtaaatcagctttccgaatttttaggcgcggacgaaaacgcgcttaaggattttccctttcccgacgaccgcgttttcacccgccccacgaaataatttcgaaaaacgtatttttcctgaaattataaacgattgatattcatatttttttatgtaagtttaaagccgcgcaaaacagatttacgcggctgttttttaaggaaaagaatttttttgctttgttttttgccgaaaagcattttaagtaaagttttaaggttttgccgttatttgccttttaaattcaaaggcgatcagtgcttgtaattatcgtcgccctcgtgacggcttttaagtaacttactttgtcccgacggctgtccggctatttcaaaggccgtaaaaccgtcggacgcggaaaacaagtctttgggcacatagtcacttaaaaagtttttcttttcgttaacgtcggtactgtataaagcagggttttccagcggcagtcccgccaaagggaaatctatctcgtcggcgggcggcattacagtgacgggctgcgcggcaaaaagcggggtttcttcggcgacggcaaaagcggaaggctgttccgccgggtttgtgtccgcggctacgggagaagttttgccgattgcgcccgcaagcgtcagcgacagttttgccgacgcgggtcccaccatttcgtagattaccgacgaagcaagaattatcgtggacagcgtggttcccgtgctgccgcccaatatgcgctcgccaagcgcggcaagacctattgccactcctgcctggggaataagcgcaagccccagacagtttctggtttttttgtcttttttcgttgtcagcgcacccaggaaagcgcccgcgtattttcctataatccttattacgaaatagcctgcgcccacgatacccactgtactgagcccggggatattgagtttcatgcccgataaaacgaaaaacatacacattacgggcggcgtaaagtcgtttacctggtcgaaaagctctttgttgcccgatacgtttatataagccgcgcccagacacatacaggacaacagcggcgaaacgttaagcgcggagcataccgccgtcaaaaagaatattattgcgcaaactatgataagcctgttgtcgcggctgcgcttgcttcctatcatcaggtgaagcacaaaccccagcactatgcctaagccgataagcgcaatgttgtagacaagcggagaaattatagaccaagcgtcaaagccttcgccgctttccatgacgttgactatcgccgcgcataccgaaaacgccagtaagcttaccgcgtcgtccagcgccaccacctgcaaaaccgtatccacgaattcgcccttggcgcggtattgacgtatggtcattatggtggacgcgggcgcggttgccgaccctatcgcgcccaaaagaagacacagcgtaatgggcagacggaaaataaaatacattcctgccgtgataagtaccgcggcgataagcgcctcgaaaacggtgataactattatactcaagccgctttttttaagcgtgctcagcttgaaaaaacgtcccacgccgaacgctatgaaggcaagcgcgatgtccgtcatgaaactcatgccgtttattacgctgaccggcacaagattaagcgcgtaaggtcctattattatccctgcaaaaatgtaagcggtaacattgggcaatttcaaaagcctcgttattctcgtcaaaaagaatcccgtaagcaaaattatcgccagacacaatatgattaccgcgcccgttcccatgtttcggtacaatccgttaagcatttttcctctcccgcaaataaaatatgcttgattatagacgttttgtgtgatataatcaaattatatatttttgcggccccataaattttttttatagctaataaagaggcggcttgcgatttcaacgtaacgcggcagcaaaaacggaataaaatttttttaacggggctatctttcggaattataaatttatgcggcagggaaacggcaaaggggcatggctttttataaataaaatcggctaaataaaaaaccgtttccgttttatcggaaaaagggggtaatcggaaaaatgcttgacccgaaatacgttacgtttatagaagtggtcaaaagcggaagctttaccaaagcggcggataaactgtgtcttacgcagcctgcggtaagcaatcagataaaagcgatcgaaaacgaattcgaggtaaagattttcgaccgtaaaatgcgcgcgcttacccttactcccgaaggggagattctttataaatacgcacagcgcatggaaacgctgaccgaaaacgctcatcgggcgataaaggacagtcttaaggaagtcaggcttttatccgtggggcttactcatacgtcaaaggagaattacgcaccccacgtgctggcgcggttttgtaacgaaaaccccgatactcacataaaaatttttatagacggcataaaaaacatttataaacggcttaagatttacgagatagatctggcgataatagacggaaactattccgacgacaactttctgtcggtattgctggacgtggattatctttgtcttgccgttgccacaacgcacccgtttgcgcggcttaaatccgtttctttaggacagcttaaaaaagaaccctttattttaagacccgttaaatccaattcgcgcacgctgtttgaaaatcatcttatcagccgcggcgaaaacatagattcgttcaacgtgataatggaggtggacagcatcaccaccataaaggagcttgttgcgcgcgggctgggcgttacaatcattgcttacagcgcggtaaaagcggacgtcatgaaagggaatctcagcgttattcccgtcgaaaatctttccatgccgcgcgaaataaacctcgtttatcacaaggatttcgagcataaggaaattctcaacgaaatttacaggatttatcaggaggaaaaaacctcgcgggggaaggacggttgacgtaatcggaaaacggttatacaataaaaccgtaagatgacgtattcacttcaggataaaatttaacggtataagcgtcaatcggcgcgaaaagcgtcggaattatgattttcgggagataaaaattatgcttaaagccatcagaataaaaggacttttttcaagattcgattacgatatcgaaatgaaagaagagggaataaccattcttacggggcccaacggcttcggcaaaagcacggttttttcgcttatagaagcggtcgctgccgcggacgcagaagcgattaaacgcattccctttgaagaaagcgtgcttgtatgcgaggataaaacgattactttacaaaaggacggggatatgcttttcgtggacggggcgccgttaaacaacgggggcatgcagaatctgattgctgacaaatccgaaacgggcgcggtcaaatgcgtggggggaagaaagcttttggacagcgcgcttaacgattgggaaaagcttaaggagtacatcgaggacgtgagggaagtacccaaaaggcttaaggcgcggctaaagagcggcggagagcgggcggcggaaaaggcagaactgtttataaatctgctaaaagacaaattcaatttcaaaacacccgtcttggacgcggcggaaggacttgaattcattgacgcggacggcataagacttaaattttccgacctttccgcaggcgaggctcagcttactgctttttattacgagcttttgttcgaaacccccgacaaagcgcttattttaatcgacgagcctgaaatttccatgcatatcgtctggcagatgcggcttgtttgcgaccttgaaaaaatatgcgccgcgctcaaaggagcaaaggcgatagtcgccacgcattcgccgcagattctgggcggacacaggtcgcttcaggtggacctgggggagcagtatgagcgctaattccatattttccaatcttaccgcggaaaacaccgccgcggaaataagccttattttaagcgcggattacaagcgcaaaaaaacggtaattcttttagagggcgaggacgacgtaaaagttttcagatttctcgtcggcgaggacgtaacgcttatcaaggcttacggcgcgtccacgacggtggataaattcatgcccgaaaatttccccgacgaaaaacgcgtcatcggcatacgcgacaaggattaccagacaaaaaaacggttcgagcgcattttttactgcgattactgctgctgcgaaatgatgcttgtcagcgacgacgaaacgtttgaaaaacttgccgtcaatttttatcgcgggaaactgccttactcaaaactgaggtatgaaattctttccaaactgttttacctttcggttgtgcggttgtgttcggacagataccgttggggactcagaatttccgataccgatttaagcaaaataatcaatccgcgcttaaaccccacgcgggcagcggtaataaattttatcaacgcatacaatccgcgcaacaaaatcaactcaaaacgcgaaaaacaaattgcctatgtcagaaacacgggtaaaatcacggactatcttgaaataaccaacggccacgattttgtggaagcaatgctgatttactgcgctcaaagcagttcctccaataaacgccgctctcttacggataaggcgatttcgggcgcgctgcgttgcgcttactcgctttcggcattcaaaaaaacccgcctgtactccgatttaaccgagtacggcaggcaaaacggttttatcataacgcgcgagtgacgttcgcggttaacaggttggcttaaccgatatttcggcgtcgcggtttataattttccccgtcggatatcggattaagcagtgcggcattattcaatgctcgtcgacgaatactactaaaggcgaataacgaaatccgccgcgttgcgtttttttaaagtaaaagttctcttgggtaaatttaaattcgtctcgctttgattttcgcggacaaaaacttcattgctttatgaccgttcattattttttggcaaagccccgggcattgttaaaagcaaggaaattttattagttaagcgtgtcgccgtaacggttgcgccctgcaaaaaaaatacgcgcgggcgaaacataaagtatcggcaaaagaaaattgtcggacagctttcttatcctttgttcgttttcagggcggtattcgggttcaagactgacgacaaggttgcagtaacccgaaattttgcttaaaataaaacttacccgcgcgtcgccgcccgtcagcacagcgatttttatttttcccgtgttgtaaatctttaccgttcccgaacgggtgtacggctcggaaaccgagcagctgtccgcaacgtccacaagttcgcctttgtgcgcaatcgccgccgacagccttttaattccgccgtattcaagcgtgattccggcaataacggtattgttttgctcgcgcgagtaaagaacaatgtttttaagccgttcgctttctccgccgatttctttaaacaggtctatcggctcgtcgcgcagggggtgcgaaaaaaccgcgacttcgccctgagagtttggatacgaaagaaagccatcttccaaagagtgcgccgtgatgtttattccgccgaaaacatacttttccatagtccatagtatgccgcgcggcattatcccgtgcacggctttcgctgtttaaaaaaaaggattgttccgcggcaattttacccgaataaaaaacttaccgcaaacctacgtaaaaaaattttttttgacgacaaaaatttacttattcggtcaaaggcgcttgattttttgttgacggttttgttttgccgctgtatacttatgaaagcgtcgcaaaaatattcaggacgtaaggagtatgcaaaaatgagcatcgttacaattgtaggtgcgggaatgatgggctctgcgcttgcgtttcccgcaagggaaaacggacatgaggtaaggcttgtaggcactcatcttgaccgcgaaatcatcgacgtcagccgtaaaaccggacgtcaccccaagtttaccaaggactttcccgaaggcgtaaagtactaccaaatcgaggaaatggaggaggcgcttaagggtgccgacctcgtcatcggcggcgtttccagcttcggcgtggattggttcggcgaaaaagtcctgcctgcggttcccgaaaaaacgcccgtgcttaccgtcaccaaagggcttatggataccgaggacggcgaacttatgtgctacccgttcgtgtggcgggacatgctggcaaaaaaagggcttaagcgctgtcttaacgcagtcggcggaccttgcaccagctacgagcttgtcgcgcatgaccagaccgaagtttgcttttgcggcgacgaccccgcggttttaaggaaaatcaaggaaatcatggctaccgattactatcacatttcgctttccgacgacgtcgtgggcgtggaaagcgcggtcgcgctgaaaaacggttatgcgctgggcataactttaacggtgggcgtaaaccagaaaaacttcggactgaagagcgagcttcattataactcgcaggcggcggctttccagcagggcgtcaaagaaatgcgcaagcttatctcccttctgggcggcggcgaggataacatagtcttgggtgcgggcgatctttacgtcaccgtttacggcggacgcactcgtcaggtgggaatccttttgggccgcggactttccgtcaaggaagctttggacgagcttaaaggcgtaacgcttgaatctttggtggtggccacccgagtggcgcgcgccgttaaaaagcttgcggccgcgggtaaggtcgatttaggggaatttccgcttctcatgcacgtagacgctattctcaacgaaaatgccgcagtaaatattccttgggaaaagtttaccttcgagaaattcgggaaataatttttcttaagcgacttaaatcactgtataaacagtttaattttcggccgcgcgggcgacagtttgtctcctttaatcgcggcggacaaaaaataaattaaataaaaggagtcaaaaacatgaaagaactgaaaggaagcaagaccgaggcaaatctgatggcggctttcgcgggcgagtcccaggcgcgcaacaaatacacctattttgcgtccaaagcaagaaaagaaggtttcgtgcagattgccgatatcttcgaggaaaccgccaacaacgaaaaggaacacgccaaaatctggttcaaacttcttcacaacggaataggctctacggaggacaaccttctcgccgccgccgaaggggagaattacgagtggacggatatgtacaagcagtttgccgaggaagcgcatgaagagggctttgaaaatattgccaaacttttcgaaggcgttgccaaaatcgaaaaagaacacgaagaacgttatcgcgcgcttcttgaaaacgtcaaaacgggtgccgttttcgaaagaaagtccgaaaccgtctggcagtgtgcaaattgcggacacatttacgtcggcaccaccgcgcccgaagtgtgccccgtgtgcgctcatcctcaggcgtatttccgtattaaagccgaaaattattgatttaagcctaagccgcgcccgtaaaggcaaatgtcattgcgggcgttttttcgctttaaataaaaaccgcaccgatttataacggagaaatttatatgaataaagtttgtatagagcttaccgacggcagaaaaataaatctggagcttatggagcaatacgcaccgctcgccgtcgaaaattttctgtcgctggttaaattcgggttttacgacggattgtgctttcatcgcgtgattgaaaatttcatgattcagggcggaggctttactcagggcaagagtgcgcttatgcctaaagccgcaccgaggacgataaagggcgaatttaaagcaaacggcgtggaaaacgcgcttaaacatacgccgggagtaatttccatggcgcgcaccgcgtttcccgattcggcttcttcgcagtttttcatctgcgtggaggagcttccttatctcgacggtcaatacgcggcgttcggcaaaacgtgcgacgagcaaagcctggccgtcgccgtcgatatttccaaaaccgccacgggatttctgggcggattttccgacgtgcccgtaacaccggtcgtaatcaaatcaattaaaacagcggactgaattgtccttaatgtaagaaggagagtatcgtcatgaaaattaaaagagaagatttacatatccgcgacccgttcattcttgccgacggcggaaaattttatatgtacggcacctgcaacatggcaaacgcgcttgaagcgaaggataaggaacccaatcagggcttttcttcgtttgtttccctcgaccttgaaacgtttgacggaccgtatcacgctttcgaccgtttcgaagggttctggggcgaaaaatcttattgggcgcccgaagtttacaagctaaaagacggctattatatgttcgccacgtttttttccgaaaaggacggccgccgctgtcagattctgaaaagcgacaatccccttaccggctttactccgtggtcggagccttttacccccgaagggtggtggtgtctggacgcaacgctgttcttccacgagggcaagccttattcggtgttctgtcacgaatggctgcaggtgaaaaacggcgaaatgtggataacggagctttcttccgaccttaaaaaagcggtgggagagcccaagcttatctttaaggcggcggacgcgccctggtcgaaaagctggggcgacggcaactgcataacggacggaccgttcgtgcataaaaacaaaaacggcaaactggtcatgatgtggtccagcggcggggcaaaaggctataccatgggtatggcggtaaacgacggaaaagacgttttttcgggttggactcagctgagtaagccgctttacgccgaggacggcggtcacggtatgattttcgaaaaggacggcaaactttttatttccattcacgcgccgaattcggctgccgaaagaccgcatttcatcgaaataagagaaaccgaagacgggttggaaaccgtctgatttcctttttttcctcaatcggcttttgcgcgtcaggaaatgaggtttcttcattaaacgccggtcttaaggttaaaattattttttacatcaattaagtttactgttatgctacttgcccgttctctcaatcaaggaggacgggcttttttgcagtccgaaagtattaaaattttcatgcgtattttgtttatgaagcttaaaagctttaacgaaaaaaatttttatttttcgttgcggcggcaattcgtcggaagttgtcaaattttgatttgacgatatttatcgcaataaatccggccgttgagcataaaaatcaacagaatatatattataaatatgtaatgccgaattataataacagataaaatatcataaaaaatattttttttcactatatttgacggacggaaaatcagatatttattttataaaaatcgaagaaaagtaaacttttattttaaaaaatatttaaacatttaaaaaaagcattaaaatattatgcatgaaatttaaattagcgggccggaaaattagttttaacccttgacaggcaagtcaaaatagcgtataattggtacaaatattatgtaaatcctgtttaattcaggggagtttacatatacagttaaataaataaattttttttcaggagggagtatgaagaaaaagttagtagttgcacttgtgtttttactttgtctgactacttttgtttttgccgcttgcggcggaacaaccgtagcggaagttaaagccaaaggcgacttcttcacccagacggatggcgtttttgccgctaccgttacgggtgacgttaccgaggtggatattctcggtaaccttgaggtcaacgagggctttacgttaaagttgtattccgataaggaactgacggctgccgtagaaggcaaagcaaaacttaacgtcggcgttaatacgttttatgtaaatgccgaacctaccggtaaaggcgaagctaaatcctatacggttcgcataacgcgcgaggcggtttataagattacctttaaagacggtgacacaatcatcaaagaagttaccgtttccgccggacaaaaagtcgacgagtcggcagtgaccgcgcccggcaagcaaggttataccttcgcgggctggaaggattttgatttcaacaccgcgcccacttccgatatgacggtagaggcgcagtggacggcaaataccgacacgccttacgttgtacagcactataaacaaaacgctgacaaggacggatacgaccttgttgcgaccgctacggaaaatcttaccggaacgaccgacgctaccgtaaccgccacgcccaaagtgggcggcaattttgccggttttgtcgtaaacaacgatttaagcgtaatgtccggtaaagttgcggctgacggttcgcttgtgcttaaggtttattacgatattgcccagattgcatataaagtgcaggtttacgtcgaaaataccaataacaacgagtacagtttagacgtttcgttaggcaagactttgtatgccgacgacggcgaaagtattacctacacgcccgacagcatgacgggatttacggttgacgaagatcgcagcaaccttgaaatcacagtagacggagagaatccgaacgccaatgtggttaacgtttattacaagagggttcgcactcaggtgtcctttaaacagaccgacaatgaccagagccctgttacgcttaccgcaaaatacggcgtaggtcttgtgaaagctgacggcactgccgccaccgctcccgcattcagcggcgagccttccgccaccgccaatgaattctattgggcgaaagacggcacgactgtcgaagctgactttacggcaatgaccgaaagcgccgttacggtcgtcaaaaaggaaagagttgccgtttacaacatcgacttcgaccttaaccttgaaagcgattatttcgaggacggttattcgattgaaattaccggcaacaaaaccgaatacaataagggcgacgaggtagagtttaccgtaagcttaaacgattcttacaacaagaacattaccgtcgattcgcagctttcaaacgtgcagttcgtgttccgtgcgtctaacgcatcggcaggtgcgggcaccgttatttcctgcaagcctcacgatactttaagcggagtttacgtatattcgtttacggctaccgcttcgggtaccgtcagccaggaaggcgaattcgaggaaaatacctataaagtcagcggtcagcttgagcttgccggcgactggggtaaacttgattctttggacgaagtaaccgtagaaatcagtcagggcgctgacgtaagttccgtattggtcggagaagacggtattttctccgttgatcttaaagccggcacgtacggtttgaccatccttttccccgacgacacttaccgttccgtcaacgaattggaaatcgcaacttcttacgacgatccggaagagcttttgacttactcttacgatttcggcaaaattaaagtcggtctggtagatgtttccggttcgcttaaagttaatttcgacggcaccatcgacactgtacccaccgcgcagaacaatgtagttttcagcaatttcagcgctaaggagtatgccgttaaggccaccgcgcagtttgtggacggaactgaaggcgatcccggcttgggcttccggattagggaaagcgaaaaatcgattgagtttgtactgatgagggataaaatccgcatcaacggtaccggtttcgactgggacaaagacaggattgacattaagcacggtttaaccgggttgtgggaaaagggcggaaacgcttttgaatacacgctttacaagagtgcggacgcattccttatgtatgcccgtattatcggcgtggacgatgagcccgtgcgcgtggcaagaataaccgctacacaggcgtatatttacaaaacggattcttatcataatttgtcttcgctcgctacaggcgttatcaacaacattttagcgtccgataatacggcggagttctattccagcgttaacataacgggaggagcaacccttgaagttacctataacgattacggctataaaacctccggcatcggcaataccgttaaagtgcccgattccgttgacggaggaattataacttcttccgttaccgattttaccgacggcgcaaccgtggttatcacagcaactcccgataacggcaaaagagttaaatccttccttgtcaaggttaatgacggcagtttcgtttcggttgaagaatccgatatccaaggcaacttcaccggtaacgtcaacgacggatataattttaactttgtagccgataaggcatattcttacgaattcaaggttgaattcgaagaaggtatcgtaagaaacgattacaccggtaaagtgaccgatatggacaatgacgctcccattgcgaacgcaagcgttgtagcttacgacgttgtggaaggagtgcgcggaaacgcctttgccgaaaccactacgggcgaagacggaacgttcactattaaattgggcgcaaccacttacgaacttgaggttaaggcggaaaactactacgcttattccactcagatagtgatgggcgaaaacgcaaccgacgcatccgataccccggttcaaatcaaaaagatgacggtgggcggcgtcgtttcgttaaacgaaagagtgtttacgtccaatactgaaagcattattcccgcatacgattacgtaacgggaaaagaaaccgcttctaccaagcgtacggcgggccccggcgataagcctttcatgtttaccgtcacgggtgaaaacgctgtaataaaatacaccgttaaacttgacggcatggcttccactgaagccaataaagaattctggccgggcgtaggtattgacctttataatgccaacggcgataatatgaatttcagattattgcgcgacggcgtatccggtacgggtactactaacaatatctacggcgtatacaacaacaccagatatgactttgaaaacggcttccataatgttgacgtttccggtgaaaaaggtaccgttaccgttgacgtgatgttcgtaaaacagggtgacaaagttcacgctttcagcaaactgcccgaagatgaaaaatacagccttgtttattcctttgcaatgtggaacaacgacttcatcggcactcagcttgcttacggtataaaacttgcctgcaacggttccgcaatctgctggatcgattacagcaatatctccatcgatacttccgaggctgccgtaactcaggctatggaaggttataccgtttctccgtttgatttcggcattcacttcggcactcgcaatcaggccgctgtacttcccatggaggagggggcgtataagattgccggcaacaatgctacaagagcgatgagctctcaaaataagtacggcgactttatagtttctgcaaccttcgtcaatgaaaaatatgaccacgacggtaagcttaccgagagcagcgaagcgtggaactctttgggctttgcaatcggcaccgacgaagtaaacaacattctgcttgccgaggcaggcaagagcctgagggcttggtataagtgggacaacgagttcaccaagaaagaaggcgacattgcgggcatggcgcttgataaaaagatcatcgacgtgtataccgcaaacggcggaaagagcaattatgccataggcgcccgcaacgtctttacgcttatccgtaaggacagcacgatttacatgatccgcgacggcatctatcttgccaagatagcagccgaagacggagaggttaacttctactacgcggacggcacgaaggcaaccgattacggtttcagggccaacgatacttcgcttaaccttaaacaaatcttcctcaacgtcctcacggctcccgaagtcatgttgggcgtaggcggtcacggaaacagccttatttatgcgggtgtggaaaattattccgttacctccgaaggtgtgaacgaagcggttgccgcacttgaagccggcatgaaaaacgccattaccgtttctgcaagcgagttcggcgacgcgtctgttaccgttgacggcggcgagtatgtaagcggcacaacgattaccgcaggtaaatccgtcacggtcacctttactcctcagactgaacccaagtatatggtttccgacgtcaaactcagcattgacggagcagaggatgtaagcattctcagcgagcttcaggcgggtgcaggttacgtccgtacttacactttcgctcctttgcagaaaaagacctacgaatttaccgtaacttacgaggaagttccctcaacggtgaattattcggcaaaagttcttgatttcgatgacaaagttactccgcttgccggcatcaccgtaaccgctaaaaaggacggtttggtggtaggctcggctacgaccggcgatgacggtgcatacactatcgaaggacttatgtccggtacttacgattttgtgttctcggcaaacaactactacgagcgcaccgtaacgggaattgaaattaccgcgaacgggggcaacgacggcactaccataaccggtgaagacactactttcaaggcaatggtagtgggcggaagcacgactttgaccagcggtaccacggtatcggccgacaaaaacgcacttaacatagtattcgactacgaacgcggcaatgttaccgcttccacggttgaaggctctaataccggtgttcagcttaacggaagaactttgacgtttacaggcatcaaagacgagtacgccatggctaagttcacctttaccaatcagggcggcggcaccgaaggcgatcccggcataggaatttctttcttcgacggcactaacgaagtgagccttgtattccgtcaagacggcgcacgtcttgccgcacctgcatgggtttctaccatcggcatgggacttaactccggttaccggatcaacaatccgggcagttacgatcttatgattgtacgcgcggatactacttactacatgttctctaaacccgcggcttcgcctaactgggaaatgatttattcggctaccgaatccgaattgagaacattgggcgaaatgggcgatacggaagctaaacttaccggagaagccggattgttcatccgtatgaccttaggagtagatcccgctttgtcgataaacgcacagttctccaatttcgagaccgctgagggcgaggaggcaatcaacgccattatcggcagccataccattaccgttaatgatgtagtcaatgccgaaatagcggtaaccggcgacgaagttacttccgaggcaggcgaaggcaaaacggtttataccgtgcctttgggtaaaacggttaacttgacggttaacgccgcaagcgttgattacctgatttcgggccttaatgtaaacggcgtaactttacaggcaaacacaaattatactttcaccaaactcggtaacaatcttgagattaccgcggtagtggaggagtttgtcggcgcggtagttaccggtaaagttaattacggcgaaaatgcgtggggcgaaaattatgccgacgcaataggctacgacggtgttaccgttactttcaattcggctaaatacaattatgaaacgaaagtcgacgaacaaggacagttcagcatagagcttcctttggatacttttgacgttaccgtttcttctcccgactttatgtcctataccgatactcttaccgtagagtccaccgacgcggtcagctggtctcccgacggaaagttcagtacgtttaagacaggtcagaatgttaaactttccgattccttctcgattgccaaaaattctttgcagtatgtgcccgagacaggatcttatgagtctgtaaaatcggataacactccgtggactacttttaactccatagtgctcaattcttcctctaaagccatttacgagatggaagtgaccgcgctttccgaatggttccttaaaaacaaggcaaacggaaatacgggctactgcaacgacggcgaagattggttgtctttgggcttcatgttcatcaacgcagataaccagtatgtcaaactcggcgcttcgggatacggctttaaggcatttgctactggcggcggcggatggacggagggcggagaatacagcacccctggactcggcagcggcgtatatagggctgcaggcggcgtaagcgtcaagtcggcggcaaactactggaccaagattaccgttgtcaaagacggacttgtctattacttcctgcgtgacgacgtttatttgttcaagtatgacgcttccacaaacgtgattaccgaggcggacggagacacctccgcaaaacctgcgcttaatatgaagtccattctcagctccgacagtttgctgcttatgatcggcacgcagggtaacggtacaaacggcactgcgttcaggaatccttcgatttccaccgttgcttctaccgttgacaactatatcagccgcaacgtaacgtcttcggacagtaaagttacgttcgaaggtttgcaggacggcaagcttgcaatcggaaaagagggcagcgcaatcgttactcccgaagaaggcaatattgtttccgcagtcaaagccaacggaatttaccttgacggcgttgcagacgcaaccggcaaagttaccgttgatcttaaggcggcttcccaatatgtgtacggcgcttacgatatcaccgccgagtatgttgcaacttctgacgccaagaccgtttcgggcactgtgaccggtgaactcttcggggctacggcaggtacggtttaccttaccaacacggtgacgggcattacctacaccgccgattataccgacagcgcttacactgtgtctgttcccgcaggaacttacgaaatcgttgccaagagcagcgttgcggcgtcttatgcggaaaccgtcgaagtaaacgacgcaatgaccaa
